United States Patent Application Publication US 2024/0327476 A1 - sequence listing, part 71

SEQ ID NO: 134084 - DNA, 2055 bp, synthetic construct
  misc_feature 1..2055: note = Description of Artificial Sequence: Synthetic coding sequence
  source 1..2055: mol_type = other DNA
atgttcgcagaggccgccaagaccacccgtccctgcggcatggcggaattcaaggaaaaacctgaggcccctacagagcagctggatgtcgcatgcggccaggagaatctccctgtaggcgcgtggcctcctggagcagctccagccccattccagtacacccctgaccacgtggtaggaccaggagccgatatagacccaacacaaatcacttttcccggctgcatatgcgtaaagaccccatgcttgcccggcacatgctcttgtttgcgacatggagagaactacgacgataattcctgcctcagagatatcgggagtggcggaaagtacgccgaacctgtcttcgagtgtaatgtgctgtgcagatgctctgaccactgccggaaccgggtcgtgcagaagggactccagttccacttccaggtgtttaagacccacaaaaaagggtggggactcagaaccctggaatttatccctaagggccgtttcgtctgtgaatacgcaggtgaggtgctgggtttttcggaggttcaacgcaggattcacttacagaccaaaagcgactctaattacattattgccattcgagagcatgtttacaatggccaggtgatggagacgttcgttgatccaacatatattggcaacattggcagattcctcaaccattcttgcgagccaaatctgcttatgatccccgtgcgaattgacagcatggtcccaaagctcgccttattcgctgcgaaagacattgtacccgaggaggagttgtcctatgattactctggcaggtacctaaatctcactgtctccgaggacaaagaaagattagatcacggcaagctacggaagccctgttactgtggcgccaagtcatgtactgccttcctgccatttgattcaagcttatactgtcccgtggaaaaatcgaatatctcatgcggaaacgagaaggaaccctcaatgtgtgggtccgccccaagtgtcttcccaagttgcaagcgtctgacccttgaaaccatgaagatgatgttggacaagaaacagattcgggccatttttttatttgaatttaagatgggcaggaaggccgctgagactaccaggaatatcaacaacgccttcggccccgggaccgcgaacgagaggacagtccaatggtggtttaaaaaattttgtaaaggggacgagtctctggaagacgaggagaggagcggtagaccaagtgaggtggacaatgaccagttgcgcgccatcattgaggccgaccctctgactacaacgagggaagtagcggaagagctgaacgtcaaccactctactgtggtgcgtcacctgaagcagatcgggaaggttaaaaaacttgataagtgggtgccacatgaactaaccgaaaatcagaagaaccgaagattcgaagtgtcgagctccctgatcctccgcaatcataacgagcccttcctcgatcgcattgtaacttgcgatgaaaagtggatcttgtacgacaaccggagaagaagtgcccagtggctggaccaggaggaggctcccaaacatttccctaaaccgatcctgcatccaaagaaggtgatggtgacaatttggtggtcagccgccggtctgatccattacagtttcctgaatcccggagaaacaatcacttcagagaaatacgctcaagaaatcgatgagatgaaccaaaagcttcaacgcctgcagctcgcactggtaaaccggaaaggccccatcctcctgcacgataatgccaggcctcacgtggcacaacctaccctacagaaactgaatgagttaggatatgaggtgcttcctcacccaccctacagccccgatcttttgcccacaaattatcatgtatttaagcacctgaataactttctgcagggcaaacgatttcataaccagcaggacgccgagaacgccttccaggagttcgtagaaagccagtcaactgatttttacgctacaggcatcaaccaactgatttcacggtggcagaagtgtgtggactgtaacgggagctacttcgattag

SEQ ID NO: 134085 - DNA, 1098 bp, synthetic construct
  misc_feature 1..1098: note = Description of Artificial Sequence: Synthetic coding sequence
  source 1..1098: mol_type = other DNA
atgtttgctgaagccgctaaaaccaccagaccgtgcggcatggccgagtttaaggagaagccagaggcaccaactgagcagctcgacgtggcctgcggccaggaaaatcttcccgtaggggcttggcctcccggagccgcacccgcccctttccaatatacgccagaccacgtcgtcggcccaggggcagatatagaccctactcagatcacgttccctgggtgcatttgcgtgaagacaccctgcctgccaggtacgtgttcttgcctcaggcacggagaaaattatgatgataatagttgcctgagagacatcggctccggaggcaaatatgctgaaccagtcttcgaatgtaacgttctttgtaggtgctccgatcactgcagaaaccgggtggttcagaagggactgcaattccacttccaggtcttcaaaactcataagaaaggctggggcctgagaactctggaattcatccctaaagggaggttcgtttgcgaatacgcgggcgaagtgctcgggttcagcgaggttcagaggcgcatccacctgcagacaaaatccgactctaattacatcattgctatccgggaacatgtgtataatgggcaggtaatggagacgttcgttgatcccacatatatcgggaacatcgggcgcttccttaaccatagctgcgaaccgaaccttctcatgattcccgtgaggattgattctatggtgcccaagttggcactctttgccgcaaaggatatcgtgcccgaagaagaactttcttacgattacagcggacggtacctaaatctcaccgtgagcgaggataaggagcgtctggatcacggcaaactcagaaagccgtgttactgcggagccaaatcgtgcactgccttcctgccattcgattcctctctctattgtcctgtggaaaagagtaacatctcatgcgggaatgaaaaggagccatccatgtgtggaagtgcaccctccgtattcccctcgtgtaaacgactcactttggaggtgtctctttttagtgacaaacagttggctcccccctattccggcaggcaatggctggcatcttttactagcgcatag

SEQ ID NO: 134086 - DNA, 516 bp, synthetic construct
  misc_feature 1..516: note = Description of Artificial Sequence: Synthetic coding sequence
  source 1..516: mol_type = other DNA
atgttcgctgaggccgccaagacgacgaggccctgcggcatggccgagttcaaggaaaagcctgaggctccgactgaacagttggacgtggcatgcgggcaggagaacctccccgtcggtgcttggccacccggcgcagctcccgctcctttccagtataccccagaccacgtggtcgggcccggtgcagacatcgatcctacacagatcacttttcctggttgcatttgcgtgaaaaccccatgcctgcccggcacctgttcctgtttacgccatggagagaattacgatgataacagctgcttgcgggatatcggctcagggggtaaatatgcagagccggttttcgaatgtaacgttctatgtcgctgttccgatcactgccggaacagagtggtgcaaaagggtctgcagttccatttccaggtgtttaagactcacaagaaggggtggggcctcagaaccctggagttcattcctaagggccgcaaggtggaacaccagctatggaagtag

SEQ ID NO: 134087 - DNA, 1101 bp, synthetic construct
  misc_feature 1..1101: note = Description of Artificial Sequence: Synthetic coding sequence
  source 1..1101: mol_type = other DNA
atggactcagatgacgaaatggtcgaagaggcagtcgaaggtcaccttgatgacgacggattgccccatgggttctgcaccgtgacatatagttcaacggatcggtttgaagggaattttgtgcacggcgaaaagaacggccgcgggaagttttttttctttgatgggtctaccctcgaaggatattatgttgacgatgccctccagggccaaggagtgtacacttatgaggatggcggcgtcctgcagggtacctatgtggatggcgagctgaatggccccgcacaggagtacgatactgacggacgattaatattcaagggtcagtataaagataatatcagacacggagtatgttggatttattatcccgatggcggatccttggtcggcgaggttaacgaggatggggaaatgacaggcgagaaaatcgcctacgtttatccagatgagcgcaccgcgttgtatgggaaatttatcgacggcgagatgatcgaggggaaactggcgaccctcatgtccacagaggaagggcggcctcatttcgaacttatgccgggtaacagtgtctaccactttgacaagagcacatcgtcctgcatctctactaatgccctgcttccagacccctacgagtcagagagagtgtatgtagcagagtctttaatctctagcgcaggcgaggggctattcagcaaggtggctgtgggtccgaacactgtcatgtctttttacaacggggtcagaattacacaccaagaagtggattccagggattgggcgcttaatggcaataccttgagcttagacgaagaaacagttattgacgtgccggagccgtataatcatgtctctaaatactgtgccagcctgggacataaagccaatcacagtttcacccccaactgcatctacgatatgtttgttcatcccagatttgggcccatcaaatgtatccgcactctacgggccgtggaggccgatgaagaactgacagtcgcctacgggtacgatcattcacctcctggcaaaagcgggccagaagccccggaatggtaccaagtggaactcaaagcctttcaagccacgcagcagaagtag

SEQ ID NO: 134088 - DNA, 5124 bp, synthetic construct
  misc_feature 1..5124: note = Description of Artificial Sequence: Synthetic coding sequence
  source 1..5124: mol_type = other DNA
atggatcaggagggcggaggagatggacagaaagccccctcgttccagtggcgcaattataagctgatcgtggatcctgccctggatcctgctcttagacgtcccagccagaaagtctacagatacgatggagtgcactttagtgtgaatgacagcaagtatatcccagtggaggacttgcaggaccctcggtgccatgttcggagcaagaacagagacttttccttgcctgtccccaaattcaagcttgacgaattttatataggtcagattccactgaaagaagtgacgttcgcacgccttaatgacaacgttcgggaaacctttctgaaggacatgtgcaggaaatacggcgaggtcgaagaagtggagatcttgctccatccacgaacacggaaacacctgggactagctagagtcctgttcaccagtactaggggagccaaagagactgtgaagaatctacatttgacatctgtgatggggaatatcatccacgctcagctagacattaagggccagcaaagaatgaaatattatgaactgatcgtgaacggttcctatacaccacagactgttcctacagggggcaaggctctatctgaaaagtttcaaggatcaggggctgcgactgagaccgcagaaagtcggagaaggtcctcctccgacacagctgcttatccggcaggcacaacagcagtcggcactccgggaaacggcaccccttgtagccaggacacctcattctcctcatccagacaagacacaccctctagtttcgggcagtttaccccccagtcatcacagggtacaccttacaccagccgcgggagcacgccctactcacaggacagcgcttatagctcaagcactactagcacgtcttttaagccccgtaggtcggaaaattcttatcaagatgcattctcacgaaggcacttctcagcgagctccgcgagcactaccgccagtacagcaatagctgctacaaccgctgcaacagccagtagcagcgcctcttcatccagtctgagttcttctagtagctccagttcttcctcctctagctcccaatttagaagctcagacgcaaattacccggcgtattacgagtcttggaacagatatcagcggcacacctcttatccacccagacgggctactcgcgaggaaccacccggcgccccgttcgccgagaataccgctgaacgctttccaccctcatacacctcatatctgccgcctgaaccctcaaggcccaccgatcaggactatcgccctccggcttcagaggccccccctcctgaaccgccggaacctggaggcggtgggggcggagggggtccatccccggagcgagaagaggtcagaacatcgccaagaccagctagcccagcaagatccgggtccccagcccccgagacaactaacgaatccgtgcccttcgcgcagcactcttcattagatagccggatcgagatgctgctgaaggaacagcgctccaaatttagcttcttggcctctgatactgaagaggaagaagaaaacagctcaatggtgctcggggcacgcgacaccggttccgaagtgccatccggaagcgggcatgggccctgcacccccccaccggcaccggccaacttcgaagacgtggctcccaccggatctggagagcctggagctactagagagagtcctaaggcaaatggccagaaccaagcgtcaccttgttcatccggcgacgacatggaaatcagcgacgacgatcgcggcggcagccctccgcccgccccaacccctcctcagcagcctccgcccccacctccccctccacctcccccacctccttatctggcaagcttgccattgggatacccaccacaccagcctgcttacctgctgccgcccaggccagacggaccaccaccgccagaatacccccctcctcctccaccgcctccccacatttacgactttgttaacagtttggaactgatggatagactgggggcacaatggggcggcatgcccatgtccttccagatgcaaacccagatgctgaccagacttcaccaactgagacagggcaagggtctgatagcggccagtgccggacctccgggaggagcgttcggcgaggccttcctgccctttcctcctccccaggaggctgcatatggattgccctatgccctgtacgctcagggccaagaaggtcggggcgcctattcgcgcgaggcttatcacctgcccatgcctatggcggctgaaccccttccctcgagctcagttagcggggaggaggccaggctgcctccccgagaggaggcagaattggcagagggcaagacactgccaacggcaggcaccgtaggacgtgttcttgcgatgctggtgcaggagatgaagtccatcatgcaacgcgatttaaaccggaagatggttgaaaacgttgcatttggcgccttcgaccagtggtgggagtccaaagaggagaaggcaaaaccatttcagaacgctgcaaaacaacaagcaaaggaggaagataaggaaaagacgaaactcaaagaacctggcctcttatcattagtggactgggctaagtctggtggcactaccggaatcgaggcgtttgctttcggttctggtttacgcggcgctctacgacttccttccttcaaagtgaagcggaaagaaccctctgagatatcagaagcctcagaggagaagaggccccgacccagtactcctgccgaggaggacgaggatgatcctgagcaggagaaagaggctggcgagccgggccggcccggcaccaagccgccgaaaagagacgaggaacgcgggaagactcagggcaagcacaggaaatccttcgcgcttgacagcgagggcgaagaggcttcccaggaatcaagcagcgagaaggacgaggaggatgacgaggaagacgaagaggacgaggacagagaagaggctgtggatacaaccaagaaagaaactgaagtgtctgatggcgaggacgaggaatcggacagttctagcaagtgctcactctacgctgactcagatggcgagaacgactcaacatcggactccgagtcctcttcgtcttcatcatcttcctcatcaagttcgtcaagtagtagcagttcttcatcctcaagcagtagtgagtcaagtagcgaagatgaagaggaggaggagcggcccgcagccctgccatctgcctccccaccaccccgtgaagtgccagtgccaacaccggctcctgtcgaggtacctgtgcccgaaagagtcgccgggagccctgtgaccccattaccagagcaggaggccagtcctgcaaggccggctggcccaacggaagagtcccctccctcagcgccgctgcggccacccgagcctccggctggacccccagcccccgctcctcggcctgatgaacgcccctctagtcccatccctttgttgccaccccctaagaaacggagaaaaactgtcagtttttctgcgattgaggtagtgcctgctccggagcctccacccgccacaccacctcaggccaagttccccggacccgctagccgcaaagcgcctcggggggtcgagcgaacgatccgcaacctgccactggaccacgcctccctggttaaaagttggcctgaggaagtttctcggggtggcaggtctagagccgggggacggggccggctaacagaggaggaagaggcagaacctggcactgaagtggatttggctgttctcgcagacttagcactgactccagctcgccgcgggttacccgccttaccagccgtcgaggacagtgaggccacagaaacaagcgacgaggccgagaggccacggcctctgctgagccacatcctgttagaacacaattacgccctggcagtgaagcctactccgcctgcgcctgctctgcgcccccccgaacctgtgccagcccccgcggcattgttcagctcccccgcggacgaggtcttggaggcaccagaggtggtggttgctgaggccgaggagcccaaacctcaacagcttcagcagcaacgtgaggaaggtgaagaagagggggaagaggagggagaagaggaggaggaagagtctagcgatagctcatcttcctctgatggcgagggagcattgaggcgcagaagccttcgatcccacgcaaggaggcggaggccaccccctcctccaccgccccccccaccaagggcttacgagcccaggagcgagtttgagcagatgacaatcctttacgacatttggaattccggactcgactctgaggacatgtcctatcttagattaacgtacgagcgactgctgcaacagacctctggagcagactggctcaatgacacccattgggttcaccataccatcacaaatcttacaacccccaagagaaaaaggcggcctcaggacggccctcgagagcaccagactggaagcgcaaggagcgaagggtactacccgataagtaagaaggaaaaagacaagtatttggatgtctgccctgtgtcggcccgtcagctcgaaggagttgatacccaggggacaaatagggtcctgagcgaacggagatctgaacagagaaggctattatctgccattgggacgagtgccattatggactcagatctgttaaaactgaatcagctcaaatttcggaaaaaaaagctcagattcggccgttcccgaatccatgaatgggggctgttcgcgatggagcccatcgctgcagacgagatggtgattgagtatgtaggtcagaatatcagacagatggtcgcagacatgagagaaaagcgctacgtgcaggaaggcataggtagcagttatctgtttcgggtcgaccacgataccatcatcgatgcaactaagtgtgggaacctcgcgagatttattaatcattgttgcaccccgaattgctacgccaaggtgattacgatcgagagccagaagaagattgtaatctactccaaacaacctatcggggtcgatgaagagatcacctatgactacaaattccccttagaagacaataaaatcccttgtctgtgcggtacagagagttgtcgagggtccttgaactag

SEQ ID NO: 134089 - DNA, 213 bp, synthetic construct
  misc_feature 1..213: note = Description of Artificial Sequence: Synthetic coding sequence
  source 1..213: mol_type = other DNA
atggaccaggaaggaggtggagacggacaaaaagcgccatctttccagtggcggaactacaaacttatcgtggacccagccttagatccagctttgcgcaggccctcccaaaaggtttaccgctatgatggagttcacttctccgtgaacgacagtaagtacattcctgtcgaagacctccaggaccctaggtgtcacgtgcggtccaagtag

SEQ ID NO: 134090 - DNA, 744 bp, synthetic construct
  misc_feature 1..744: note = Description of Artificial Sequence: Synthetic coding sequence
  source 1..744: mol_type = other DNA
atggatcaggaaggcggaggagacggacagaaggccccttcttttcagtggagaaattataagctgatcgtggatcccgcattggacccagctctaaggcgcccatctcagaaagtttatagatacgacggagtgcacttcagcgtgaacgattccaaatacattcctgtcgaagacctgcaggatccaaggtgtcacgtgagatcaaaaaacagggatttctctctgcctgttccaaagttcaaattggacgaattttatattgggcaaattccgctgaaggaagtgacattcgctcggctgaacgacaatgtgagggagacattcctaaaagacatgtgtcgaaagtacggggaagtggaggaggttgagatcctcttgcaccctcggacacgaaaacatctcggcttggctcgagtactgttcaccagcacacggggcgcgaaagagaccgtgaaaaacctgcacctgaccagtgttatgggaaatataatccacgctcaactggatataaaaggtcaacaacgaatgaaatactacgagctcatcgttaacgggagttataccccccagactgtccctactggggggaaagcattgagcgagaaattccagggcagcggagctgccactgagaccgctgagagcagacgtcgcagctcttccgacactgcagcttatcctgctggaactactgcagtgggaacaccaggtaacggtaccccatgttctcaagacacgtag

SEQ ID NO: 134091 - DNA, 5772 bp, synthetic construct
  misc_feature 1..5772: note = Description of Artificial Sequence: Synthetic coding sequence
  source 1..5772: mol_type = other DNA
atggagaattcccacccaccgcaccaccaccatcaacagccgcctccccagcccgggccctccggagagcggaggaatcaccattggagatcgtacaagctgatgatcgacccagccctcaagaaagggcatcacaaactttataggtacgacggccagcactttagccttgcgatgagcagcaacagaccagttgagatagtcgaggatccaagggtagttggaatctggaccaaaaataaggaacttgaactcagcgtcccgaaattcaagatcgatgaattctacgtgggaccagtgccaccaaaacaagtcacattcgcaaaactcaatgacaatatccgcgaaaacttcctgagagatatgtgcaaaaagtacggagaggttgaggaggtggaaattctgtacaaccctaagacaaaaaagcacctgggtattgctaaggtcgtgtttgctactgttagaggggcaaaggacgcggtgcagcatctgcactccacttccgtcatgggtaacatcatccacgtggagttggataccaagggtgagactaggatgcgcttttacgaacttttggtgaccggccgctatacaccacagaccttaccagtgggagagctcgacgctgtatctcctattgttaatgaaaccctgcaactctccgacgcactgaaacggcttaaagatggaggcctttccgccggatgtggatcagggagcagttccgtgacaccaaactccggcggtacacccttcagtcaggacacagcctactctagttgtcgactggatacgccgaattcctatggccagggaacccccttgaccccgcggctgggcacaccttttagccaagattcctcatattcatcgcggcaaccaaccccgagctacttattttctcaagatcccgccgtcacatttaaagcgagacggcacgaatcgaaatttactgacgcatacaaccggcggcatgaacatcactacgtgcacaattccccagccgtgaccgcagtcgcaggggcaaccgctgcattccggggaagttcagaccttccttttggcgccgtggggggtacgggagggagctcaggcccccctttcaaggcccagccccaggatagcgccacattcgctcacaccccacctccggcacaagcaaccccggcccctggatttaagtccgccttctctccatatcaaacaccagtggcccacttcccgcctccccccgaggagcctacagcaacggccgcctttggtgcacgtgactctggagaatttaggagggccccggctcccccaccgttgcctccggctgagccactggcgaaggaaaagcccgggactcctcccggcccccctcccccggatactaactccatggagctgggagggcgccccaccttcgggtggtctcccgaaccgtgtgattcccctgggacccccacgctcgagagcagcccagcaggacccgaaaagcctcacgactccctggacagccgaattgaaatgctgttgaaggaacagcgcacgaagttgctcttcctgagggaacccgactctgatacggagctacagatggagggaagtcctatctcctcttcctcctcacaattgagccccctggcaccttttggaactaacagccagccagggttcaggggccctactccaccgagcagccgcccatcatcaactggtctcgaggacatctcccccacccccctgccagactctgacgaggacgaggagctagacctaggcctgggcccacggcctccaccagaacctggaccgcctgatcctgcggggttactgtcccagaccgccgaagtggctctcgacctcgtgggagacaggacgcctacctcagagaagatggacgaagggcaacagtcttcgggcgaagacatggagatctcagatgacgaaatgcccagcgccccaattacttcagccgactgtcctaagcctatggtcgtaacacccggcgccgcagccgtggcagctccatcagttctggcaccaactttgcccttacccccaccccccggatttcccccattgcccccaccccctccaccccctccaccacagcctggatttcccatgcccccgcccctcccaccaccgccccccccacctccacccgctcaccccgcagttacggtacctccccctccactgccagctcctcctggtgtcccacctcccccaattctgcctcctttacctcccttccctccaggcctttttccagttatgcaggtagacatgagccacgtgctcggcggccaatggggcggtatgcccatgtcattccaaatgcagacccaggtgttgtctaggctaatgacgggacagggcgcttgcccctacccccccttcatggctgcggccgcagccgcggcctcagctggcttgcagtttgtgaatttacctccatatcgggggcccttttccctatcaaattctggaccgggacgcggtcagcactggcctcctctgcctaagttcgacccatctgtgcctccccctgggtacatgccccgtcaggaggaccctcacaaggcgaccgtcgatggcgtgttgctggtcgtcttgaaggagctcaaggccatcatgaaacgagacctcaaccgtaaaatggtcgaagtggttgcctttagggccttcgacgagtggtgggacaagaaagaacgcatggccaaagcctcccttacccctgtcaaaagtggggagcacaaggacgaggatcgaccgaaacccaaagaccgtatagcttcgtgcctcctcgagagttggggaaagggggaaggcctgggctacgagggtttagggctgggaatcggactgcggggagccataagactgcctagctttaaagtaaaaaggaaggaacctcctgacaccacgtcatccggtgaccaaaagaggttgcggccatctacctccgttgatgaggaagacgaggagtccgaacgtgagcgggatcgggacatggcggacaccccctgcgagctagccaaaagagatccaaagggggtgggcgttcgaaggcgccctgcccggcccttggaactggatagtggtggcgaagaagatgagaaagaatccctcagcgaagagcaagagagcactgaggaagaggaagaggccgaagaggaagaagaggaagaggacgacgacgacgacgatagtgatgatcgcgacgaaagcgaaaacgacgacgaggatacagctctgagtgaggcttccgaaaaggacgagggagattcggacgaagaagagaccgtgtccatcgtaaccagcaaggccgaggctacgagctctagtgagagcagcgagagtagcgaatttgaatcatcttctgaatcaagtccatcctcgagcgaagatgaagaggaggtggtggcacgggaggaagaggaagaagaggaggaagaagagatggtggcagaagaaagcatggctagtgcagggccagaagacttcgaacaggacggtgaagaggcggctctggccccaggagcccctgccgtggactctctgggaatggaagaagaggtggatatcgaaaccgaggccgttgctcctgaggaaagaccatctatgcttgatgagccacccctgcccgtgggagtagaagaacctgctgatagccgggaacctcctgaggagccgggactcagtcaggagggagcaatgctcttgtctccggagcccccagcaaaagaagtggaagctcgcccaccactgagccctgaacgtgccccagaacacgatttggaggtagagccggaaccacctatgatgctgccactgccccttcagccccctctgcccccccctagaccccctcgaccaccgtcgccaccccctgaaccagagactaccgatgcatcacacccctctgttcccccagagccactggccgaggatcaccctccccacacacctggcctgtgcggttctctcgctaagtctcagagcactgagacagtacccgcgactccgggcggcgagccccccttgtccggcggtagtagcggcctgtctttgagcagtcctcaggttcccgggtcaccattttcatatcctgcaccaagcccttctctgtcaagtggcgggctgccgcgaaccccagggcgggacttttcctttacccctacttttagtgaaccatcgggtcccctgcttttgcctgtgtgccccctgccaaccggcagacgagacgaaagaagtggtcctctagccagcccagtactgcttgagacagggctccccctgcctttgcctttgcccctgcccctccccttggcccttccggccgttcttcgcgcccaggctcgggctcctactccactgcccccactcctgccagcaccactcgcttcctgtccgccacccatgaagaggaaacccggtagaccacgacgctctccaccctcaatgttgtctctggacggtccactcgtcaggccacccgccggcgcagccttgggacgggagttgctgctcctgccaggacagccccagacgccagtctttccttcaacccatgacccccgaactgtgactttagacttccgcaacgccggtataccggccccaccgccacccttgcctccccaaccaccccccccacccccgccacctcccgtcgagcctaccaaactgccattcaaagagctggataatcagtggccttctgaggcgattcctcccgggcctcgcggcagggacgaagtgacagaggagtatatggagctcgctaaatctcgagggccgtggagaagacctcctaaaaagcgtcacgaggatctggtgcctccggccggctcaccagagctgagccccccccagcctctcttccgccctagatcggaatttgaggagatgaccatcctgtacgatatctggaacggcgggatagatgaggaggatatcaggtttttgtgtgtcacctatgaacggctgctccaacaggacaatggcatggattggttaaatgacactctgtgggtgtatcacccctctacttctctttcctccgcaaagaagaagaaacgggacgatgggatacgtgaacacgtcacgggttgcgcaaggagcgaagggttctacacaattgataaaaaggataagctgcggtatcttaacagttctagggcctccacagatgaaccacctgctgatacccagggaatgtccatacctgcccagcctcatgcttccacccgcgctggcagtgagagacggtccgaacaaagacgactcctgtcctctttcactgggtcttgcgacagcgatctgctgaaattcaatcagctgaaatttcggaagaagaaactgaaattttgtaaaagccacattcacgactggggcctttttgctatggagcccatcgccgcggacgaaatggtcatcgagtatgtggggcagaatattcgccaagtcatagccgacatgagggagaagcggtacgaggacgaaggaattggaagttcctacatgttcagagtagatcatgacaccattatagacgcaacaaagtgtggaaactttgcccgttttattaaccacagctgtaaccccaactgctatgcaaaggtgattaccgtggaatcccaaaagaaaatcgttatatactctaagcagcacattaacgtgaatgaggaaattacatacgactacaagttcccaattgaagatgtgaaaatcccctgcctgtgtggcagtgagaactgcagaggcacactgaattag

SEQ ID NO: 134092 - DNA, 5772 bp, synthetic construct
  misc_feature 1..5772: note = Description of Artificial Sequence: Synthetic coding sequence
  source 1..5772: mol_type = other DNA
atggaaaatagccatcctccccaccatcaccatcagcagcccccccctcagccaggcccctctggagagagacgcaatcaccactggcgtagctataagctgatgattgatcctgctctcaagaagggacaccacaaactttatcgatatgatggtcagcacttttctctggccatgagtagcaaccgccctgtggaaatagttgaggacccaagagttgtcggaatctggactaagaataaagagttagagctgtctgtgcccaaatttaagatcgatgagttttatgtcggtcctgttccgccaaaacaagtcacattcgccaagttgaacgacaacatcagagaaaacttcctacgggacatgtgcaaaaaatacggtgaggtcgaggaagtagaaatcttgtacaaccccaaaactaagaagcacctaggaatcgccaaagttgtgtttgccacagttcggggagccaaggatgctgtgcagcacctgcactccacctccgtgatggggaacattatccatgtcgagctggacactaaaggcgagaccagaatgcgattttatgagctgttggtcacaggccgctataccccacaaacactgcctgtgggcgaactggatgccgtgtcaccaatcgtgaatgagacacttcagttgtccgatgccctaaagcgtctgaaagatggtggcctgagtgcaggatgtggctcaggatcctcctcagtgacacccaattctggcggaacaccattttcccaggataccgcatacagcagctgcagactcgatacacccaactcttatgggcaggggacccctctgaccccaagactgggtacccccttttcgcaggattcctcttacagttccaggcagcccacgccatcctatctgttctcccaggatcctgcagtgaccttcaaagcacgccggcacgagagtaagttcacagacgcttacaatcgaagacatgagcaccattacgttcacaacagtccagctgtcacagcagtggccggcgctaccgccgctttcagaggtagttcagatcttccattcggggctgtcggcggtacagggggatcaagcggccccccatttaaagcacagccacaagattccgccacctttgctcacaccccccctcccgcacaggctacaccggcgcccggattcaagtctgccttctccccttaccagacaccagtggcgcactttccgcccccccctgaagagcctacagccaccgcggctttcggcgctcgcgattcaggggagttccggcgcgccccggcacctcctccgcttccacctgccgaacctttggccaaggaaaaaccaggcactccccccggcccacccccccccgacacaaacagcatggagctggggggtcgcccgacatttggatggtccccagagccttgtgattcccctggcaccccaaccttggagagtagtcctgccggaccagaaaagccacacgatagtttagattctcgtattgagatgctcctgaaggaacagcggaccaaacttttgttcctgagagaacccgatagcgacacagagctacagatggaagggagtcctatttcctcaagcagcagccagctgagtccactggccccatttgggacgaactcccaacctggtttccgggggcccacacctccatcctcccgaccgtcatcaaccggactggaggatattagtccaacacccctgccagatagcgacgaggatgaggagctcgatctcggcttaggtccccggcctcccccggagccaggcccaccggaccccgcgggtctcctgtcacagactgctgaagtggcattagatctagttggagaccggactcctacgagcgagaagatggatgagggacagcaaagctcaggcgaagatatggagatcagcgatgacgaaatgcccagtgctccaatcaccagtgctgattgtccgaagcctatggtggtaacaccgggggctgcagctgttgctgctccatctgtcctggcacctactctgccactgccaccaccccccggattcccaccactgcctccaccaccaccccctccaccaccgcagcccgggttccccatgcctccgccactgcctcctccacccccgcctcccccccccgcacaccccgcagtcaccgtgccacccccccctcttcccgcccccccgggtgttcctccccctcccatcctgccccccctaccccccttccctcctggcctcttccctgttatgcaggtggacatgagtcatgtgctgggcggacaatggggggggatgccaatgtcgttccagatgcagacacaggtgctgagcaggttaatgacaggacagggcgcttgtccctatccaccattcatggcagcagccgcagccgccgcctctgcgggacttcaattcgttaatctcccgccttacagaggtcccttctcactgagcaacagcggacccggccgtgggcagcactggccacctctgccaaaatttgatcccagtgtcccccccccaggatatatgccccggcaggaagacccccacaaagctaccgtcgatggtgttctgctggtggttttaaaagagctgaaagcgataatgaagcgtgacttgaatagaaaaatggtggaggtcgtagcttttcgagccttcgatgaatggtgggataagaaagaacgaatggccaaggctagcttaacccccgtgaagagcggggaacataaggatgaggatagacctaaaccaaaagataggatcgcaagttgcctacttgagtcgtggggcaagggagaaggcttggggtatgagggcttagggttggggataggcctacggggcgcaattcggctcccaagtttcaaggtgaagcgtaaggaaccacccgacacaacctcatcaggtgaccagaagcgcctacgcccttccactagcgtggacgaggaagatgaagaaagcgagcgtgagagagatcgggacatggcggacactccatgtgagctggcaaagcgggatccaaagggcgtgggtgtgagacggaggcccgcaaggccactggaactggacagtgggggcgaagaagatgagaaggagagcctgtctgaagagcaagagtctactgaagaagaggaggaggccgaagaggaggaggaggaggaggatgacgacgatgatgactcagatgaccgcgatgaaagcgagaacgatgacgaggatacggctctttcagaggcatccgagaaagacgagggggactctgatgaggaggagaccgtatctatcgtgacatctaaggcagaagcaacctctagcagcgagagctccgagagcagcgaattcgaatcctcgtcggaaagtagcccctctagcagcgaagatgaggaggaagttgtggccagagaggaggaggaagaggaagaagaagaggaaatggttgccgaggagagcatggcctcagcagggcctgaagattttgaacaagatggtgaggaagccgcactggcacccggcgctcccgcagtcgatagtctggggatggaggaagaagttgatatcgagacagaggctgtggcacctgaggagaggccgagcatgcttgacgaacctcctctccccgtgggagtggaggagccggcggattccagagagcctcccgaagaacccggcctgagccaggagggtgccatgttactgtcacccgaaccccctgcaaaggaggttgaagcccgtccccctctgagtccagagcgggcccctgaacatgatttagaggtagagcccgagccgccaatgatgctgcctctgcctttgcagcctcctcttcctcctcctaggcccccccgcccaccatcacccccacctgaaccagagacaacggacgccagccacccttccgtgcctccagaacccctggcagaagatcaccccccacatacacctggtctatgcggaagcctggccaaaagccagtccaccgaaaccgtgcctgctacacctgggggcgagcctccactgagcggaggatcatccggactgtccttatcttcaccacaagtgccaggatcgccattttcctacccagccccatcccctagcctttccagcggcggattgcccaggacgcccggccgagacttctcattcactccgactttttcagaacccagcgggcctttgttgttacccgtctgcccgttgccaaccggacgccgtgacgagaggagcgggcccctcgcatcgcctgtgctactggagaccggcctgcccttgccgctccctctgccactccctctacctctcgcactgcccgccgtgctccgagctcaggcccgagctccaacccccctgccacccctcttacccgctcctctggcctcctgcccgccaccaatgaagcggaagcccgggcggcctcggcgcagccctccctccatgctgagtctcgatgggccccttgtcagaccccccgccggtgcagctctcggtcgcgaacttctgttgctcccaggccaaccccagacacccgttttcccatccacacatgacccacgtacggttactttggactttcgtaatgcagggatcccagcgccccctccccctcttccgcctcagcctcctccccccccacccccccctccagtggaaccgaccaaactcccttttaaagagttggataatcaatggcccagtgaagccatccccccaggccctagaggacgcgacgaagtcactgaggaatatatggaactcgcaaagagccgcgggccatggcgtcgaccaccaaaaaagcggcatgaagacctcgtcccgcctgccggcagccctgagctaagtcctcctcagcccctgttccgtccacggagcgagtttgaagagatgaccattctgtatgatatttggaatggaggcattgatgaggaggacattaggtttctctgcgtgacatacgagcgcctcctccagcaagataacggaatggactggctgaacgatacattgtgggtctatcatccttcgacatcactgtcgagtgcaaagaaaaagaaaagagacgatggcattcgcgagcatgtgacaggatgcgctcggtctgaaggcttttataccattgacaaaaaagataagctgcgctacttaaatagctctcgcgccagtactgatgaacccccagccgatacccaaggcatgtccatccctgcgcaaccacatgcttccacaagggctggctcagaacgccgaagcgaacagcggcgactcctgtccagttttaccggaagttgcgatagcgatctcctgaagttcaatcagctgaaatttaggaagaagaagctgaagttctgcaagagtcatatccacgactggggcctttttgccatggaaccaatcgcagcggacgaaatggtgattgaatatgtggggcagaacattcggcaggttatcgctgacatgcgtgagaagcgttacgaagatgaaggcatcggatctagctatatgttcagagttgatcatgacactatcatagacgccacaaaatgtggcaattttgctaggtttataaaccatagctgtaatccaaactgctacgcaaaggttattacggttgaaagccagaagaagatcgtgatttactcgaagcagcatatcaatgtgaatgaggagatcacctatgactataaattccccatcgaggatgtgaagattccctgtctgtgtggttctgagaactgcaggggcactctgaactag

SEQ ID NO: 134093 - DNA, 7695 bp, synthetic construct
  misc_feature 1..7695: note = Description of Artificial Sequence: Synthetic coding sequence
  source 1..7695: mol_type = other DNA
atgaaacagcttcaaccccaacctccccctaaaatgggtgacttctacgaccccgaacaccccacccccgaagaggaggaaaacgaggccaagattgagaatgtgcagaagaccggtttcatcaaagggccaatgttcaagggggtagcatcttccagattccttcccaaggggacaaaaaccaaggtgaatctggaggagcaggggcggcagaaggtctcgttctctttttctctgactaaaaagacactgcaaaaccggtttctaacagctctgggcaatgaaaagcagtcagacaccccaaacccccctgccgtgcctctgcaggtggatagcacaccaaagatgaaaatggaaattggcgacaccttgagcactgcggaagaaagttcacctccgaaaagcagggtcgagttgggcaaaatccacttcaaaaagcatttacttcatgttaccagcaggcctctgttggccaccaccaccgccgtcgcctccccgcctacgcacgctgcccccctgccagctgtgatcgcggagtccactaccgtagactcccctcctagcagtccaccaccacccccgccaccggcccaagccacgacgctttcctcaccagctcccgtcacagagccagtggccttgcctcatacacccatcacagtgctgatggctgcacctgtgcccctcccagttgatgttgccgtgcgctccttaaaggagccaccaataatcattgtacccgaaagcttggaagccgacaccaaacaagacaccatcagtaatagccttgaggagcacgtcacccagatattaaatgaacaggcagacatctcctcgaagaaggaggattcacacattgggaaagatgaggagatccccgatagctccaaaatctctctgtcctgcaagaagaccgggtcaaagaaaaagtctagccagagcgagggaatcttcctcggctccgaatccgatgaagatagtgtgaggacaagtagcagtcagagatcccacgacctgaaattctccgcatctattgaaaaagaaagagacttcaagaaaagcagtgccccgctcaaaagtgaagatctcgggaaaccatcaaggagcaagacagacagagacgacaagtacttcagctatagtaaactggagagggatacaaggtacgttagctcgagatgtcgaagtgagcgtgaaaggcgccgaagtcgatcccactcacgatccgagaggggctcaagaacaaatttaagttactctcgctctgaacgcagtcactactacgactctgatcggcgttatcacaggtcatctccctatcgagaaagaacacgatactcaaggccctatacagataaccgcgcccgcgagagcagcgactccgaggaagagtacaagaagacatattctagacggacttcttctcattcttctagttaccgggacctgcgcacttctagctatagcaagagtgacagggattgtaaaactgaaaccagttacctggagatggagagaagagggaagtactcaagtaaactggagcgggagtctaagaggacgtctgagaacgaagcaatcaaacggtgttgttcaccgcctaacgagctggggtttagaagaggctcaagttactccaagcacgatagttcggcaagcaggtacaagtccacactttctaaacctattccaaaatccgacaaattcaagaactcattctgttgcactgagctgaacgaagagattaaacagagtcactccttctcgctccaaaccccttgttctaagggtagtgagctgagaatgattaataaaaacccagaaagggagaaggcaggctctccggccccttctaatcgcttgaatgacagccctacactcaaaaagcttgacgagctccctatttttaaatctgagttcatcacgcatgactcccacgactctattaaggagctggactctttgagtaaggtgaagaatgaccagttaaggagcttttgcccaatagagcttaacatcaacggcagccccggcgcagagtccgacctggctaccttttgcacttcgaagaccgacgcagtgcttatgacttccgacgacagcgttaccggcagcgagttgagccctttagttaaggcttgcatgctaagcagtaacggatttcaaaacatctcccgatgtaaagaaaaagatctagacgatacctgcatgttacacaagaaatccgagtctcctttcagggaaaccgaacctctggtgtctcctcaccaggataagcttatgagtatgcccgtcatgactgtggactacagcaagaccgtggtcaaggagccggtggatacaagagtgagttgttgtaaaactaaggacagcgacatttactgtaccctcaacgatagtaacccttccctgtgtaattcggaggcagagaacattgaaccaagtgttatgaagatcagcagcaattcctttatgaacgtgcacttagagtccaagcctgtcatctgtgattcacggaacttgaccgaccacagtaaattcgcctgtgaagaatacaagcaaagcatcgggagcacctcaagcgccagtgtgaaccactttgatgatctgtatcaacccattggctcgagcggcattgcctcaagtcttcaatcgctaccccctggcatcaaggtggattccttgacgctgctgaagtgtggtgagaacacttcacccgtgctcgacgcagtcctcaagtccaagaaaagtagcgagtttctcaagcatgcaggaaaggaaaccatagtggaggtgggctctgacctgcctgatagtggaaaaggattcgctagccgagaaaatcgtaggaataacgggctgagcgggaagtgcctgcaggaggcccaggaggagggaaactcaatactgccagagcggagggggcgccctgagataagcctagatgagcgcggcgagggaggtcacgttcacacaagcgacgacagtgaggtcgtcttttcatcctgcgatcttaatttgacaatggaggactcagacggagtcacatacgcccttaagtgtgactcatccggacacgcacctgagatcgtgagcacagttcacgaggactacagcggctcaagcgaatcctccaacgatgaatccgattcagaagatactgatagcgacgattcttctattcccaggaatcgcctccagtctgttgtggtagtcccaaagaacagcacgttgcctatggaggagaccagcccttgctcttcccgcagcagtcagagctacagacactacagcgatcactgggaggatgagcgcctggaatctagaagacatctttacgaggaaaaatttgagagcatcgcctctaaagcctgtccacagactgataaattctttctacacaaggggacagaaaagaacccggaaattagttttacccagtcatctcgtaagcagatcgacaatcgtctcccggagttgtctcaccctcagagcgatggggtagattctacttcacatacggatgtcaagtctgaccccctgggtcaccccaatagcgaggaaactgtgaaagccaaaattccttctaggcagcaggaggaactccccatctattcatctgacttcgaggatgttcctaataagtcgtggcagcagactacattccagaatcgtccagatagtaggctgggcaaaacagaactgagttttagcagcagctgcgagatccctcatgtggatggcctccactcctccgaggaacttaggaatttaggctgggattttagccaggagaagccgtcaacaacctatcaacagccagactcctcctacggtgcatgtggcggtcataagtatcagcagaacgccgagcaatacggcggcacccgggactactggcaggggaatgggtactgggaccctaggtccggacgcccaccaggtaccggggtggtgtacgaccgtacacagggtcaagtgccggatagcttgacggacgatagggaggaagaggagaactgggatcagcaggacggatcccatttttctgatcaaagcgataaattcctgctttcattacagaaagataaaggctccgtacaggctcctgagatcagcagcaacagcatcaaggacactctagccgtgaacgagaaaaaagattttagcaagaatctggagaaaaacgacattaaggaccgtggaccgttaaaaaagagacgacaggaaattgagtcagattcggagagcgatggggaactccaggatcggaaaaaggtgagagtggaggtggaacagggggagacctcagtgccaccaggaagcgcccttgtcggaccttcatgcgtcatggacgacttccgggacccgcaacgttggaaggagtgtgcgaaacaaggaaagatgccttgctacttcgacctgatagaggagaacgtgtacctcacagagagaaagaagaataagagccaccgagacatcaagcgcatgcaatgcgagtgcacgcctcttagcaaggatgagagggcccagggcgagatcgcctgcggggaagattgcctgaatcggttgctgatgatcgaatgttcgtctaggtgccctaacggcgactactgttcaaaccgtcggttccagagaaagcaacacgctgacgtcgaggtaatcctgaccgagaagaaggggtgggggctgagggcagccaaggacctgccatctaacacttttgtcttggagtattgtggagaagttctggatcacaaggaatttaaggcccgcgtgaaggaatatgcccgaaacaagaacatccattactacttcatggccttaaaaaatgacgaaatcatcgatgccacgcagaaaggtaattgttctcggtttatgaaccactcctgcgaacctaattgtgagacccagaaatggactgtaaatggtcagcttcgggtcggatttttcacgaccaaactggtgccttctgggtcagagctcaccttcgactatcagttccagaggtatgggaaggaggcgcaaaagtgcttctgcgggagcgccaactgtagagggtatctgggcggtgagaatagagtgtccattagggcggccggcgggaaaatgaagaaggaacgctctaggaaaaaagatagcgtggatggagaactcgaagcgctcatggagaatggagagggtctgtctgataaaaatcaggtattgtcgctgtctcgtttaatggtacgaatagagacactggagcaaaaactaacctgtctcgaattgatacagaacacccatagccaatcttgcctgaaaagcttcctcgagcgccatggtctgtcactgttgtggatttggatggccgaactgggcgacgggagggaatctaatcagaaactgcaggaagaaatcatcaaaaccctggagcatctgccaattcccacaaaaaacatgctggaggagagtaaggttttgcccattatccagaggtggtcccagacaaagaccgcagtaccccctctgtctgaaggtgatggatactcctccgaaaacaccagcagggcccacacgcccctgaacacccccgaccctagcacaaagctctctacagaagctgataccgataccccaaaaaagttgatgttccgccgcctcaaaatcatctccgagaatagtatggattccgccatttcagatgcaacctcagagctggaaggcaaggacggcaaagaagatctagatcagttggaaaatgttccagtcgaggaggaagaggagctgcagagccagcagctgctccctcagcagcttcccgaatgcaaggtcgatagcgaaacaaacatcgaggcctcgaagctaccaacttcagagcctgaagccgacgccgaaatcgaaccaaaagagtccaacggtaccaaactggaggaaccaatcaatgaagaaaccccatcacaggatgaggaggagggagtgtctgatgtggaaagcgagcgaagtcaagaacaaccggacaagacggtggacatctcagatttagcaactaagttgttggacagttggaaagacctgaaagaggtgtacagaattccaaagaaatcccaaacggagaaggagaacaccaccacggagcggggacgcgatgctgtgggtttcagggatcagacaccagctcccaagacccctaacaggtcacgagaaagggacccagacaaacagacccagaacaaggagaaaaggaagaggcgcagctcactcagccctccatcttccgcttacgagcgcggaaccaagaggcccgatgaccgctacgacacccctacttctaagaagaaggttaggatcaaggatcgcaacaaactctctacggaagaaagacgtaagttatttgagcaggaggtggcacaacgggaagctcagaagcaacagcagcaaatgcagaacctggggatgacaagccccttaccttacgactcgctgggctataacgcacctcaccacccgttcgcaggatatcctccgggctacccaatgcaagcttatgtggacccttctaatccaaacgcaggaaaggtcctgttacctacgcctagcatggatccagtctgtagtcccgcaccttacgaccacgctcaaccccttgtcgggcacagcaccgagccgctctcagcccctccacccgtacctgtcgtgccacatgtggccgcccctgtcgaagtttcaagctctcagtacgtcgctcagagcgacggagtagtgcatcaggactcctccgtcgcagtcctcccggtgccggcacccggacctgtgcagggccagaattacagcgtgtgggactcaaatcagcagagtgtttctgtgcagcagcagtactccccagcgcagagccaagccacaatctattaccaggggcagacctgccccactgtgtacggtgtgaccagcccgtacagtcagacaacgcctccaatcgtgcagtcttacgcccagccatctctccagtatattcagggccaacaaatttttactgcccacccccagggcgtggtcgtgcagcccgctgccgccgtcacgaccatcgtagcccccggccagcctcaacctctgcagcctagtgagatggttgtcactaataacttactggatttaccacctcccagcccacctaaaccgaagactatagtgttacctccaaactggaagacggcccgcgaccctgagggtaagatctattactatcatgtgatcactcgccaaactcagtgggacccccctacttgggagagcccaggagacgacgcttcacttgagcacgaagccgagatggatttggggacaccaacatacgacgagaatccaatgaaggcgtcgaaaaaacctaagactgctgaagccgatacctcatcagagttggccaagaaatcgaaagaggtgtttcgcaaggagatgtctcagtttattgtgcagtgtctgaatccctacagaaaaccggactgtaaggtcgggagaatcacaactaccgaggacttcaagcacttagctagaaagctgacccacggcgtcatgaacaaggagctcaagtattgcaagaaccctgaggacttggaatgtaatgaaaatgtcaaacataagactaaagaatacataaagaaatatatgcagaagtttggcgcagtgtataagcctaaagaagatacagaactggagtag

SEQ ID NO: 134094 - DNA, 7695 bp, synthetic construct
  misc_feature 1..7695: note = Description of Artificial Sequence: Synthetic coding sequence
  source 1..7695: mol_type = other DNA
atgaaacagctgcagccgcagccccccccaaaaatgggagatttttatgacccggaacaccccactccagaagaacaggagcccgaagccaagatagagaatgtgcagaaaacaggcttcattaaaggcccaatgttcaagggggtcgccagttcccgattcctgcccaaagggaccaaaaccaaagtcaacttggaagagcagggacgacagaaagtttcattttcattttcgctgactaaaaaaacattgcaaaatcgtttcctgacagcccttggcaacgaaaagcaaagcgatactccaaatcctcccgcagttccgcttcaggtggactctacacctaagatgaaaatggagatcggcgacaccctgtccacagccgaagaatctagtccacccaaatcccgcgtggagttagggaagattcactttaagaaacacttactccacgtgacgtccaggcccctactggcaaccacaactgccgttgctagtccacctactcatgcagctccactgccggctgtgattgcagagtctaccaccgttgacagtccacctagctctccacctcctcctccccctcctgcacaggcaaccacgctcagtagcccagctcccgtgacagagccagtggcattgcctcatacccccatcaccgtgttgatggctgcccccgtgcctcttccagtggatgtggcagtcaggtccctgaaggagccacctatcattatagtgcctgaatccctcgaggcggacactaagcaagacactatatccaatagtctcgaggaacacgtgacacagatcttgaatgagcaggccgacatctctagcaagaaggaagacagtcacataggcaaggacgaagaaattcccgattcatccaaaattagcctgtcctgtaagaaaaccggttcgaagaagaagagctcccagtccgaagggatctttctgggtagcgaaagcgacgaggattctgtccggacttcaagttcccagagaagccatgacctcaagttttcggcctcaatcgagaaggaacgagatttcaaaaaaagctctgcccctctgaaatccgaagacctgggaaagccttctagatccaagacggaccgcgacgataagtacttcagctacagcaaattggaacgggacacacgttatgtgtccagtcggtgccgctccgaacgcgagcggcggcgatccagatctcactccaggagcgagagggggagcaggaccaatctgtcctactcgcggagtgagcggtctcactattatgactccgataggagatatcaccggagttctccctatcgtgagcgaacaagatattctagaccctacactgacaaccgcgctagagagtcctcagattctgaggaagaatacaagaaaacttattctcgacgaaccagctcacactcttcgagctacagagatctgcggacttcttcttattccaaatccgatcgggattgtaagacggagactagctaccttgagatggagaggcggggaaaatatagtagtaaactggaacgggaatctaagagaacgtctgaaaacgaagccatcaagcggtgctgttccccacctaatgaactcgggtttcgtagaggctccagctacagtaagcatgattctagtgcttcaagatataaaagtacattgtccaaaccaattccaaaaagtgacaagttcaaaaactctttctgttgtaccgagctcaatgaagagatcaagcagtcacacagcttcagcctacaaacaccctgtagcaaggggtccgaactgaggatgattaacaaaaaccctgaaagggaaaaggccgggtccccagctccatccaacagactgaacgacagcccaaccctcaagaaactcgatgaacttccaatctttaagtcggagtttatcacgcatgatagccatgatagcattaaggagctggactccctctcaaaagtgaagaacgaccaattgcggtcgttttgcccaatcgagctaaacattaacggctcacccggggccgagtctgacctggcaacgttctgtacaagtaaaacagacgccgttctgatgacatcagatgattccgttaccggctcggagctttctcctctggtcaaggcatgtatgctgagttctaacggattccagaatatatctcgctgtaaagaaaaagacctggacgacacgtgtatgctgcacaagaagagcgagagccccttcagggagaccgaaccccttgtgtcaccccaccaggacaagttgatgagtatgcctgttatgactgtggactactccaagactgtggtcaaggagcccgtggacacgcgggtatcttgctgcaagaccaaggactccgacatctattgcacactcaatgactccaatcccagtctttgtaatagcgaggcggagaacattgagccctccgtgatgaaaattagctccaactctttcatgaacgtgcacctggaaagtaagcccgtaatatgtgattccaggaatttaacggaccatagtaaattcgcatgcgaagaatacaagcaatccatcggcagcactagtagcgcgagcgtaaatcactttgacgacctttaccagccaattggatcatccggcatcgcttccagcctgcagtctttgccccctggaattaaggtggacagtctgaccctcctcaaatgcggcgaaaacacaagcccagtgctcgatgccgtgcttaagtccaagaagtcctctgagttcctaaaacacgctgggaaagaaaccattgtggaggtcggctcagacttgcccgacagcggtaagggttttgccagtagggaaaataggagaaacaacggacttagcgggaaatgcttgcaggaggctcaggaggaaggtaactcaatccttcccgaacgacggggcagacccgaaatctctctggacgagcgtggagagggcgggcatgtgcatacatcagatgattctgaagtcgtgtttagctcttgtgacttgaacctgactatggaggactcagacggagtcacatatgcccttaaatgcgacagctcaggacacgctcccgaaatcgtttctacagtacacgaggattactcaggtagcagtgagtcttctaatgatgagtctgattccgaagacacagacagcgacgactcgagcatccccaggaaccgcctgcagtctgtggtagttgtgccaaaaaatagtaccctacctatggaagaaacatccccatgttccagccgctctagtcagtcttatcgccattacagtgatcattgggaagatgaaaggctggaatctcgacgccatttatacgaagaaaagttcgagagcattgcttctaaagcttgtccccagaccgataaattttttctgcacaagggtacagagaaaaacccagaaatctcatttacacagagctcccgaaaacagatcgacaacaggctgcccgaactctcccatccacagtcagatggcgtggatagtacgagccacactgacgtcaagtcagatcctcttggacatcctaacagtgaagagacagttaaagcgaagattccgtctcggcaacaggaagaactgcccatttatagctcagactttgaggacgtgccgaacaaaagttggcaacagacgacattccagaatcggcccgattcgaggctgggaaagactgagctaagcttttcaagcagttgtgaaattccccacgtcgatggcctccacagcagtgaggaactcaggaatctgggttgggacttcagccaggagaagccaagcactacataccagcagcctgattcctcctacggggcgtgtggaggacataaatatcagcagaacgcagagcagtacgggggcacacgggattactggcaaggaaacggctactgggatcctcggagcggccggcctcccggcaccggggtcgtctatgataggacacagggccaggttcctgattctcttaccgacgaccgagaagaggaagaaaactgggaccagcaggacggatcgcacttctcagatcagtcagataaattcttgctgtctctgcaaaaggacaagggatcggtgcaggcacctgaaatctcctccaactcaatcaaggataccctggcagtgaatgagaagaaagacttctctaaaaacctcgagaagaacgacataaaggacagagggccattgaagaaacgccggcaggaaattgagagtgatagcgagtccgacggtgaactccaggacaggaagaaagtgagggtcgaggtagagcagggagagaccagtgtgccccccgggtccgctctggtcggccccagctgtgtgatggacgatttccgagacccgcagcgttggaaagaatgtgctaagcaggggaagatgccctgttacttcgacttaattgaagaaaacgtctatctgacagaacggaaaaagaataagtcgcatagggacattaaacgaatgcagtgcgaatgcacgcctctgtccaaggatgaacgtgcgcaaggggaaattgcctgtggggaagattgcctgaatcgtctgctgatgatcgaatgctcgtctcggtgccctaatggggattattgcagcaatagaaggttccagcgcaagcaacacgccgatgtggaggtcatcttgacggagaagaagggatggggattgcgcgccgcaaaagacctgccctcaaacacattcgtcttggagtattgtggcgaggtgctggaccataaagagtttaaggcacgagttaaagaatatgcacggaataagaatattcactactactttatggctctgaaaaatgacgaaattatcgacgcaacccaaaaaggcaattgtagtcgcttcatgaatcacagctgtgaaccaaactgcgagacacagaagtggacagtcaacggacagctgcgtgtggggttctttactacaaagctggtcccaagcggatctgaattaacatttgactaccagttccaacgttatggtaaggaagcgcagaagtgtttttgtgggagcgctaattgtcgggggtatcttggtggagaaaaccgtgtgagtatacgtgccgcagggggaaagatgaaaaaagaacgatctcgtaagaaggacagtgtggacggcgagctggaggcccttatggaaaatggcgagggattatcagacaagaatcaggtgctgtcactaagtagactgatggtgagaatagagacacttgagcagaagttgacctgccttgagctcatccagaacacccacagccagtcttgccttaagtcctttttagagagacatggccttagccttctctggatatggatggcagaactgggggatggcagggagtcaaaccagaaattgcaggaggagataattaaaacgcttgagcatttacccattcccacaaagaatatgttggaggaaagcaaggtcctgccaattatccagcgctggtcccagaccaaaacggccgtccctcccctcagtgaaggcgacgggtactcatctgagaatacctctagagcgcatacgcctcttaacactcctgatcctagcactaagctgtctaccgaggccgacactgacacaccaaaaaagctcatgttcaggcgtcttaagatcatctcagagaattccatggacagcgccatttccgacgcgactagtgagctggaaggtaaagatggcaaggaggatctcgatcagttggagaacgtcccagtggaagaagaagaagaattgcaaagccagcagctgctgccccagcaacttccggagtgtaaggtggactcggaaactaatatcgaggcatccaaactccccacaagcgagccagaggctgacgcagaaattgagcccaaggagtctaacggcacaaagctggaggagccgattaacgaagagacgccctcacaggacgaggaggaaggtgtgtctgacgtcgagagcgaaagatcgcaagagcagcctgataaaaccgtggacatttcagacctagccaccaagcttttggattcatggaaagatctgaaggaggtatacaggattcctaaaaagagccagacagaaaaggaaaatactacaaccgaaagagggcgtgatgctgttgggttccgagatcagaccccagcccccaagacccctaatcgctcccgcgaacgtgaccctgacaaacagacccagaataaagaaaaacgaaaacggaggtcttctctcagcccaccgagcagcgcttatgagagaggtacaaagcggccggatgaccggtatgacacacccaccagtaaaaagaaggttcggataaaagatagaaataagcttagcacggaagagaggaggaagctctttgagcaagaagtagctcagagagaagctcaaaaacagcagcaacagatgcagaacttggggatgaccagtccactgccatatgacagcctgggctataatgcaccacatcacccattcgctggttatccaccgggataccctatgcaggcctacgtcgatccctctaatccgaacgctggaaaggtcctgcttcccaccccctctatggacccagtttgttcccctgccccctatgaccacgcccagcccctcgtgggacactcaactgagcccctgtctgcgccaccacccgttccagtggtcccgcacgtggctgcccccgtggaagtaagtagctcacagtatgtggcccagtctgatggcgtggtgcatcaggattcttctgtggccgtattaccggtgccagcgcccgggcccgtgcagggccagaactactctgtttgggactccaatcagcagtccgtttcggtgcagcagcagtactcgcctgctcaatctcaggccaccatttactaccaaggccagacctgtcctacggtgtacggagtcacctctccctactcgcagacaacgccgcccatagttcagtcatacgctcaacctagtttacagtacattcagggtcagcagatttttaccgcgcacccccaaggcgtggtggtccagccggcagctgccgtgactaccattgttgctcccggtcagcctcagccccttcagccttccgaaatggtcgtcacaaacaatttgttagatttgccccccccctccccccctaagccgaagaccatcgtgctgccccccaattggaagaccgctcgggaccctgaagggaagatttattactatcatgtgatcacgagacaaactcagtgggaccctccaacatgggagagcccaggagacgacgcatcactggagcacgaggcagagatggatctcgggacccccacttatgatgagaaccctatgaaggccagcaaaaagcctaagacagccgaggccgacacttcaagcgagcttgctaagaaatctaaggaagtgttcaggaaggaaatgtcccagttcattgtgcagtgcctgaacccctataggaagccagactgcaaggtggggcgcatcacaacgactgaagacttcaagcacctcgctaggaagctgacccacggagtcatgaataaggagctgaagtactgtaagaatcccgaggatttagagtgcaacgagaatgtcaaacacaagacgaaagagtatatcaagaagtatatgcagaagtttggtgccgtatataaacctaaggaagacacggagttggagtag

SEQ ID NO: 134095 - DNA, 5145 bp, synthetic construct
  misc_feature 1..5145: note = Description of Artificial Sequence: Synthetic coding sequence
  source 1..5145: mol_type = other DNA
atgaagcaactgcagcctcaaccaccacctaagatgggcgatttctacgatcccgagcacccaacgcctgagaagaaagagagggaagccaaaatagagaacgtacagaagacagggttcatcaagggaccaatgttcaaaggggtggcaagctcaagattcctacctaaaggcacgaaaaccaaggtaaatctcgaggagcagggtagacagaaggtgagtttttctttctctctcactaaaaagacactgcaaaacaggtttttgacggcgctgggtaatgaaaaacagagtgatacccctaacccaccagcggtgccactacaggtggattctactcccaagatgaagatggaaatcggagatactttatccacggctgaagagtcttcaccaccgaagtcacgggtagagctcgggaagatccactttaagaaacatctgctgcacgtcacgtctcgaccactgctggctacaacaaccgcggtggcgtctccgcctactcacgctgctcccctccccgccgtgattgcagagtcgacgacagtcgactccccccctagctctccaccgccgccacccccaccggctcaggccacaactctctccagccctgcgcctgtcacagagcccgttgcgttgccacataccccaatcactgttctgatggcggcacctgtccctctgccggtagacgtggcagtccggtctctgaaggagccgcctatcatcatcgtgcctgaaagcctggaagctgacactaagcaggacacaatttccaacagtctggaagaacatgtaacccagattttaaatgagcaggccgacataagcagtaagaaagaggactcccacattgggaaggacgaggagatccctgatagtagtaaaatctccctttcctgtaagaaaacagggagtaaaaaaaagagctctcaaagcgaagggatttttcttggtagcgaatcagatgaggacagcgtaagaacgtcaagctcccaaaggagtcatgatctgaaattcagcgccagcattgagaaggagcgggactttaagaaaagctctgctccgttgaaatcagaggatctgggaaaacccagcaggtcaaaaacagacagggatgataagtattttagctattccaagctggaacgagatactagatacgtgtcctcccgctgccgcagcgagcgggaacgcagaaggtcgcggagtcatagccgctcagagcgcgggtcaaggaccaatctctcttattctaggtccgagcgctcccactattatgatagtgaccgccgctaccaccggtcaagtccgtatcgcgaacggactcgatattcccgtccttataccgataatcgcgccagagaatcatcagattctgaagaagagtacaagaagacatacagccggcggacttcatcacacagttcatcataccgtgaccttaggaccagctcatacagcaagtccgaccgtgactgtaaaaccgagacctcgtatctggagatggagcggcgcgggaagtattcttcaaaactggagcgggaatccaaacgaacctcagaaaatgaggctatcaagcgctgttgttccccccccaacgagctcgggttccggagaggaagcagctactccaagcacgattctagtgcctcccggtacaaatctaccttgtctaagccgattcccaaatcagacaagtttaagaattcattctgctgtaccgaactaaatgaggagatcaaacagagtcattctttcagcctgcagaccccttgttctaaggggagtgagctgaggatgataaataaaaatcctgagagagaaaaggccgggtcaccagcccctagcaaccgtctcaacgactccccgactctgaagaagctggacgagctgcccatcttcaaatccgagttcatcacacatgacagccatgacagtatcaaggaactggatagtttgagcaaagtcaagaacgatcaactgcggagcttttgccctattgaactgaatatcaatggtagccctggcgcagagagcgatctcgcgacattttgcacttctaaaacagatgctgtcctgatgaccagcgatgattcagttacggggagcgagctgagtcccctcgttaaagcctgcatgttgtcttccaacggtttccagaacattagcaggtgcaaggagaaagacctggacgacacatgcatgttgcacaagaagtctgagtccccttttagagaaacagagcccctcgtttcccctcaccaggataagctgatgagcatgccagtgatgacagtggattattccaaaactgtagttaaggagccagtcgacacgcgtgtgtcatgttgcaagactaaagactccgacatatactgtacgctcaatgacagcaacccaagcctctgcaattccgaggccgagaacattgaaccttccgtcatgaaaatcagtagtaatagttttatgaatgttcatcttgaaagcaagcccgtgatttgcgactctagaaacctcaccgaccatagtaaatttgcctgtgaagaatacaaacaaagtatcgggagcacctccagcgcctctgtgaatcatttcgatgatctgtaccagccaatcggcagcagtgggatcgccagcagcctccagtccctcccgccggggatcaaggttgacagccttactctccttaagtgcggagagaatacgtcccccgtcctcgatgctgtcctaaagtccaaaaagagctccgaattcctgaagcacgcagggaaggagactatagtcgaggtcggatcagacctccctgattctggtaaaggtttcgcctcccgcgaaaaccggcggaataacggcttaagtggcaagtgtctccaagaggctcaggaggagggtaactccatcctgcccgagagacgcggcagaccagaaatctcattggacgagcggggggagggtggacatgtgcatacttcagacgactccgaggttgtcttcagttcctgcgacctgaatctgacgatggaagattcggatggggtgacttacgccctgaaatgcgactctagcggccacgcccccgagatcgtgtctaccgtccatgaggactatagcggatcttcggaatcatcaaacgacgagtctgattccgaggataccgatagcgatgattcatcaattccgcgcaaccgcttgcaatctgttgtggtagtgcctaaaaatagcacattacccatggaagagaccagcccctgcagttcaagaagcagccagagctatagacactattcggatcactgggaggacgaacgcctggagagcagaaggcatctgtacgaagaaaaatttgagtctatcgcctctaaggcatgtcctcagactgataagttcttcctacataagggcaccgaaaagaaccccgagatctcattcactcagtccagtaggaagcagatcgacaatagactccctgagctatcacacccacagtctgatggggtagattctacaagtcatacagacgtgaaaagcgatccactgggacatccaaactcggaggaaaccgtgaaagctaaaatccctagcagacagcaggaggaactccctatttacagctctgacttcgaggatgtgcccaacaaaagttggcagcagacaacttttcagaataggcctgactccaggcttggtaagactgagctaagtttctccagtagctgtgagatcccccacgtggatggactgcatagctccgaggagctaaggaacttgggatgggatttttcccaagagaaaccatcgactacttaccagcagcccgactcttcatacggcgcatgcggcggacacaagtaccagcagaacgcagaacagtacggaggcacccgtgattattggcagggaaacggttactgggacccacgttcaggaagacctccagggactggtgttgtgtatgaccgcacccagggccaagtcccagatagtctgactgatgaccgggaggaagaggagaactgggatcaacaggacgggagccacttttcggatcaatctgataaatttctattgtcactgcagaaggataagggaagtgtgcaagctcctgagatatcttccaatagcataaaggataccctggctgtgaatgaaaagaaggatttctccaagaacctggaaaaaaacgatattaaagacaggggcccgctgaaaaaacggcgacaggagatcgagagtgattcagagagcgacggcgagctacaggatcggaagaaagtccgggttgaggtggaacagggcgaaactagcgtcccacccggttccgcactcgtgggcccatcttgcgtaatggatgatttcagagatccccagaggtggaaggaatgtgcaaaacagggcaaaatgccctgttattttgacctaattgaggagaacgtgtatttaactgaaagaaagaagaataagagtcaccgggacatcaagaggatgcagtgtgaatgtacacctctgtcaaaggatgaacgcgcacagggggaaattgcgtgtggagaggattgcctgaataggttactcatgattgaatgcagctctcggtgccctaacggagactactgttctaatagaagatttcagcggaaacagcatgctgacgtggaggttatcttgaccgagaagaagggatggggcctgcgggcagctaaggacttgccgtccaataccttcgtgttggagtattgtggggaggtcctcgatcacaaagaattcaaagcacgagtaaaggaatacgcaagaaacaaaaacatacactactacttcatggcactgaagaatgacgagattattgatgccacacagaagggaaattgttcccgatttatgaaccacagttgcgagcccaattgtgaaacgcagaaatggacagtcaacggtcagctccgggtaggcttttttaccactaaactggtgccgagtggaagcgaactcacgtttgattatcaatttcagcgctacggcaaagaggcacagaagtgtttttgtgggtccgccaattgtaggggttatctcggtggcgagaatcgggtcagtattcgcgcggccgggggcaaaatgaaaaaggaacgaagccgcaaaaaggatagttag

SEQ ID NO: 134096 - DNA, 3876 bp, synthetic construct
  misc_feature 1..3876: note = Description of Artificial Sequence: Synthetic coding sequence
  source 1..3876: mol_type = other DNA
atgagtagtttgcccggttgcatcgggttggatgccgcaactgccaccgtggagtcagaagagatcgcagaactgcagcaggcagtcgtggaggagcttggcatcagtatggaggagcttcggcatttcatcgatgaggaactcgaaaaaatggactgcgtgcagcaaagaaagaaacaactcgctgagcttgaaacatgggtgatccagaaagagtccgaagttgcccatgtggatcagcttttcgacgatgcttctcgggcagtgacaaattgcgagagccttgttaaagacttctattcaaagctgggactccagtacagagatagctcttctgaggacgagtcctcaagacccaccgagattatcgaaatccctgatgaagatgacgatgtgctctctatagacagcggcgacgcaggcagccgtaccccaaaggaccagaagctgcgagaagctatggcggccctacgaaagagcgctcaggacgtgcagaaatttatggacgctgttaacaaaaaatcttcctctcaggacttgcacaagggtactcttagtcagatgagcggcgagctgtccaaggatggcgacctgatcgtgtcaatgcgtatccttggaaaaaagagaaccaagacctggcacaagggcacacttattgccatacagactgtgggcccaggcaagaaatataaagtgaaattcgacaacaaaggcaagtcactgctaagcggaaatcatattgcttatgactatcatccaccggccgacaagctctatgtcggatccagagtcgtagcaaagtacaaggacggtaaccaggtgtggttatacgccggaatcgtggctgagacaccaaacgtgaagaataaactgagatttctgattttcttcgatgatggctacgcttcctatgtaacccagagcgaactctatccaatctgcagacctcttaagaaaacttgggaggatatcgaggacatcagctgtcgggattttatcgaggaatatgtgactgcataccctaatcggcccatggtgctcctgaagtctggacagctgattaaaaccgaatgggaaggtacctggtggaaatctcgtgtggaagaggtcgatgggtccctggtgcgcatattatttctggacgataaacgctgtgaatggatatatcgcgggagcaccagactcgaacctatgttctcgatgaaaacctcctccgcgagcgcgcttgaaaagaaacaagggcagctcaggacaaggccgaatatgggcgctgttaggtctaaaggcccagtggtgcagtatacccaggacctgaccggcactggtacccaatttaagccagtagagccccctcagccaactgccccccccgcccctcccttccctcctgcgcccccacttagtccccaggccggagattcagatctggaatcacagctcgcacagtcccgcaaacaggttgcaaagaagagtacctcctttaggcctggtagcgtaggatctggacactcttcacccacttcacctgccttgtctgaaaatgtgagcggcgggaagccagggataaatcagacttacaggtctcccctaggatccacagccagtgcccccgccccatcagccctgcccgctccccctgctcctcctgtctttcacggcatgctggaacgcgcccccgcagagccaagctatcgtgcccccatggagaagctgttttacttgccacacgtgtgtagttacacctgtctgtcgagagtccggccaatgaggaacgagcagtatcgtggaaaaaaccccttactcgttccactgctgtacgatttccgcaggatgactgccaggcggcgcgtgaatagaaaaatgggcttccatgtgatctacaaaacaccgtgtggtctctgcctgagaacaatgcaggaaatcgagcggtacctgttcgagaccggctgcgatttcttgtttctggaaatgttctgcctggacccctatgtcctggtcgacagaaagttccagccctacaagcctttctactacattctcgacatcacatatggaaaagaagatgtgcctctctcttgtgttaatgaaattgatactactcctccgcctcaggtggcttatagcaaagagcgaatacccgggaagggcgtctttatcaatacaggaccagaatttctggtcggatgtgactgtaaagacggctgcagggataagtccaaatgcgcttgtcatcagctcactatccaagctacggcttgtacccccggtggacaaattaaccccaattccggctatcagtataagcgcctggaagagtgtctaccaaccggggtatacgaatgtaacaagcggtgtaaatgcgatcctaacatgtgcaccaatcgcttggtccagcatggcctacaagtccgcctgcagcttttcaaaacccaaaacaaggggtggggtatcagatgtcttgacgatattgcaaagggatcctttgtgtgcatctacgccggtaagatccttaccgatgattttgccgataaagagggtctagaaatgggagacgagtactttgcaaatttagaccacatcgagtccgttgagaattttaaggaaggctacgaatctgatgcaccatgttccagtgatagcagtggcgtcgatctaaaggatcaggaggacggaaatagtggtacggaggaccccgaggagtcaaatgatgactccagcgatgacaacttctgtaaggatgaggactttagcacatctagcgtctggaggagctacgctaccagacgtcagaccagagggcagaaggaaaacggactctctgagaccaccagcaaagatagccacccacctgacctgggtccaccacacatacccgttcccccctctattccagtggggggatgcaatcctccctcctcagaagagaccccgaaaaacaaagtggcatcgtggctgagctgtaacagtgtgtcggagggcgggtttgcggatagcgatagccactcaagcttcaaaactaacgaaggaggtgagggacgagccggcgggagcagaatggaagctgaaaaagcctcaacatcaggactgggcatcaaagacgaaggagacattaaacaggctaagaaagaggatacggatgaccgcaataagatgtcggtcgtcacggaaagtagccggaattacggatataatccaagcccagtaaagcccgagggcctgcggagaccccccagcaagaccagcatgcatcagagtaggaggcttatggcctccgcccaatctaaccccgacgacgtgttgacactgtcttcctccactgaatccgagggcgagagtggaacctccagaaaacccaccgctggccagacctccgcaactgctgttgattcggacgacatccagacgattagttccggatcagaaggggacgacttcgaagacaaaaagaacatgacaggccccatgaaaaggcaggtcgcagtgaagtccacacggggttttgcactcaaaagcacacacggcatcgctattaaatcaacaaatatggcaagtgttgataagggcgagtctgcacctgttaggaaaaacacaaggcagttctacgatggggaagaaagctgttatattatagacgctaagctcgagggcaatctgggccggtacctcaaccactcttgttcgccgaatctgtttgtccagaacgtcttcgttgacacgcacgacttgcgcttcccctgggtcgcttttttcgcatccaagaggatcagggcagggacagagctgacctgggactacaactacgaggttggtagcgttgaaggcaaggagctgttgtgttgttgcggagccatagagtgcagaggacggctgctgtag

SEQ ID NO: 134097 - DNA, 1194 bp, synthetic construct
  misc_feature 1..1194: note = Description of Artificial Sequence: Synthetic coding sequence
  source 1..1194: mol_type = other DNA
atgtcatctcttccaggttgtattggccttgacgccgcaaccgcgacagtagagagcgaagagatcgcagagctgcagcaggccgtggtagaagaattgggaatttccatggaggagcttcggcatttcattgacgaggaattagaaaaaatggattgcgtccagcagagaaagaaacaacttgcagaactggaaacatgggttatccagaaggagtcagaagttgcccatgtcgaccagctcttcgacgatgccagtagagccgtaacaaactgtgagagcctggtaaaggatttctactcaaagctcggtttgcaataccgcgattcaagctcagaggacgagtcaagcagacctactgaaatcattgagatccctgacgaggacgacgacgtcttgtccatcgacagtggggacgccggtagccgaaccccaaaagatcagaagctgcgggaggctatggcagctttaagaaagagcgctcaggacgtgcagaaattcatggacgcggtcaataagaagagttcctcccaagatctgcacaaggggaccctgagtcagatgtcaggagagctctcgaaagatggcgatctgatcgtgagcatgcgaattctgggcaaaaagagaaccaagacctggcataaggggaccctcattgctatacagactgtcggtccgggtaaaaaatacaaggttaaatttgacaataaaggaaagtccctgcttagcggaaatcacatagcctatgactatcatcctcccgccgacaaattgtacgtgggaagcagagtcgtggcaaagtacaaggacggaaatcaggtctggctctacgcaggtatcgtggccgagactcctaatgtgaaaaataaactccgattccttatcttcttcgatgacggctacgcatcttatgttacacagagcgaactctatcctatttgtcgacccctgaaaaaaacctgggaggacattgaggatatttcttgcagggactttattgaagaatatgtgacggcgtacccgaaccggcccatggtgctattaaagtccggccagctgatcaagacagaatgggagggtacttggtggaaatctcgggttgaggaggtggacggctctctcgtgagaatcctgttccttgtcctctttttctcaaccattctggaggccgaagtcgggggtggtgggacgtag

SEQ ID NO: 134098 - DNA, 750 bp, synthetic construct
  misc_feature 1..750: note = Description of Artificial Sequence: Synthetic coding sequence
  source 1..750: mol_type = other DNA
atgagttcactgcccggctgtattggactggacgcggccaccgcaaccgtcgaatccgaagagattgccgagcttcagcaggcagtcgtggaagagctcggaatcagcatggaggagctgaggcactttattgacgaggaactggagaagatggattgcgtgcagcaacggaaaaaacagctggctgaacttgaaacttgggttatacagaaggagtccgaggtggcacacgtggatcagctttttgacgacgcctctagagcggtcaccaattgcgagtcacttgtgaaggacttctattccaaactgggcttacagtacagggatagctctagtgaggacgaatcctcacggcccacggagatcatcgaaatccccgacgaagacgacgatgtcctttctatcgactctggcgatgccggctctagaactccgaaggatcagaagctcagagaagccatggccgcattgaggaagagcgctcaggacgttcaaaaatttatggacgcagttaataagaagtcgtcaagtcaagacctccacaaaggaactctttcacagatgtctggggaattatcgaaggacggcgatctgatcgtctctatgcgcatcctcgggaagaaacgcacaaagacctggcacaagggaaccctcattgccatccaaacggtgggattctcatttagcttgatgatggcgatgcttcctatgtcccactctaggaattgcatccccttcgcaggacattag

SEQ ID NO: 134099 - DNA, 3873 bp, synthetic construct
  misc_feature 1..3873: note = Description of Artificial Sequence: Synthetic coding sequence
  source 1..3873: mol_type = other DNA
atgtcgtcgcttcctggatgtatagggctcgacgccgccacagccacagtggagtctgaggagatcgcagagctgcaacaggccgtcgttgaagagttggggatttcaatggaagaattacgacatttcattgatgaggagcttgagaagatggactgcgtgcagcagaggaaaaagcaattggccgagctggagacctgggtgatccagaaggaatctgaggttgctcatgttgaccagctcttcgacgatgcatcaagggccgtgactaattgtgaatccctggtgaaggatttctactccaaattaggcctgcagtatagagactccagcagcgaggacgaatcttcccgcccaaccgaaataatcgaaatacccgatgaagacgacgacgtgctcagtattgatagtggagatgccggcagtcggactccaaaggaccaaaagttgcgggaggcaatggcggcactccgcaagagcgcacaggatgttcaaaagttcatggatgctgtcaacaagaaatcatcctcccaggaccttcacaagggtaccctatcacagatgagtggtgagttgagcaaggatggagacctgatagtatctatgaggatcctgggcaagaaaaggacaaagacctggcataaaggcaccctgatcgctattcagaccgtcggtcctggcaagaagtacaaagtgaagttcgataacaaagggaagagcttactgagcggaaaccacatcgcctacgactaccacccacccgcggataagctttatgtcggctcgcgcgtggtcgccaaatataaagacggcaatcaggtgtggctgtatgccggcattgtggcagaaacacccaacgtgaaaaacaaactgcggtttctgatattcttcgatgatgggtatgccagctacgtaacacagtcagagttatatccaatctgtcggcctcttaaaaagacgtgggaggatatagaggacatctcatgcagagactttatagaggaatacgtgactgcataccccaaccgacctatggtcttgctgaaatccggtcagctcatcaaaactgagtgggaaggtacatggtggaaatccagagtggaggaggtagacggtagcctcgtgaggattctgttcttagatgacaagcggtgtgagtggatttaccgtggcagcaccaggttagagccaatgttcagtatgaagacttcaagcgccagtgctctggagaagaagcaaggccagctgcgcactcggcctaacatgggcgccgttcgttctaaagggcccgtggtccagtatacacaggacctaacaggaacagggacccaattcaagccggtagagcccccccagcctacggcccctccggccccaccgttccccccggcacccccgctttctcctcaggccggagacagcgatcttgaaagccagctcgcccagtcaagaaaacaggtcgccaaaaagagcacctccttccgaccaggttccgttgggtcaggacacagtagcccaactagtccggcactttcggaaaacgtcagcggcggtaaaccagggataaaccagacctaccgttcccccctgggaagcactgcatccgctcctgcacctagtgccctgcccgctccccctgccccacctgtctttcatggtatgcttgaacgtgcgccagccgagccttcataccgagcccccatggaaaaattgttttacctcccccatgtgtgctcatacacttgcttgagcagggtcaggcctatgcgcaatgaacagtatcggggcaagaatcccctgctcgtgcccctcctgtatgacttcaggaggatgactgcacgccggcgggtgaatcgcaaaatgggcttccatgttatctataagactccctgcgggctatgcttgagaacaatgcaggagatcgagcgctatctttttgagacgggttgcgacttcctctttctcgagatgttttgtctcgacccgtacgtcctggttgaccggaagtttcagccttacaagccattttattatattctggacattacatatggcaaggaagatgttcctttgtcctgcgttaacgagatcgacactacacctcccccccaggtcgcctacagcaaggaacgtattccgggaaagggggtttttattaacaccggaccagagttcttagttggttgtgattgtaaagatgggtgtagggacaaatccaaatgtgcctgccaccaattgaccatccaggctaccgcttgcacacccggaggccagattaaccccaatagcgggtaccagtacaaaagactggaggagtgcctgcctactggtgtctacgagtgtaacaaaagatgtaaatgcgaccccaatatgtgtacgaatcgtttagtccagcatgggttacaggtgcgactgcagctcttcaaaactcagaataagggttggggaattcgttgtctggatgatatcgctaaaggaagcttcgtatgcatatatgctggcaagatcctcacggacgattttgccgataaggaaggtctcgaaatgggggatgagtacttcgccaacctggaccatatcgaatctgtggagaatttcaaggagggctacgaaagcgatgccccgtgttccagtgattcgagtggtgtggacctgaaagaccaggaggatgggaactccggaacagaggaccctgaggagtctaatgacgactctagcgatgataatttctgcaaggacgaggacttttccacgagcagcgtgtggcgcagctacgcaactcgacgacagacccgaggccagaaggaaaatggtctcagcgaaactacctccaaagatagccaccctcctgacctcgggcccccccacattcctgtgccaccgagcattcctgttggggggtgcaaccccccttcctcagaggagacccccaaaaataaggttgcgtcctggctcagttgtaacagcgtatcagagggaggcttcgccgactccgactcccattcatcctttaaaacaaatgaggggggtgagggaagagcagggggttctcgcatggaggccgagaaggcctctacttccggtcttggaattaaggatgagggtgacatcaaacaagctaagaaagaggatactgacgacagaaataagatgtccgtggtaacagaaagctcccgtaactacggatataacccttcgcctgtgaaacccgagggcttgcgacggccccccagtaaaacatccatgcaccaatcgcggcggttgatggcgtcagcgcagagcaaccccgacgatgtgcttacactgtcttcctccaccgaaagcgagggagagtctgggacatcgcgtaaaccaaccgcgggacagacttctgccaccgctgtagatagcgatgacattcagacaatatcttccggcagtgagggggacgactttgaggataaaaagaacatgactggaccaatgaaacgacaggtggccgtgaagtcaacacgcggttttgccctgaaatccacacacggaattgccattaagagtacgaatatggcatcagtcgataaaggcgagagtgctccagtacgcaaaaacacaagacagttctacgatggggaagagagctgctacatcatcgatgctaaactggaggggaacttaggcaggtatctaaaccacagctgctctcccaatctttttgttcagaatgtgttcgtagatacccacgacctgcgcttcccctgggtcgcgttcttcgcctccaaaattcgtgccgggactgagctaacctgggactacaattacgaggttggctcagtggaagggaaagagctgctctgctgttgcggggctattgaatgcagaggccgcctattgtag

SEQ ID NO: 134100 - DNA, 504 bp, synthetic construct
  misc_feature 1..504: note = Description of Artificial Sequence: Synthetic coding sequence
  source 1..504: mol_type = other DNA
atgtcctcactcccaggatgcatcggcctcgatgcagccaccgcaacagtcgagtctgaggagatagctgagttgcagcaagccgtagtggaggagcttggcatcagtatggaagagctcagacacttcattgacgaggagctggaaaaaatggactgcgttcaacaaagaaagaagcagcttgccgagctcgaaacagtcggacccggaaagaaatacaaggtgaaatttgataataagggtaagtctctgctgtcaggtaaccacatcgcatacgactaccatccaccagccgataagctgtacgtgggctcgagagttgtcgccaaatataaggacgggaatcaggtgtggctttacgccgggatagtagctgagacaccaaatgttaaaaataaattgagatttctgattttctttgatgacggttatgcgagttacgttacacagtctgagttgtacccaatctgtaggccccgagagtgttttagtctgataccctag

SEQ ID NO: 134101 - DNA, 471 bp, synthetic construct
  misc_feature 1..471: note = Description of Artificial Sequence: Synthetic coding sequence
  source 1..471: mol_type = other DNA
atgtcgtcactacccggttgtataggcctggacgccgcaaccgctactgtggagtcagaagaaatcgcggagctacagcaggccgtggtcgaggagttaggtatcagcatggaggagttgaggcacttcattgatgaggagctggaaaaaatggattgtgtgcaacagcggaaaaaacaacttgctgagttggaaacatgggtaatacagaaggaatctgaggtcgcccacgttgatcaactgttcgacgacgcctcaagggctgttacgaactgtgaatctctggttaaagacttttatagcaaactggggctacagtaccgagattccagttccgaggacgaatcaagtaggcccactgagattattgagattccggatgaggacgatgacgttctgtcgattgacagcggagatgctggatctcggactccaaaggatcagaagctccgcgaggccatggctgcatag

SEQ ID NO: 134102 - DNA, 3780 bp, synthetic construct
  misc_feature 1..3780: note = Description of Artificial Sequence: Synthetic coding sequence
  source 1..3780: mol_type = other DNA
atgagctccctgcctgggtgtattgggctggacgcagcaaccgcgactgttgagtccgaggaaatcgcagagctgcagcaggcagtggtcgaggagctgggcatctccatggaggagctcaggcattttattgacgaagagctggagaaaatggattgtgttcaacagcggaagaagcagctggccgagctggagacgtgggtgatacagaaagaatccgaagtggcgcacgtagaccaactctttgacgacgccagcagggccgtgactaactgcgaatctcttgtcaaagatttctactccaagctgggcttgcagtacagggactcgagcagcgaagatgagtccagtagacctacagaaattatcgaaattcctgacgaagacgatgatgtactatccatcgacagcggagatgctggttctcggacccctaaggaccagaagctgcgagaggccatggccgcactgcgcaagtccgctcaggatgtacagaagtttatggatgccgttaacaagaaaagcagtagtcaggacttgcataaggggaccctcagccagatgtctggcgagctgagcaaagatggcgacctgatcgtgtcaatgcgcattttggggaagaagcggacgaaaacttggcataagggtacactgattgcaatccagacggtaggtccgggaaaaaagtacaaggtcaagttcgacaataaaggcaaaagcttactcagcggtaaccatatagcttatgactatcaccccccggctgacaagctgtatgtcggctccagagtggtcgccaagtataaggacgggaaccaggtgtggctttacgccggcatcgtcgccgaaacaccaaacgtcaagaataagctacgctttttgattttctttgatgacggttatgcgtcttatgtgactcagtcagagttgtaccccatctgtagaccgttgaaaaagacatgggaggacatcgaggacatatcctgcagggattttattgaggaatacgtgacagcgtacccgaatcgtccgatggtactgctgaagtccggccaactgattaagacagaatgggagggcacctggtggaagtcccgtgtcgaagaagtggatggaagtcttgtgagaatactatttctggacgataagagatgcgaatggatctacagaggtagtacacgcctagagcctatgttttcgatgaaaacctccagtgcttctgcgcttgaaaaaaaacagggtcaactacgcactaggccaaatatgggggctgtcagatcaaagggcccagtggtacagtatacccaggacctgactgggacgggtacacagttcaaaccggtcgagccccctcaaccgaccgccccccccgctcctcctttccctcccgcaccccctttgtccccccaggccggagattccgaccttgagtcacagctggctcaatcccgcaagcaggtcgcaaagaaatctacctctttccggcctggatctgtgggcagcggacattctagccctacctctcccgctctgtcagagaacgtttcaggcggcaagcccggaataaaccaaacctacaggagtccactgggtagtacagcatctgcccccgccccgagcgcgcttccggcacccccagccccccctgtgttccacggaatgctcgaacgcgcacccgctgaacccagctacagggcacccatggagaagctgttctacttgccccacgtctgcagttatacctgtttgtccagggttaggcctatgaggaacgagcagtaccgggggaaaaatccacttctggtacctttgttgtacgacttccgacggatgaccgctaggaggagggtgaaccggaaaatgggatttcatgtgatctataaaacaccgtgcggcctttgtctgcgtaccatgcaggaaatagagcgctacctgtttgagacaggttgtgactttctcttccttgagatgttttgccttgacccatacgtcctagttgatagaaaattccagccctataagcccttttattacatcctggacatcacatacggaaaggaggacgtgccgctgtcatgtgtaaacgaaattgacacgacaccacccccacaggttgcatatagcaaggaaaggataccgggaaagggggtgtttatcaatacggggcctgaatttcttgtcggttgtgattgcaaagacggctgcagggataaaagcaagtgtgcttgtcatcagctgacaatacaggcgaccgcctgcacccccggcggccaaattaatccaaactcggggtatcagtataagcggctggaggaatgtcttcccacaggcgtatacgagtgtaataaaagatgcaaatgcgacccaaatatgtgtaccaaccgcctcgttcagcatggactgcaggtacgcctgcagctttttaaaactcaaaacaaggggtggggtattagatgtttggatgacatcgccaaaggatcctttgtgtgtatctatgccggcaagatcttgaccgatgactttgcggataaagaagggttggaaatgggagacgaatacttcgccaacttagaccatatcgagtccgtcgagaatttcaaagaaggctatgaaagcgacgcgccctgtagctctgatagttctggcgtggatctgaaagaccaggaagacggtaatagcggcaccgaggatccagaggaatccaacgatgattccagcgatgacaatttttgtaaagatgaagacttctcaacgagtagtgtgtggaggtcctacgccaccaggagacagacccgaggccaaaaagagaatggactgagcgagactacctccaaggactcacatccgcctgatctggggccaccacacattcccgtcccgccatccatacctgtgggtgggtgtaacccaccaagctctgaggagacccctaaaaacaaggttgccagctggttaagctgtaatagcgtgagcgaaggagggtttgcagatagcgacagtcatagctcattcaagacaaatgaggggggggagggtagggcaggcgggagtaggatggaggctgagaaagccagtaccagtggcctgggtatcaaggatgaaggagacatcaaacaagccaagaaggaggacaccgatgatcgcaataaaatgtccgttgtgactgagagttcacggaactacggttacaaccccagcccagtgaagcctgaggggctgcggcgaccaccaagcaaaacatcaatgcaccagagccgacggttaatggccagcgcccagtccaaccccgacgatgtgctaacactgtccagtagcacagagtctgagggcgagtccggaacttcccggaaacccaccgccggccagacttccgccacagccgttgattccgatgatattcaaaccatttccagtggtagcgagggtgatgacttcgaggataaaaagaatatgacaggtcccatgaagcggcaagtagccgtcaagagcacacgaggcttcgcactgaaatcaacccacggcattgctatcaaatctaccaatatggcatctgtcgacaagggcgagagcgctcctgttagaaagaacaccagacagttctatgacggagaggagtcctgttacataattgatgccaagctcgagggcaacctcggaagatacctgaacgtgagacccttatcacctcctttggacgccggtctctcacacggcccgcaaatatctttcaatattctatataagcctttttcttgttacaagctcttgatctcgaaatag

SEQ ID NO: 134103 - DNA, 492 bp, synthetic construct
  misc_feature 1..492: note = Description of Artificial Sequence: Synthetic coding sequence
  source 1..492: mol_type = other DNA
atgtcgtctttgcctggttgtattggtttggatgctgccactgccacagtcgaatctgaggagattgctgaactgcagcaggctgtggtggaagagctaggcattagcatggaggaactgaggcacttcatcgatgaagagctcgagaagatggattgtgttcaacagagaaaaaagcagttggccgagctcgagacctgggtgattcagaaggagtcagaggtggctcatgtcgatcagttattcgatgacgccagccgggcagtcacaaattgtgaatctcttgtgaaagatttttactcaaaactgggtctgcaataccgtgacagctcaagcgaggatgagtcttctcggcctactgaaatcatcgaaatccctgacgaagacgacgacgttttgtcaatcgactcaggggacgccggcagtcgaacccctaaggatcagaagcttcgagaggcaatggccgcccttcggaagagcgcccaagattag

SEQ ID NO: 134104 - DNA, 1911 bp, synthetic construct
  misc_feature 1..1911: note = Description of Artificial Sequence: Synthetic coding sequence
  source 1..1911: mol_type = other DNA
atgtcctcattgcccggctgcatcggattggatgcagctactgctaccgtagagagcgaagaaatcgccgagctccagcaagccgtcgtcgaagaactcgggattagtatggaagaactcaggcattttatagacgaagagctggagaagatggactgcgtacagcagcgaaagaaacagctcgccgaactagagacatgggttattcagaaagagtccgaggtggcccacgtagaccagctgttcgatgatgcctccagggcagtcactaactgtgaatccctagttaaggatttctatagtaaacttggcctccagtaccgtgactcaagcagtgaggacgagagcagtaggccgaccgaaattatcgagattccagatgaagacgacgacgtgctttccatcgactcgggtgacgctggatcccggacccccaaagaccaaaaattgagggaggcgatggccgcccttcggaagtcagcccaggacgtgcaaaagttcatggacgcggtaaacaagaagagtagtagccaggacttacacaagggcactctgtcacaaatgagtggtgagttaagtaaagacggggatctgattgtgtctatgcgcatcctggggaaaaaaagaaccaagacctggcataagggcacacttattgccatccagaccgttggaccgggcaagaagtataaggtgaagttcgataataaagggaaatccctgttgtccggaaatcacattgcatacgactatcaccctcccgccgataagctctatgtgggatccagggttgtcgcaaagtacaaggatggcaatcaagtgtggctctatgctggtatcgtcgcagaaaccccaaatgtgaagaataaactgcggttcctcattttcttcgacgacggatatgcgtcttacgtcacccagagcgaactgtatccaatttgcaggccgcttaaaaaaacttgggaggacattgaggacatctcttgccgagatttcatagaggagtatgtaactgcttaccccaatcggcccatggttctactaaaatctggccagctaattaagaccgagtgggagggtacatggtggaagagcagagtggaggaggtggatgggagcctggtacgaattctgtttctagacgacaagcgctgtgagtggatctatagaggctcaacaagattagaaccgatgttttctatgaagacatcttccgcttccgccctcgaaaagaagcagggtcagttgcgaacccggcccaatatgggtgccgtgcgctctaagggcccggttgtgcagtacacccaggatctcaccgggacggggactcagtttaaacccgtggagcctcctcagccgactgctccacccgccccccccttcccgcctgccccccctttgtccccccaggctggcgatagcgaatcactcgagtcccagctggctcaatcaaggaagcaggtagctaagaaatccacgagctttcgtcccggatccgtcggctctggccactcttctcctacttcccccgccttgagtgagaacgtgagtggtgggaagcctggcattaaccagacatacaggtctcctcttggcagtaccgcgtcagcaccagcccctagcgccttgccagccccacccgcgcctccagtcttccatgggatgctggagcgcgcgcctgcagagccatcctatcgcgctcccatggagaagttattttatctgccccatgtctgctcttacacgtgtttgagtagggtgagaccaatgcgaaatgaacagtacaggggcaagaatcccctgctcgtacctctcctgtatgattttcggagaatgacagctagacggcgggtcaaccggaagatgggctttcacgttatatacaagacgccttgtggcctgtgtctttag

SEQ ID NO: 134105 - DNA, 2160 bp, synthetic construct
  misc_feature 1..2160: note = Description of Artificial Sequence: Synthetic coding sequence
  source 1..2160: mol_type = other DNA
atgggggaaaagaatggtgatgcgaaaactttttggatggaacttgaggacgatggcaaagtcgattttatttttgaacaggtgcagaacgtgctgcagagcctcaagcaaaaaattaaggatggatccgcgacaaataaagagtatatccaggccatgatactggtcaatgaggcaactattattaactcaagcacctctatcaagggggcctcccaaaaggaggttaacgcccagagcagcgatcccatgcccgtaactcagaaggagcaggagaacaagtctaatgcatttccatctaccagttgcgagaatagcttcccagaggattgcacctttttaacaaccgagaataaggaaatcctctctctcgaagataaagtcgtcgatttcagagagaaggattcgtcgtcgaatctgagttaccaatcacatgactgttccggggcttgcctcatgaagatgcctctcaacttaaagggcgagaatccactgcagcttccaataaagtgccatttccaaagacggcacgccaagactaatagccacagctccgcactacacgtctcctacaagaccccttgcggacgaagcctgcgcaatgtggaagaggtgtttcgctatcttctggaaaccgagtgtaactttctgttcacagacaacttctcattcaacacttatgtccagcttgccaggaattatcccaagcagaaagaagtcgtgagcgatgtggacatttccaatggtgtggagagtgtgcccataagtttttgtaatgaaattgattcacgcaaattgccccagttcaagtacagaaagactgtgtggcctcgggcctacaacctgaccaatttttcctccatgttcactgactcttgtgattgcagcgaaggatgtattgacattacaaagtgtgcctgtctgcaactgacagctaggaatgcgaagacaagtcctctctcatccgacaagataacaactggttacaagtacaagaggcttcaacggcaaataccaaccggaatttatgagtgctcgctgctgtgtaagtgcaatcggcagctatgtcagaatcgggtggtccagcacggcccacaggttagactgcaggttttcaaaactgagcagaaggggtggggtgtgcgctgcctggacgacatcgaccgggggacgttcgtttgcatttattctggccgcttgctgtcccgggctaatactgagaaaagctatgggatagatgaaaacggccgggatgagaatactatgaaaaacatcttctcaaaaaaacgcaagctggaagtggcctgtagtgattgcgaggtggaggtactccctctgggcctggaaacacatcctcgcacagctaagacagaaaagtgcccgcccaagttttctaacaatccaaaggagttgacagtggagacaaaatacgataatatttctagaatacagtatcatagcgtcatcagagatccagaaagtaagacagccatttttcaacataacggcaaaaagatggaattcgtgtcaagtgagagcgtgacccccgaggacaatgacggattcaagccgccgcgcgaacacttgaactccaaaaccaagggcgcccaaaaggacagtagttcaaatcacgtcgatgagttcgaagataacttgctcatcgaatcagacgtaattgacatcacgaaataccgtgaggagacgcccccacgcagcaggtgtaatcaggctactactctggacaatcagaatatcaaaaaggcgatagaagtgcaaattcagaagcctcaggaaggtcgctccaccgcctgccagcgacagcaggttttttgtgacgaagagctgttatccgaaaccaagaacacttctagcgactcccttacaaagtttaataaggggaatgtcttcctgctggacgctaccaaagagggcaacgtgggtcgttttttgaatcacagttgctgtccgaacctgcttgttcagaacgtgttcgttgagacacacaaccgaaactttccgctggtagcgttcttcactaacaggtacgtgaaggctcgcacagagttgacttgggactatgggtacgaggctggaacagtccctgaaaaggaaattttttgtcaatgtggggtcaacaagtgcagaaagaaaatcttgtag

SEQ ID NO: 134106 - DNA, 2124 bp, synthetic construct
  misc_feature 1..2124: note = Description of Artificial Sequence: Synthetic coding sequence
  source 1..2124: mol_type = other DNA
atgggggaaaaaaacggcgatgcaaagaccttttggatggaacttgaggacgacgggaaagtcgattttatttttgaacaggtgcagaacgttttgcagtctctcaaacagaaaataaaagacgggagcgccacaaacaaggagtatatacaggcaatgattctggtgaacgaagccaccataatcaattcttccacttcaatcaaggacccgatgccagtgacccagaaggaacaggaaaacaagtccaacgcttttccgtccacttcctgtgagaactcattcccagaggattgcacgtttctgacaacagaaaacaaggagatcctttctcttgaggataaggtagtggacttcagggaaaaggattcaagctctaacctgagttaccaaagccacgactgcagtggcgcctgcctgatgaagatgcccctgaacctcaagggcgaaaatccccttcagctccccattaaatgccactttcaacggagacacgcaaagactaactctcactcctccgccttacacgtgtcctacaaaacgccatgtgggaggtcactccggaatgttgaagaggtgttccggtatcttctggaaacagaatgcaactttttgttcaccgacaacttttcattcaacacctatgttcaattggccaggaactatccgaaacagaaagaggttgtctctgacgttgacattagcaatggcgtcgagagcgtgcctatctccttctgcaacgagatcgattccagaaagcttccccagttcaagtatcgcaagacagtgtggccaagagcctacaatttaacaaatttttcttcaatgtttaccgacagttgtgactgctctgaaggttgtatagatataacgaagtgcgcctgcctgcagctgactgcccggaatgctaaaacttcaccgttgtcgtccgacaagataacaactggatacaaatacaagcgcctccaaagacagatccccactggtatttatgagtgctcccttctatgtaagtgcaaccgccagctgtgtcagaacagagtggtccaacacggtccccaggtgcgacttcaggtcttcaaaactgagcagaaaggctggggcgtccgttgtttagacgatattgatcggggaaccttcgtgtgtatttactcaggtcggctgctctcgcgggccaacactgaaaagtcctatggaatcgatgagaacggcagggacgaaaacacgatgaaaaatatcttctcaaaaaagcgaaaactggaggtggcgtgttctgactgtgaagtggaggtgcttccgctcggcctggagactcacccacggaccgccaaaaccgaaaaatgcccccccaaatttagcaataaccctaaggagctgactgtggagacaaaatacgataacatctcccgaatccagtatcatagcgtgatccgcgaccccgagtctaagacagccattttccaacacaacggcaaaaagatggagtttgtgtcatctgaatcggtgacccctgaggataacgatgggttcaagcctcctagggaacatctgaattccaaaactaagggggctcagaaagacagctcatccaatcacgtagatgaattcgaagataacctcctgatcgagtccgatgtaatcgatatcacaaagtatcgggaggaaactccgccccgcagcagatgtaaccaggcaaccaccttggacaaccaaaatatcaagaaggccatagaggtgcaaatccagaaaccccaggagggtagatctacagcttgtcaacgccagcaggttttttgtgatgaggaactgctgagcgagactaaaaacacgagcagtgacagtctaaccaagttcaacaaaggtaacgtgttccttctcgacgcaactaaggaaggcaacgtcggcagattcctgaaccattcttgttgccccaacctgctggtccaaaacgtatttgtggaaacccacaaccgcaacttccccctcgtggccttttttacaaatagatatgtgaaggcacgcactgagttgacgtgggattacggctacgaggcagggacagtgcccgagaaggagatcttttgccagtgcggggtgaacaaatgtcgtaagaagattctttag

SEQ ID NO: 134107 - DNA, 975 bp, synthetic construct
  misc_feature 1..975: note = Description of Artificial Sequence: Synthetic coding sequence
  source 1..975: mol_type = other DNA
atgtcacggcccagctctacaggaccttccgccaataagccttgtagcaagcagcctcccccacagcctcagcacaccccaagccccgccgctccacctgctgccgcaacaatcagcgccgcagggcctggcagctccgcagtgccggcagccgccgcggttattagtggacccgggggaggcggtggagccggacctgtttctccccaacatcacgaactgacctctctcttcgagtgccctgtgtgctttgactatgtcctcccccctatccttcagtgtcaggcaggacatctggtctgcaatcagtgtcggcagaaattaagctgctgcccaacgtgccgtggcgccctgacaccctcaattaggaatttggcaatggaaaaggtggcatcggcagtgctttttccatgcaaatatgctaccactgggtgttccctcacccttcatcataccgagaagcctgagcacgaagatatctgtgaatatcggccttactcctgcccttgcccaggcgcatcctgtaagtggcagggctcccttgaggccgtgatgtcccatctgatgcatgctcacaagagcattacaaccctacagggagaggacatcgtcttccttgccactgatatcaatttgcccggggcagtggattgggtcatgatgcagtcttgcttcggccatcatttcatgctggtgctcgagaaacaggaaaaatatgaggggcaccagcagttctttgcaatcgtacttctgatcgggacacgcaagcaagcagagaactttgcctatagactggaactgaatgggaacagaaggcgcctgacctgggaagcaacgccccggtctatccatgatggggtggccgcagcaatcatgaactccgattgtctggtattcgatactgccatcgcgcacctgttcgctgataacggcaatctggggattaacgtgactatttctacctgctgcccgtag

SEQ ID NO: 134108 - DNA, 990 bp, synthetic construct
  misc_feature 1..990: note = Description of Artificial Sequence: Synthetic coding sequence
  source 1..990: mol_type = other DNA
atgatgtctaacagctcaagtgagatcgatgtcattaaaaccagaattccaacatacgatgaagacgataacaccatcctctacgcttacgaaacaaaaccggagtttgtaaacaaggaaccgaatatcgttagtgacgccagctgtaacactgaggagcaacttaaaacagtcgacgatgtactgatacactgtcaggtgatctatgacgccctccagaacttagataagaagatagacgtgattagacgtaaggtctcgaagattcagaggtttcacgcacgcagcttatggacaaaccacaaacgatatgggtacaaaaagcattcatataggctagtcaagaagcttaagctacagaagatgaaaaagaatgaggtttatgagacattttcataccccgagtcatactcaccgaccctgccagtttcccgacgggaaaacaatagtccttcgaacctgccccgacccagcttctgtatggaagagtatcagagggccgagctggaagaagaccctatcctatcccggaccccaagccccgtgcacccgtcagacttctccgagcacaactgccaaccttattacgctagcgatggtgccacctacggtagtagttccggattatgtctgggtaatcctcgggcagattctatccataacacttattctacagatcacgctagcgctgcacctccttctgttacacggagcccagtggaaaacgatgggtacatcgaggaggggagcatcaccaagcacccctctacatggtcggtagaggcagtcgttctcttcctgaaacagactgaccctctggcattgtgtccacttgtggaccttttccgatcacatgaaatcgacggcaaggccctgctgctcctgacatccgacgtgctgctcaagcaccttggggtcaagctgggcaccgccgtgaaactttgttactatatcgaccggctgaagcaaggcaagtgctttgaaaattag

SEQ ID NO: 134109 - DNA, 909 bp, synthetic construct
  misc_feature 1..909: note = Description of Artificial Sequence: Synthetic coding sequence
  source 1..909: mol_type = other DNA
atgatgtccaacagttcctctgagatcgacgtgcaggaaccaaacatcgtttctgatgcaagctgcaataccgaggaacagctgaaaacagtggacgacgtcttgatacactgtcaagtgatctacgatgcccttcagaacctcgataagaagatagacgtcattcgcagaaaggtttctaagatccagaggttccatgctagatctctctggacaaatcataagagatacgggtacaaaaagcattcctacagattagtcaaaaaactcaagctgcagaaaatgaaaaaaaacgaggtgtatgaaacattcagttacccggagagctactctcccaccttgcccgtttcacgtagagagaacaatagtccgtccaacctgcctagaccctcattttgtatggaggagtaccagcgggcagagcttgaggaggatcccattctgagtcgcacacccagccccgtgcacccctccgactttagtgagcacaattgccagccttactatgcaagcgatggcgccacatacggaagctcgagcgggctctgcctcggcaaccctcgcgctgatagtattcataatacgtactctacggaccatgctagtgcggcaccaccctctgtgacacgatccccagtggagaatgatgggtacatcgaggaaggctctatcacgaagcacccctcaacatggtcagtggaggctgtcgttctctttttaaagcagacagacccattggctctctgtcccctggtggatctgttccgatcccacgagatagatggtaaagcgttgttacttcttacctctgatgtgctgcttaagcacctgggtgtaaagctcggcacggccgtgaagctctgctattatatagatagattaaagcagggaaaatgcttcgaaaattag

SEQ ID NO: 134110 - DNA, 627 bp, synthetic construct
  misc_feature 1..627: note = Description of Artificial Sequence: Synthetic coding sequence
  source 1..627: mol_type = other DNA
atgaaaaagaacgaggtttatgaaacttttagctaccccgagtcttactcacccacattaccggtgtccaggagagagaataacagcccctctaatttgcctcgcccatctttctgcatggaagagtaccagagggccgaactggaggaggaccccatactgtcaaggacacccagccctgttcacccctctgatttctcggaacacaactgtcaaccttattacgcatccgatggggccacgtacgggtccagttcaggactctgcttgggaaacccaagagcggacagtatacacaacacgtattctacagaccacgcctccgctgcacctccttctgttactcgaagcccagtcgaaaacgacgggtatatcgaggaagggtctattacaaagcacccctcaacctggtcagtggaagccgtcgtgcttttcctcaagcagactgacccattggcactgtgtcccctagtggacttatttaggagtcacgagattgacggtaaagctctgctactgcttaccagcgatgtcctgctaaaacacctcggcgtgaagctcggcaccgcagtaaagctgtgttactacatcgacaggctcaagcagggtaaatgctttgagaactag

SEQ ID NO: 134111 - DNA, 627 bp, synthetic construct
  misc_feature 1..627: note = Description of Artificial Sequence: Synthetic coding sequence
  source 1..627: mol_type = other DNA
atgaaaaagaatgaagtgtatgaaactttcagttaccctgaaagctactcccccacactgcccgtgtcaaggagggaaaacaattcacccagcaatcttccaaggccaagcttctgcatggaggagtaccagcgcgccgaattggaggaggaccccatcctttccagaacgccaagtcctgttcatcctagcgacttttcagaacacaactgccaaccttattacgctagcgacggagcgacctatggcagcagctcaggcctgtgtctcggcaacccccgagcagatagtatccacaatacatatagtaccgatcatgcaagcgccgctccaccgtctgtaactcggtctcccgtggagaacgacggctatatcgaagaaggttctatcacgaagcaccccagcacgtggagtgtagaagccgtagtcctgtttctgaagcagactgatccactcgcactctgtcccctggtggacttgttccgaagccacgaaatcgacgggaaggcactcctgttgctgacatcggacgttctcctgaagcacctgggtgtgaaattaggaactgccgtcaagctgtgttactatatcgaccggctgaaacagggtaaatgtttcgaaaattag

SEQ ID NO: 134112 - DNA, 447 bp, synthetic construct
  misc_feature 1..447: note = Description of Artificial Sequence: Synthetic coding sequence
  source 1..447: mol_type = other DNA
atgatgtcaaactccagctcagaaatagatgttcaagagcccaacatcgtgtctgatgctagctgcaataccgaggaacaattaaaaaccgttgacgatgtactgatccactgtcaggtcatctatgacgccctacagaatctcgataaaaagatagatgtaatacgacgcaaggtcagcaagattcagagatttcatgctagatccctctggacaaaccacaagcgttacggctacaaaaagcattcctatcgactcgtgaagaaactgaagctgcagaaaatgaagaaaaatgaagtatacgaaacgtttagctaccctgagtcttatagccctactctgccggtctcccgaagggaaaacaacagcccgtcaaacctccctcggccatctttctgtatggaggaatatcagagagctgagctggaagaagatcctattctgtag

SEQ ID NO: 134113 - DNA, 2103 bp, synthetic construct
  misc_feature 1..2103: note = Description of Artificial Sequence: Synthetic coding sequence
  source 1..2103: mol_type = other DNA
atgggacagaccgttaacgaagattcaatggacgtaaagaaggaaaatcaagaaaagaccccccagagctcaaccagctctgttcagagggatgatttccactgggaagagtatcttaaggagaccggctcaatttccgccccctcggagtgtttccggcagagtcagatacctccggtgaatgattttaaagtgggaatgaaattggaagcgcgagaccctcgcaatgccactagcgtttgcattgctacagtcatcggaatcactggggcaaggctgcggctgagactggacgggtctgacaacagaaacgacttctggcggttagtcgattctccggacatacaacccgtaggcacatgtgagaaagaaggtgacttgcttcaaccgcccctcgggtatcagatgaatacctcaagctggcctatgttcttgctgaagaccctaaacgggtcggagatggcaagtgccaccttgtttaagaaagaacccccaaagcctcccctgaacaacttcaaggttgggatgaagcttgaggctattgacaaaaaaaatccttatctgatttgcccagcgaccatcggtgatgtgaagggggacgaagtgcacattaccttcgacggctggtctggagcattcgattattggtgtaagtatgactcacgcgacatcttccctgccggctggtgccgcctgaccggtgatgtcctacagcctccgggaaccagcgtcccgattgtcaagaatattgctaaaacagagagttcaccctctgaggctagtcaacatagcatgcagtcccctcaaaaaacaacattgatcctccccacacagcaggtccgtcgttcaagtagaatcaagcctcccggacccactgctgttcccaagcggagcagttctgttaaaaatatcacaccgcgtaaaaaggggcctaattcagggaagaaggagaaaccacttcccgtaatctgctcaacgagcgccgcatcattgaaaagcctaacgcgcgatagagggatgctatacaaagacgtggctagcggcccttgcaagattgtgatgagtacagtttgcgtgtatgtcaacaaacacgggaattttggccctcatctggacccaaaacgcattcagcagttgcctgaccactttgggcctggtccagtgaacgtggtcctccgacgcattgtgcaggcttgcgtcgactgtgccctggaaacaaagacagtgttcgggtatctcaaaccggacaacagaggcggcgaggtgattactgccagtttcgatggagagacgcattctatccaactgcctccagtaaactccgcctcgtttgctctgaggttcctggaaaatttttgccattctctgcaatgtgacaatcttctcagctcgcagccattctcttcgtctaggggacacacccatagtagcgctgagcatgacaaaaatcagagtgctaaagaggatgtgaccgagcgccagagtactaagcgaagtccccagcagacagtgccatacgtcgtgcctctctcccccaagctcccgaaaacaaaagaatacgcatctgaaggagagcccctgtttgcaggtggcagcgccatcccaaaagaagagaatctgtcagaggactccaaaagtagcagtctaaactctggcaactatttgaaccctgcttgtaggaatcccatgtatatccacacaagcgtgtcccaggatttctcccggtccgtgcccggaactacctctagtcctttggtgggtgacataagcccaaagagcagtccgcacgaagttaaatttcagatgcagcgcaaatctgaagcaccgtcatacatcgcggttccagatccatctgtgctgaagcagggattcagcaaagacccttctacctggagtgtagatgaagtgatccaattcatgaagcataccgatcctcaaatatcgggaccgctcgccgatctgttcagacaacatgagattgacggcaaagctctgttcctgttgaaatccgatgtcatgatgaaatatatgggattaaagttgggccccgcactcaagctctgttactatatagaaaaactcaaggaggggaaatattcatag

SEQ ID NO: 134114 - DNA, 1038 bp, synthetic construct
  misc_feature 1..1038: note = Description of Artificial Sequence: Synthetic coding sequence
  source 1..1038: mol_type = other DNA
atgcagtctccccagaaaactacgctgattctcccaacacagcaggtacgccggagtagtagaattaagccccccgggcccacagcggtgcccaaacgctccagctcggtgaaaaatataacgccaagaaagaaaggtccaaactcaggaaaaaaagagaagcctctccccgttatctgtagcacttccgccgcctcgttaaaatccttaaccagggaccgggggatgctgtacaaggacgtcgcatctggcccctgcaagatcgtgatgagcaccgtttgcgtgtatgttaacaaacatggtaatttcggaccccacttagaccccaagcggatccagcaactccccgaccattttggacctggtccagtcaacgttgtgctgaggcgcatcgtccaggcctgcgtagattgtgccctggagacaaagacggtgtttggctacctaaagccggataatcggggcggggaagtgatcaccgcttcctttgacggcgaaacgcactccatccaactgcctcccgtgaacagtgctagcttcgctctgagatttttagaaaatttctgtcacagtctccagtgtgacaaccttctctctagccagcccttctcgagctctcggggccacactcactcctcggcagagcacgataagaaccagagcgccaaggaggatgtcacggagcggcagtcaacaaagcgatctcctcagcagacggtgccgtacgtggtgcccttgtcacctaaattgcctaaaactaaggagtacgcttcggagggtgagccactatttgccggtgggagcgcgatcccaaaggaagaaaatctttccgaagattcaaaaagtagttctcttaattcaggcaattacctgaatcctgcctgccgtaaccctatgtatatccacacctcagtctctcaggactttagccgcagcgtgcctgggacaacgtcttcccctctagttggtgacatctcgcctaagtcatctccgcacgaagttaaatttcagatgcagagaaagagcgagggcaactag

SEQ ID NO: 134115 - DNA, 378 bp, synthetic construct
  misc_feature 1..378: note = Description of Artificial Sequence: Synthetic coding sequence
  source 1..378: mol_type = other DNA
tgagcaaaggaagacgtgacagaacgtcagagcacgaagaggtctccccagcagactgtgccctatgtggttccattaagtcccaagttgcccaagaccaaggagtacgcttctgagggcgagccgctctttgcaggtggtagcgcgatccccaaagaagaaaatcttagtgaggactctaagtcttcaagcctgaattctgggaactatttaaaccccgcctgccggaatcctatgtacatccacacctcggttagtcaggacttttcacgctctgttccgggaaccacatcttctccacttgtcggagatatttctccgaaaagctcccctcatgaggtgaagttccagatgcagcggaagagcgagggcaactag

SEQ ID NO: 134116 - DNA, 1734 bp, synthetic construct
  misc_feature 1..1734: note = Description of Artificial Sequence: Synthetic coding sequence
  source 1..1734: mol_type = other DNA
atgggccagactgtcaatgaagatagcatggatgttaaaaaggagaaccaggagaagacgcctcaatcccaaatcccacctgtaaacgacttcaaggtggggatgaagctggaggcccgggatccaaggaacgcaaccagtgtgtgcattgccacagttattggaattacgggcgcgcgcttgcgcctgcgcctggatggatccgacaatcggaacgatttttggcggctagttgactctcctgacatccaacccgtgggtacctgtgagaaagagggggatctccttcagccaccacttgggtaccagatgaatacttcttcatggcccatgttcctgctgaaaactcttaacggctcggaaatggcctctgcgactctgtttaagaaggaaccgccaaagccaccactgaacaactttaaggtgggcatgaaactggaggccattgacaaaaagaacccttacctaatttgtccggccactatcggggacgtcaagggcgacgaagttcatatcacattcgatgggtggagtggagcattcgattactggtgcaagtacgattccagagacatcttccctgcagggtggtgtcgactgacaggagatgtcctacagcccccaggaacatccgtgccaatcgttaagaacattgcaaaaactgaatcatcgcctagtgaagcatctcaacacagcatgcagtccccccagaaaaccaccctcatccttccaacccaacaagtgcgcaggagtagccgtatcaagccacccggaccaacagctgtgcctaaacgttcttcaagcgtaaagaatatcaccccaaggaagaaagggccaaattcaggtaagaaggaaaaaccactgcctgtcatctgctcaacgagtgctgcatccttaaagagtctgactagagatagaggaatgctctacaaagacgtcgcctcagggccttgtaagatagttatgagtaccgtgtgcgtttacgtgaataagcacggcaatttcggccctcacctcgatcctaagcggatacaacagcttcctgaccatttcggaccaggccctgtgaatgtggttttgcgtcgtatcgtgcaggcctgcgtggactgtgctctggaaacgaagacagtgtttggctatctgaaaccggacaatcgtggcggcgaggttatcacagcatcctttgacggggagactcatagtattcagttacccccggttaactccgcttcgtttgcccttcgcttcctggagaatttttgccacagcctgcagtgcgataacctgctgtctagccagccctttagttcttcacgaggtcatacccactctagcgctgaacatgacaagaatcaaagtgcaaaggaggatgtaactgagcggcagagtacaaagaggtcaccccagcaaacagtgccttatgttgtacccctgtctccaaaactacccaaaactaaagaatacgccagcgagggggagcccctgttcgctggcggctctgctatccctaaggaggaaaacctttccgaagactcgaaatctagttcccttaactcggggaattatctgaacccagcttgtcgcaatcctatgtatattcatacttcagtaagtcaggattttagccgttccgtgcccggaactacttcaagccccttagtgggggatatcagccccaagagctccccccacgaggttaaatttcagatgcagcggaagtctgaaggtaattag

SEQ ID NO: 134117 - DNA, 615 bp, synthetic construct
  misc_feature 1..615: note = Description of Artificial Sequence: Synthetic coding sequence
  source 1..615: mol_type = other DNA
atgcagagctacgcctccgctatgctgtccgtcttcaattctgatgactattctcccgctgtgcaggaaaatataccagctctcaggcgcagctcttctttcctgtgcacggagtcatgtaatagcaagtatcagtgtgaaacaggggaaaattccaagggtaatgtgcaggaccgcgtgaaacgaccaatgaacgccttcatcgtgtggtcacgggaccagcgcaggaaaatggcattggagaatccccggatgcgtaactccgagatctctaagcagctgggttatcaatggaagatgctcacagaggctgagaaatggccgtttttccaggaagcgcaaaagctccaggctatgcatagagagaaatatccaaactacaaatatcgaccccgtcgcaaagcaaagatgcttcccaaaaattgctctctccttccagccgaccccgcttcagtgctgtgctctgaggttcagttagataatcgcctgtatcgggacgattgcactaaagccactcattctaggatggaacatcaattggggcatttacctcctatcaatgctgcctctagtccacagcagcgcgaccggtactctcattggaccaaattgtag

SEQ ID NO: 134118 - DNA, 594 bp, synthetic construct
  misc_feature 1..594: note = Description of Artificial Sequence: Synthetic coding sequence
  source 1..594: mol_type = other DNA
atgcagagttacgcctcagccatgctgtccgtgttcaatagcgacgactattccccagccgtacaggagaatatcccagccctgcgaaggagctcgtctttcctgtgtacagagtcttgcaattccaaataccagtgcgaaactggggagaattccaaggggaacgttcaggacagggtcaagcgacccatgaatgccttcatagtgtggtcacgggatcagcgacggaagatggccctggagaatccccgaatgagaaacagcgagatcagcaagcagcttggctaccagtggaaaatgttaacagaggcggagaaatggccatttttccaggaggcacaaaagcttcaggctatgcacagggaaaagtacccaaactacaagtatcgacccagacgcaaagcgaaaatgctcccaaagaactgctcactgctgcccgccgacccagcttccgtgctctgctccgaggtccagctggataatagattgtatagggacgactgcactaaggctacccacagcaggatggagcaccaattgggccatttaccgccaatcaacgcggcatctgctgccaccggaccacttcaatag

SEQ ID NO: 134119 - DNA, 498 bp, synthetic construct
  misc_feature 1..498: note = Description of Artificial Sequence: Synthetic coding sequence
  source 1..498: mol_type = other DNA
atgcagtcttacgcttccgccatgttgtccgttttcaattcggacgattactctccggccgtccaagagaatatcccagccctgagaaggagttcaagtttcttgtgtaccgaatcctgtaatagcaagtatcagtgtgagactggcgagaacagcaaaggcaatgtccaagatcgtgtgaaacggcccatgaatgcctttatcgtgtggtcccgtgaccaacgcagaaagatggctctcgagaatccacgcatgcggaactcggagatctcaaaacagctcggatatcagtggaaaatgctgaccgaagctgagaaatggcccttctttcaggaggctcagaaattgcaagccatgcaccgagagaagtatccaaattacaaatacaggccccggcgtaaggccaagatgctgccaaaaaactgctctttgctgcctgcagaccctgcttccgtgctctgcagcgaagtccaaggtcagcaggtagtgcaaggatag

SEQ ID NO: 134120 - DNA, 3729 bp, synthetic construct
  misc_feature 1..3729: note = Description of Artificial Sequence: Synthetic coding sequence
  source 1..3729: mol_type = other DNA
atgaagaacctgcttaccgagaagtgcatttcatctcataattttcaccaaaaagtcatcaagcagcgaatggagaaaaaagtggactctcgttactttaaggatggtgctgtgaagaagccttactctgccaaaactctctccaacaagaaatcatcagcctcctttggaatacgcagagaactgccatctacctctcacctcgtccagtatcgcgggacgcacacctgtaccagacagggacggctcagggaactgaggatcagatgcgttgctcgtaaatttctctacctctggattcggatgacgttcggcagggtgttccccagcaaagctcggttttactacgaacagcggctactaagaaaagtatttgaagaatggaaagaagaatggtgggtcttccagcatgagtggaaactctgtgtcagggccgattgccactaccgttactacctgtataatctcatgttccagacttggaaaacctatgttcggcagcagcaagagatgcgcaataagtacattcgcgccgaagttcatgacgccaagcagaagatgaggcaggcctggaaatcctggctgatctacgttgtcgtgcgcaggacgaaactccagatgcagaccacggcactcgaatttagacagcgcattattttaagagtgtggtggagcacatggcgccagagactcggacaggtgagagttagtcgcgcacttcacgctagcgccttaaagcatagggccctttccctccaagtccaagcatggagccagtggagggagcagctcttgtatgttcagaaagaaaaacagaaggtggtgagtgccgtaaaacatcatcagcactggcagaaaagacgcttcctcaaagcatggctggagtacctgcaggtccggcgcgtgaagcggcagcagaacgaaatggccgagcggtttcatcatgtgacggtcttgcagatctacttctgcgattggcagcaggcctgggagcgccgagagtcactctacgcccaccacgcccaagtcgaaaagttagcacggaagatggcgctgagacgagcattcacccattggaagcattatatgctgctgtgtgcagaagaggccgcacaatttgagatggctgaggagcaccacaggcactcgcagctgtacttttgctttcgcgctttgaaagataatgtgacacacgcgcacctgcaacagattcggagaaatctcgcacaccagcagcatggcgttactcttctacatcgattttggaatctctggcgttcgcagatcgaacaaaagaaggagagagagctgttaccgcttttacacgccgcctgggaccactacagaatcgcgctgctgtgcaagtgtatcgagctgtggctgcagtatacccagaaacgaagatataaacaactgctccaagcacgcgccgacggccatttccagcagagagcactgccggccgctttccacacgtggaatagattatggcgatggcggcaccaggagaacgtgctgtcggcaagagcaacacgcttccatagagaaacactggaaaagcaagtgtttagcctgtggcgccaaaaaatgttccagcatagagaaaataggcttgcggagcgcatggcaattctgcatgcggaaaggcagttgctgtatcgcagttggtttatgtggcaccagcaggcagccgcaaggcaccaggagcaggagtggcagacagtcgcgtgcgcacatcataggcatggacgactaaagaaggcattctgcctgtggagagagtcagcccagggcctcaggaccgagcggacagggcgcgtgagagccgcagagttccacatggcccagctcctccgatgggcgtggtcacagtggagagagtgcctcgcattgagaggagctgaacgccaaaaactgatgagagcggacctgcaccaccagcatagcgtcctgcaccgcgccttgcaggcctgggttacctatcagggtagagtgaggtctatactacgagaggtcgcagccagggagtcccagcacaaccgccaactgctgaggggcgcattgcgaagatggaaggagaacaccatggcccgcgtcgacgaggcaaagaagacatttcaagcctcgactcactatcgcaggacgatttgctcaaaggtactcgttcaatggcgtgaggctgtcagcgtacagatgtactataggcaacaggaagattgtgctatttgggaggctcagaaagtgctagatcgaggctgcctgcgcacttggttccaacgttggtgggactgttctcgcagaagcgcccagcagcgattgcagctagaacgcgcagttcagcaccaccaccgccaactactgctggagggcctggcgcggtggaagacacatcacttgcagtgcgtacgaaaaagactcctccaccgtcagagcacccagctattggctcaaaggcttagtagaacttgttttcgccagtggaggcagcagctcgctgcaagacggcaggaacagcgggccaccgtacgagcactttggttttgggccttctctctccaggccaaggtatgggctacctggctggcatttgtgttggagcgtcggagaaaaaaagcaaggttgcaatgggccctacaagcctaccaagggcagctgttgcaagaaggcgccacgagattgctgcgattcgccgcctcaatgaaggcctctcgtcagcagctgcaagcccaacagcaggtacaggcggcgcactccctgcacagggctgttagacggtgcgctacactctggaagcagaaagtcctgggccggggagggaagccccaaccactggcggccattgcaccttcacgcaaggtcacctttgaagggcctctgttgaatagaattgccgcaggagcgggggatggaactctcgagaccaaacgcccacaggctagccggcccctcggcgcccttgggcggctcgctgcagaggagccacacgccctcgagctcaataccgcccactctgcacggaaacagcctcgtaggccccatttccttttggaaccagcacaaagccagagacctcagaaaccacaagagcacggacttggcatggctcagcctgcagcccctagcctcacaagacccttcttggctgaggcccctacggcgctggtcccacactctcctcttcccggcgcactgtcttcagcccctggtcccaagcagccaccgacggcctcaacgggtccagaactgttgctcctcccactgtctagttttatgccttgcggagcagctgccccggcccgcgtgagcgcacaaagagccaccccccgggacaaaccccccgttccttcgtctttggccagtgtacccgatccccacctgttgctgcccggggacttctcggctacaagagctggcccaggcttgtcaacagcagggagcttagacctggaggccgagctagaagaaatacagcagcagcttcttcactaccagactacaaagcagaacctctggagttgtaggagacaggccagttccttgcgtcgctggctggagctcaacagggaagagcccggtcccgaggatcaagaggtagagcagcaggtccagaaggagttggaacaggtcgaaatgcagatacagctgctggctgaagagttacaggctcaaaggcaaccaattggtgcctgcgtggcccggattcaagctctgcgccaggcactgtgctag

SEQ ID NO: 134121 - DNA, 3483 bp, synthetic construct
  misc_feature 1..3483: note = Description of Artificial Sequence: Synthetic coding sequence
  source 1..3483: mol_type = other DNA
atgaagaatctgctaacagagaaatgtatctcctcccacaactttcaccagaaggtcattaagcagcgaatggaaaaaaaagtggacagccggttttactatgaacagcggctgctgcgtaaggtgtttgaagagtggaaggaagagtggtgggtatttcagcacgagtggaaactgtgcgttagggctgactgccattacagatactacctgtacaatctgatgtttcagacgtggaagacttatgtacggcagcagcaagagatgcggaacaagtacatacgagccgaggtacacgacgccaaacagaaaatgaggcaggcctggaagagttggcttatttatgtggtggtgaggaggaccaagttgcagatgcagacaaccgccctggaattccggcagcgcattattctgcgcgtgtggtggagcacctggcgccagcgacttgggcaggttagagtctcaagggcactgcatgcatccgccctaaaacacagagccctctcactgcaggtacaggcatggtcacagtggcgggagcagctcctgtacgtgcagaaggaaaaacagaaggtggtgagcgcagttaagcaccaccaacactggcagaagcgccggtttctgaaagcatggttagagtacttacaggtccggagggtcaaaagacagcagaacgagatggccgagaggttccaccatgtaaccgtgctccaaatctatttttgcgattggcaacaagcctgggagcgccgggaatctctctatgcccatcatgctcaggtggagaagcttgctcgcaaaatggcgctgcggagagcgtttacacattggaagcactacatgcttctctgtgccgaagaggcggctcagttcgagatggccgaagaacaccatcgccacagccaactttatttttgcttccgagccttgaaagacaatgtcacccatgctcatctgcagcagatacggcgaaatctggcccatcagcagcacggggtgacacttctgcacaggttttggaacctgtggcgctctcagatcgaacagaaaaaagagcgggaactcttacccttgctgcacgccgcctgggaccactacaggatagctttgttgtgtaaatgcattgaactgtggcttcaatatacacagaagcggcgatacaaacagctcctgcaggctcgggccgatggacattttcagcagagggcgcttccggctgctttccatacatggaatagactgtggcggtggagacatcaggagaatgtgctgtccgctcgggcgactagattccaccgtgagaccctggagaagcaggttttttcgctgtggaggcaaaagatgtttcaacaccgggagaacaggctggctgaaaggatggcaatcctccacgcagagcggcaactcctgtacagatcatggttcatgtggcatcagcaggcggccgcgcgtcatcaggaacaggagtggcagaccgtcgcctgtgcccaccaccggcacggaaggttgaagaaggccttctgcctgtggagggaaagtgcacaagggttgagaacagagcgcaccgggcgcgtacgcgcagctgaattccacatggcacagctcttgcgatgggcttggtctcaatggagggaatgcctggccctacggggtgctgaacgtcagaaactaatgagggccgacttgcaccaccaacatagtgtactacacagggcattacaggcatgggtcacctaccagggcagggtccgcagtattttgagagaagttgcagctagggaaagccagcacaatcgtcagcttttacgcggagcactccgaaggtggaaggagaatactatggctcgggtggacgaagcaaagaagacttttcaagcctcaacccactataggcgaactatctgttctaaagtgctggtccagtggagagaggctgtgtcggtgcagatgtactatcgccagcaggaggattgcgctatctgggaggctcagaaagtccttgatcgggggtgccttcgtacatggttccaacggtggtgggactgctctaggcgatcggcccagcagcgactgcagcttgagcgggctgtgcagcatcatcatcgacagctactcttagagggcttggcccggtggaagacgcaccatctacagtgcgtcagaaaaaggctcctgcacaggcagtccacccagttactggcccagcgtttatctcgcacgtgttttcgccaatggcgccagcagctggcggccaggcgacaggagcagagggccacagtgagagctctatggttttgggctttttctctgcaggccaaggtctgggccacctggcttgccttcgtcttggaacgcagacggaagaaagcgcgtctccagtgggccctccaggcttatcaaggtcagctgctgcaggaaggggctactaggctgctgcgctttgctgcatctatgaaagcctctcggcagcagctccaggctcagcagcaggtccaggctgcgcatagtcttcacagagccgtccggaggtgcgcaacactatggaagcagaaggtgctcggcaggggaggtaaacctcagccactcgcggccattgcacccagccgcaaagttaccttcgaggggccactgctgaaccgcattgccgccggggccggcgacggcacactcgagacaaagaggcctcaagcgtccaggccacttggcgctctgggacgattagccgctgaggagccacatgccctagagctgaacaccgcccactcagctcgtaaacaacccaggaggccccactttctgttagaacccgctcagagtcagcgcccccagaaaccccaagagcatgggctggggatggcgcagcccgcggccccctccctgaccaggcccttcctggcggaagcgcccaccgccttagtccctcattctccgctgcctggagccctgagctcagctcctggacccaagcagccacccaccgcctccaccggacctgaacttttgttgttgcccctgtcaagctttatgccttgtggcgccgccgcgcctgccagagttagtgcacagcgtgcaacccctcgtgataaaccaccagttccaagttctctggctagcgttcctgacccacacctcctgctgcctggggacttcagcgcgacgcgtgcagggccagggttgtctacagccggcagcttggatctggaagccgaactggaggagatccagcagcagctgctgcactaccaaaccaccaaacaaaacctgtggtcgtgccgtaggcaagcttcgtccctaaggcgctggttagaactgaaccgcgaagaacctggacccgaagaccaagaagtcgagcagcaagtccagaaagaattggagcaggtggagatgcagattcagctgttggccgaagagctgcaggctcaacgacaaccgatcggagcctgtgtagctcgaatccaggccctaagacaggctctatgctag

SEQ ID NO: 134122 - DNA, 3096 bp, synthetic construct
  misc_feature 1..3096: note = Description of Artificial Sequence: Synthetic coding sequence
  source 1..3096: mol_type = other DNA
atgaagaacttgctgaccgagaaatgtattagctcacacaattttcatcaaaaagtcataaaacagcgcatggagaagaaggtcgatagcaggttttactatgagcagcgcctcctgagaaaagtgttcgaggaatggaaggaggagtggtgggtattccagcacgagtggaaactctgtgtccgagctgattgccactacagggtttggtggtccacctggaggcagcggctgggtcaggtgagagtgtctagggccttacacgcttcagcgttaaaacaccgggctttgtctctgcaggtccaggcttggtcgcagtggcgcgagcagttactgtatgtgcaaaaagaaaagcagaaggtggtgagtgcggttaagcatcaccagcactggcagaagaggaggttcctcaaagcttggctggaatatctgcaagtgagaagggtaaagcggcaacaaaatgagatggcggaacgattccaccatgttactgttctgcagatttatttttgtgattggcaacaggcctgggaacgccgggaatctttgtacgcacaccacgctcaggtcgagaaactcgcccgcaaaatggccctcagacgagcattcacccactggaagcactatatgttactctgtgccgaggaagccgctcagtttgaaatggctgaagaacaccatagacattcgcagctgtatttctgtttccgtgcacttaaagacaatgtgacccacgcccatcttcaacaaatcaggaggaatctagctcatcagcagcacggcgttacactcctccaccgattctggaatctgtggcggagtcagatagagcagaagaaagagcgggagctcctgccgctcctgcacgcagcctgggatcactacaggattgctctcttatgtaaatgcattgagctgtggttgcagtacacacagaaacgcaggtacaaacagctcctgcaggccagagcagacgggcactttcaacagcgagcacttcctgccgcgtttcatacctggaaccgcctctggcgctggcggcatcaagaaaacgtcctgtccgcaagagcaaccaggtttcatagagagacgctggagaagcaagtcttctcgctctggagacagaagatgtttcagcatcgggagaaccggttagctgagcgcatggccattctacatgctgaacgacagctcctgtatcgctcttggttcatgtggcaccagcaggcagccgcccgccatcaggagcaggagtggcagaccgtagcctgcgctcatcaccgtcacggacggctgaagaaggctttctgcttatggcgggagagtgcgcaggggctgcggactgaaagaactggccgagtcagagcagctgaattccacatggcccaactgctacgctgggcctggagtcagtggcgtgagtgcctcgccttacgcggtgcggaaagacagaaactcatgcgagccgacttgcaccatcagcacagtgttctacatcgggccctgcaagcatgggttacttatcagggccgcgtcagaagcattctgagggaggtggctgcccgagagagtcaacacaatcgtcaactactgagaggagctctcaggaggtggaaggagaacacaatggcccgggttgacgaggcgaagaaaacattccaagcatccacccattacagacgaactatctgtagcaaagtgcttgtgcagtggagggaagctgtgtcggtgcagatgtactatcgtcagcaggaagactgtgctatatgggaagcgcagaaggtcttagaccgcggttgcctacggacctggtttcagcgatggtgggattgttctaggcgctctgcgcagcaacgcttgcaactagagcgggccgtccaacaccaccatagacagctgcttctcgaaggcctggctcgctggaagacgcaccatttgcagtgcgtccgtaaaagactactgcacagacagtctacccagttactggcacaaaggctctcacgcacgtgttttagacaatggaggcagcagctggccgcccgtcgtcaggaacagagagccacggtgcgcgcactgtggttctgggccttcagtcttcaggctaaggtatgggcgacctggctcgcgttcgtcctggagcgccgcagaaagaaggccagacttcagtgggccctacaagcgtaccagggtcagctcttacaggaaggcgcaacacgtctcctcaggttcgccgctagcatgaaggcctctcggcagcagcttcaggctcaacagcaagtgcaggctgcccatagtctccatagagcggtccgccgctgtgcaaccttgtggaaacagaaggtcctggggaggggaggcaaaccccaaccattagctgccatcgccccttctcggaaagtcacctttgaagggcctctgctgaacaggatcgccgctggtgcgggcgatggtaccctcgaaactaagaggccacaagctagcaggccccttggggccctgggacggctggcagccgaggaacctcacgcattggaacttaacacggcccactcagcgcgtaagcagcctagacgaccacacttccttcttgagcccgcacagtcccagaggccccaaaaaccgcaggagcatggcttgggaatggcacagcctgccgccccctctttgacacggcctttcctggccgaggctcctacagcattagtcccacatagcccgttaccaggagcactcagtagcgctcccggacccaagcagccgccaacggcctcaaccggacctgaactgcttctgcttcccctgagttcatttatgccttgtggcgcggcggcacccgcaagagtgagcgcccagcgtgccaccccacgtgacaagcctccagtcccatcaagcctggcgagcgtcccagacccacacttacttctccccggggattttagcgccacaagggccggtccaggattgtctacggccgcttggacgcttaggctgaacttaagaaggtcatcatccaattactgcactacccgccctccatcgaggacatcaggtcctgtaggaggaaagcgagcagcgtgtgcaggtggatggtcttag

SEQ ID NO: 134123 - DNA, 2976 bp, synthetic construct
  misc_feature 1..2976: note = Description of Artificial Sequence: Synthetic coding sequence
  source 1..2976: mol_type = other DNA
atgaagaatcttcttactgagaagtgcatttcctcccacaattttcaccaaaaagtaatcaagcagagaatggaaaagaaggtggacagccgctactttaaagatggggccgtcaaaaagccatatagcgccaaaacattatccaataagaagtctagcgcctcctttggaataagaagagaactccctagtaccagccatctggttcagtatcgcggaactcacacttgcacgagacaaggcaggctgcgagaactccgaatccgattctattacgagcagaggctgctgcgaaaggtgttcgaagagtggaaggaagaatggtgggtgtttcagcatgaatggaagctgtgtgtcagggccgactgccattatcgttattacctctataacctgatgtttcagacgtggaaaacctacgtgcggcagcagcaagaaatgcgaaataagtacattagagccgaagtccatgatgccaagcagaaaatgcgtcaggcctggaaaagctggctgatatacgtcgtggtgcgccgcacaaaactgcagatgcaaacaactgctttagagttccgccagagaattatccttcgcgtgtggtggtccacttggcggcaacgactgggccaggtccgcgttagcagggccctgcatgcctccgccctaaaacaccgagccctgagcctccaggtccaggcttggtcacagtggcgggaacaactgctgtacgttcagaaagaaaaacaaaaggtggtgagtgccgttaagcaccatcaacactggcagaagcggcgttttctgaaggcttggctggagtacttgcaggtgcggcgggtgaagcgccagcagaacgaaatggctgaacgatttcaccacgtcactgtcctgcagatctacttttgtgactggcagcaagcatgggagagacgggagtcactgtatgctcatcacgctcaggtcgaaaagcttgccagaaagatggcccttcggagggcatttacccactggaaacattacatgcttctctgcgcagaagaagccgcgcagtttgaaatggctgaagaacaccacagacactcccagttatatttttgtttccgagcactcaaggacaacgtcactcacgcacacctgcaacagatccggcgcaatctcgcccatcagcaacacggagtcacgctgctgcacaggttctggaacctctggaggtctcagatcgagcagaagaaggaacgcgagttgctccccttgctgcatgcggcctgggaccactatcgcattgctttgctgtgtaaatgtattgagctatggctccaatatacacagaaacggcgttataagcaactattgcaggcccgtgctgatggacacttccagcaacgcgctctcccagccgcattccatacctggaacagactatggcgctggaggcaccaggaaaacgtgctgtccgctagggccaccaggttccaccgtgagacgctggagaagcaagtattcagtctttggcgccagaagatgtttcagcacagggagaatcgtctcgcagagaggatggccattttgcatgccgaacggcagctgctgtacagaagctggtttatgtggcatcagcaggccgccgctagacaccaggaacaggagtggcagactgtcgcctgcgcacatcacaggcacggcaggctgaagaaagccttctgtctgtggcgcgagtctgctcaaggcctcaggaccgagcgtacagggcgtgtgagagcggccgagttccatatggctcaactcttacgctgggcttggtctcagtggagggaatgtttagcactgaggggtgcagaaagacagaaactcatgcgcgcagatctgcaccatcaacacagcgtgctccaccgagccctgcaagcgtgggtcacctatcaggggagagtccggagtatcctccgggaagtggcagccagggaaagccagcagttgcaggcccagcagcaggtacaagcggcccactcgctccatcgggccgtaaggaggtgtgccacgctgtggaagcaaaaagtactgggccgggggggtaagccccagccgttggctgctatagccccttctagaaaggtgacttttgagggtccactcctcaatcggattgcagctggcgctggcgacggaacccttgagacaaagagacctcaagcctcaagacctttgggagctttgggccggctagccgccgaagagccgcacgctctcgaacttaacaccgcacactctgctcgaaagcagcctcgccggccacacttcttgctggagcccgcccagagccagagaccccaaaaacctcaggagcacggcctggggatggcacagccagccgctcccagcctgactcgaccttttcttgctgaagccccgaccgccttggtgccacactcaccattgcccggcgcactcagcagcgcacctggccctaaacaaccacctactgcttctaccggacctgaacttctgctccttccattaagttctttcatgccatgcggagcagcggcccctgctcgtgtgagcgcacagagagccaccccacgcgataagcctccggtcccaagcagccttgctagcgttccagatcctcatcttctgctgcctggcgacttttcagcgaccagagccggccctggcctgtctacagcaggatctctggatcttgaggccgaactggaagagatccagcagcagctcctgcattatcaaactacaaagcagaatttatggtcatgtcgaagacaggccagctcactccgacggtggctggagttgaaccgtgaggaaccgggacccgaagatcaagaggtagagcaacaggtgcagaaggagcttgagcaggtggagatgcagatacagctgctcgccgaggagctgcaggcgcaacggcagcccattggtgcctgtgtggcccgcatccaggcgctccgtcaggctctttgttag

SEQ ID NO: 134124 - DNA, 3636 bp, synthetic construct
  misc_feature 1..3636: note = Description of Artificial Sequence: Synthetic coding sequence
  source 1..3636: mol_type = other DNA
atgaagaatctcctgaccgagaaatgtataagttcacataatttccatcagaaagtgattaagcaaagaatggaaaaaaaggtagattctagatactttaaagatggagccgtcaagaagccctactcggccaagactctaagcaacaagaagtcatctgcctccttcggcatacgaagggaactcccctccacttctcatcttgttcagtacagaggtacccacacttgtacacggcaaggtcggctgcgcgagctgaggatccgctgcgttgctcgcaagttcctctacttgtggatccggatgacgttcggcagggtctttccctcaaaggcaaggttctactatgagcagaggctcctgcgcaaggtattcgaggagtggaaggaagagtggtgggtattccagcacgaatggaaactgtgtgtgcgagcagactgccactatagatactacttatacaacctgatgttccaaacttggaaaacctatgtcaggcagcaacaggagatgcgcaataaatacattagggccgaagtgcacgacgcaaaacagaagatgcgacaggcttggaaatcctggctgatatacgtggtggtgaggagaacgaagctacagatgcagactacggcgctagagttccggcagcggattattcttagggtgtggtggagcacttggcggcagaggctgggacaggtgagggtgtccagggcgctgcacgctagcgcactgaagcatcgcgctctgtccttacaggtgcaagcgtggtcacagtggcgtgagcagctgctgtatgtgcaaaaggaaaaacagaaagttgtttccgccgtcaaacaccaccagcattggcaaaaacggaggtttctcaaagcatggctggaatatcttcaggtgcgacgtgtgaagagacagcaaaatgagatggccgagagatttcaccacgtcaccgttctgcaaatttacttttgcgactggcagcaggcttgggaaagacgggagtccctctatgcacaccacgcacaggtggaaaagctggcccgcaaaatggccctaaggagggcctttacccactggaaacactatatgttgctgtgcgccgaggaagccgcccagtttgaaatggctgaagagcaccacaggcactcccagttgctgcttcacagattctggaacctgtggaggagccagatagaacagaagaaagagagagagctcttaccactgctgcacgcggcttgggatcactacaggatcgcgctgctgtgcaaatgtatagagttgtggctccagtatactcagaaaagacgctataaacagctccttcaagccagggccgatgggcatttccagcaacgcgcccttcccgctgccttccacacctggaatcgcctctggcgctggcgtcaccaagaaaatgtgctctctgcgagggcgaccagatttcacagagagacccttgagaagcaggtgtttagcctgtggcgtcagaagatgtttcagcatcgtgagaaccgcctggccgaacggatggccatcttgcacgcagaacgccagctgctgtatcgcagctggttcatgtggcatcaacaagcggctgctcgccaccaggagcaggagtggcagactgttgcctgtgctcaccaccgccatgggcgattaaagaaggcattttgcttgtggcgagagtccgcacagggactcagaacggagcgaacagggcgggtccgtgctgcagagttccatatggcccagttgctcagatgggcctggtcacagtggagagagtgtcttgctctcagaggggcagaacgccagaaactgatgagggctgaccttcatcaccagcatagtgtattgcacagagcccttcaagcttgggtgacctaccaggggcgggttaggagtatcctgcgcgaggtagccgcacgtgaaagtcagcacaacaggcaactcttacgcggcgccttgcggcgttggaaagagaacactatggccagagtagacgaggcgaagaagacattccaagcctccacccattaccgtaggacaatttgctctaaggtcctcgtgcaatggcgcgaagccgtgagtgtgcagatgtactatcgccagcaggaggactgcgccatatgggaggcccaaaaagtcctggatcgggggtgtctgcgcacttggtttcaacgatggtgggactgtagcaggcggagcgcacagcagaggttgcaactggagcgggccgtccagcatcaccaccgccaattgttattagaagggctggcaagatggaagacacatcacctccaatgcgtgaggaaaaggttgcttcataggcagtccacccagctcctcgcccagcgcttgtcacgaacatgctttcgacaatggcgccagcagctggcagccagaaggcaggaacagagggcaaccgttcgagccttatggttctgggcattttccctacaggccaaagtgtgggcgacttggctagcattcgtgttggaaaggcgacgcaagaaggctcgtctacaatgggcacttcaggcttatcaggggcaactcctgcaggaaggagcaacgcgcctgttacgattcgctgcttccatgaaggcttcacggcagcagctccaggcccagcagcaagttcaagccgcgcactcccttcaccgagctgtcaggcggtgcgctacactgtggaagcagaaggttctggggcggggcggtaagccccagcccctggccgcaatagccccatctcggaaagtaacatttgaaggccccctcttgaatagaatcgccgccggagccggcgacgggactctcgaaaccaaacgccctcaggcatcgcggccccttggcgctctgggacgtctggcagcagaggaacctcacgcactggaattgaacaccgcccactccgccagaaaacagccaaggaggcctcactttctccttgagcccgcgcagtctcagagaccacagaaaccccaggaacacgggctaggaatggcccaaccggctgcccctagtttaacaagacctttcctcgccgaggctcccaccgccctggtgcctcatagcccactccccggggctctgagcagtgccccaggacccaagcagcccccaactgcctccactggccccgagttgctcttattgcctctgtcatccttcatgccttgtggtgcggcagccccagctcgcgtgtccgcccagcgggctacccccagagacaagcccccagtccccagctcacttgcaagcgttccagaccctcatttactgctccccggagacttttccgcaacaagggctggccccgggctgagtacggctgggagcctggacctcgaggctgaactggaggagatccaacagcaactgctccattaccaaaccactaagcagaacctttggagttgccgccgtcaggcatcttcattgcgccgttggttggaactgaacagggaggagccaggcccggaggaccaggaggttgagcaacaagtccagaaagagttggagcaagtcgaaatgcaaattcagttattagctgaggaactgcaggcacagcgccagccaattggggcatgcgtggcgaggatccaagcgctccggcaggcactttgctag

SEQ ID NO: 134125 - DNA, 3483 bp, synthetic construct
  misc_feature 1..3483: note = Description of Artificial Sequence: Synthetic coding sequence
  source 1..3483: mol_type = other DNA
atgaaaaatctgctgaccgagaagtgtatttccagccacaacttccaccagaaagtcatcaaacagcggatggaaaagaaggtagattcacgcttctactatgagcagcggctgctgcggaaagtcttcgaagagtggaaggaggagtggtgggtcttccagcacgagtggaagctgtgtgtccgggccgactgccattatcgatactacctgtataatctgatgttccagacatggaagacctacgttaggcagcagcaggagatgcgcaataagtacattcgggccgaggttcatgatgctaaacagaagatgaggcaggcctggaaatcttggctcatttacgtcgtcgttcgaaggacgaagctgcagatgcagacgacggcgctggagtttcggcagcgaataattctccgagtgtggtggtccacttggcgacagagacttggtcaggtgcgagtaagcagggcactccacgcctcagctctgaaacaccgggcattgtccctccaggttcaggcatggtcacagtggagagaacagttactgtatgtgcagaaggagaagcagaaagtcgttagcgcggtgaagcatcatcagcactggcaaaaacgaagatttctgaaggcgtggctagaatatctgcaagtgcgtagggtgaaaagacagcagaacgaaatggctgaacgcttccatcacgtaaccgtcctgcagatctatttctgcgattggcaacaggcttgggagcgaagggagagtttgtatgctcaccacgcccaggtggagaaactggcccggaagatggccctgcgtagggctttcactcattggaagcactatatgctgctctgtgcagaggaagccgctcagtttgagatggccgaggaacaccaccggcactcccaactctacttttgctttagagcacttaaggacaacgtcactcatgctcacctgcagcagatcaggcggaacctcgcacatcagcagcacggcgtaacactcctgcaccggttttggaatctatggagaagccagatcgaacagaagaaggagcgggaattattacctctcctacatgccgcatgggatcactacagaatcgccttactttgcaagtgtatcgaactttggctccagtatacacagaagaggaggtataagcagctcctacaggcccgcgctgatgggcactttcaacagagagctctccctgctgcgtttcatacgtggaataggctgtggaggtggaggcatcaggagaatgtactgtctgctagagccacaagatttcaccgcgagacactagaaaagcaggtgttttccctttggagacaaaaaatgttccaacaccgggagaacaggctggccgaacgcatggccatactgcatgccgagcgacagcttctttacaggagttggtttatgtggcaccagcaagctgccgcccgacaccaggagcaggagtggcaaaccgtcgcatgtgcccaccatcgtcacgggcggctcaagaaggccttctgcctatggcgcgaatcggctcaagggctcagaactgagagaactggccgagtcagggctgctgagttccacatggcccaattattacgttgggcgtggtcgcagtggcgcgagtgcttggcactcaggggggcagagcgacaaaaactcatgagggccgatctccatcaccagcacagcgttttacacagagccctgcaggcctgggtgacataccagggtcgcgtgcgcagcattctgagggaagtcgcggctagggagtctcagcacaatagacagctgttaagaggtgccctgaggcgctggaaggaaaatacgatggcccgtgtcgacgaggctaaaaagaccttccaggcaagtactcactacaggagaacgatatgttctaaggtgctcgtccaatggagggaagccgtgtctgtgcagatgtactatcgacagcaggaggattgcgccatctgggaagcacagaaagtgttagaccgcggctgcctgcgcacatggttccagaggtggtgggactgctcacgacgttccgctcagcagagattgcagctggagcgggctgtccagcaccaccatcgacagttattgctagaaggccttgctagatggaaaactcaccatctccagtgcgtgcgtaagagactcctgcacagacaaagtacccagctgctggcccagcggctgagccggacttgcttcagacagtggaggcagcagttggctgccagacggcaggaacagcgggctaccgtcagggccctctggttttgggccttctcacttcaggccaaggtgtgggccacctggttggcctttgtgctagaacgccgcagaaaaaaggcccgactgcagtgggctctgcaggcatatcaaggacaactgcttcaggagggtgcaaccaggttgctccggtttgccgcctccatgaaggcctctcgccaacagctgcaggcccagcaacaggtccaggcggcccatagcttgcatcgcgctgtccgcaggtgtgcaaccttgtggaagcagaaggtcttaggacgcggaggaaaaccccaacctctggccgctatcgccccttcacgtaaagtcactttcgagggaccgttgctgaaccggatcgcagcaggggccggtgatggcacactcgaaactaaacggcctcaagcctcgaggcctctgggggcgctgggcaggctggcagccgaggagccgcacgccttagaattaaacacagctcactccgcacgcaagcagcccagacgaccccatttcttgcttgagccagcacaaagccagcgtcctcagaagccacaggagcacgggctggggatggcgcagccagctgcaccatcactgacacgaccctttctggccgaagcaccaacagctttggtgcctcattcccccttgcccggtgctctctcatctgcgcccggaccaaagcagccacccaccgcttccacgggccctgagctgttacttctgccactgtctagttttatgccctgtggggcagccgccccggcccgtgtatcagcccagagggccacaccgcgcgacaaaccccctgtgcctagctctttggcatccgtgcccgacccccacctgttactccctggcgacttttccgctacccgggcgggtcccggcctgagcaccgctgggagcctggatttggaggctgaacttgaagagatccagcagcagctccttcattaccagacgacgaaacagaacctgtggagctgtcgtcgccaggccagcagcctcaggaggtggctggaacttaatcgggaagaacctggacccgaggatcaggaggtagagcagcaggtgcagaaggagcttgagcaggtggaaatgcagatccagctcttggccgaagaactccaggcgcaaaggcagcctatcggagcgtgcgtggcgcgtatccaggctctgagacaggccctgtgctag

SEQ ID NO: 134126 - DNA, 240 bp, synthetic construct
  misc_feature 1..240: note = Description of Artificial Sequence: Synthetic coding sequence
  source 1..240: mol_type = other DNA
atgaagaacctgctgacagaaaagtgcatctcctcgcacaattttcatcagaaggttattaagcagcgcatggagaaaaaggtcgatagtcggtattttaaagatggggccgtgaagaagccatattcggctaaaaccttgtcaaacaagaagtccagcgcatccttcggcataaggagggagctccccagcacgagccacctcgtccagtaccgtggaacacacacatgcaccagatag

SEQ ID NO: 134127 - DNA, 3564 bp, synthetic construct
  misc_feature 1..3564: note = Description of Artificial Sequence: Synthetic coding sequence
  source 1..3564: mol_type = other DNA
atgaaaaatctcctgacagagaagtgtatatccagtcacaatttccaccagaaggttatcaagcagaggatggagaaaaaggtcgatagccgctacttcaaagatggcgcggtgaagaaaccatattccgcgaaaacgctgtcaaacaagaagagctcggcttccttcgggatcaggcgcgagctgccttccacttcccatctggtccaataccggggcacccatacgtgcacccgtcaggggcgcctccgggaactacggattagattctactacgagcagcggttgctccggaaggtgtttgaggagtggaaggaggaatggtgggtgttccaacacgaatggaaactgtgtgttcgtgccgattgtcactacagatactacttgtacaaccttatgttccagacctggaagacatacgtgaggcagcagcaggagatgcggaataagtatatccgggccgaggtgcatgatgctaaacaaaaaatgagacaagcctggaaatcatggttgatctacgttgtggtcagacgaacgaagcttcagatgcagacaactgctttggaatttagacagcgtatcatactcagagtctggtggtctacatggagacagcgcctgggccaggtccgagtctccagagctctgcatgcgagtgcgctcaaacatagggcgctttccctccaggtccaggcttggagccaatggagggaacaacttctctacgttcagaaggaaaagcagaaggtcgtgagcgctgtgaaacaccaccagcattggcagaagcgaagattcctcaaagcctggctggaatacttgcaggtccgccgggtcaaaaggcaacagaatgaaatggccgaaaggttccaccacgttactgttctgcagatctacttttgtgattggcagcaggcctgggagcgccgagaatctctgtatgcccaccatgcccaggtcgaaaaactagctcgaaaaatggcacttcggcgcgcctttactcactggaaacactatatgctactgtgtgctgaggaggctgcacagttcgagatggccgaagagcaccacaggcattcccagcttttgctccatcggttctggaatttatggaggtcacagatcgaacagaagaaagaacgggagctgctgcccctcctacacgccgcctgggatcactacagaatcgccctgctctgcaaatgtatcgaactgtggcttcagtacacccaaaagcggcggtacaaacagctgctgcaggcccgcgctgacggacatttccagcagcgtgcactccctgctgcgttccatacatggaatcggctctggcggtggcggcatcaagagaatgtcctgagtgctcgggctactcgatttcaccgggaaactctcgaaaagcaggttttttctctctggcgccaaaagatgttccagcacagggaaaaccgcctagccgagcgaatggcaatcctacacgccgaacgccagcttctgtatcgctcttggtttatgtggcaccaacaagcggccgctcgccaccaggaacaggagtggcagaccgtcgcatgcgcccatcaccggcatggcaggctaaaaaaggcattctgtctgtggagggagtccgcccaaggactgcggacagaacgcacgggtagagtgagggcagcagagtttcacatggctcaactgttgcggtgggcatggagccaatggcgggaatgcctggccctgaggggcgcagagagacagaaattgatgagggccgatttgcaccatcagcattctgttcttcatcgagcactgcaggcctgggtgacataccagggaagggttcgctccattctgagagaggtggcagcacgtgagagccagcataataggcagctgttgcgtggggcactccgcaggtggaaggaaaatacaatggctcgagtagatgaagctaaaaaaacctttcaggcatctacccactacaggcggaccatatgttccaaagtgctcgtccagtggagggaggctgtcagcgtgcaaatgtattacaggcaacaagaggactgcgcaatttgggaggcacagaaggttctggataggggatgcctgcgtacctggttccagagatggtgggactgtagcagacggtccgcccagcagcggctccaacttgaacgggcggttcagcaccaccatcgccagttgctcctagagggccttgcccgctggaagacccaccatctgcagtgtgtgcgtaagcgcctcctccatcgtcaatctacccagctgctagcccagcggctgagtagaacatgttttcgacagtggaggcagcagttagccgctcgccgacaggagcaaagagccactgtgcgtgcactttggttttgggccttctctctacaagcaaaggtatgggctacctggttagcttttgtcttggagcgtcgcagaaagaaagcccggctccaatgggccctccaggcgtatcagggacagttgctgcaagaaggagcaactaggttgctgcgttttgccgccagcatgaaggcctccagacagcagctgcaagcacagcaacaggtccaggcagcccattctctgcaccgcgcagtgcgcagatgcgctacactgtggaaacagaaggtgctgggaaggggaggcaaaccccagccactggctgcaattgctccctccaggaaggttactttcgagggccccctattgaacaggattgccgccggggctggtgacggcactctggagactaaacgtccgcaagccagtagacccctgggggctctgggtagactggctgcggaagagccccacgctcttgaactgaacaccgctcacagcgcaagaaaacagccacgccgtccacacttcctgcttgagcccgctcagagtcagcgtcctcagaaacctcaggaacacgggcttggaatggcccagcctgcggcaccatccctgaccagacccttcttggccgaggctcccacggctctggtcccccattcacctttgcccggagcccttagttccgcccctggcccaaaacagcccccaaccgctagcaccggacctgagcttttacttttgccccttagttcatttatgccctgcggagcggctgcccctgcccgggttagcgcgcagagagcaacaccccgggacaaaccgccggtccccagctctctagccagtgtgcccgatccccacctcttgcttccaggagatttcagtgccactagggccggcccaggactgtcgacagccggcagcctggatctggaagccgagctcgaagaaattcagcaacaactcctacactaccagaccactaaacagaatctgtggtcatgccgacgacaagcctcgagtctgaggcgctggctggaactgaaccgggaggagcccggacccgaggatcaggaggtcgagcagcaagtgcagaaagaactggagcaggtagaaatgcagattcagttgctggctgaagaactgcaggcgcaacgccagcccataggggcatgcgttgctcgcatccaagccttacgacaggctctgtgttag

SEQ ID NO: 134128 - DNA, 378 bp, synthetic construct
  misc_feature 1..378: note = Description of Artificial Sequence: Synthetic coding sequence
  source 1..378: mol_type = other DNA
atggacgctgtggcagtatatcacggaaagatttccagagagactggggagaagctgctactcgccacaggcctggatggctcttaccttttaagagactcagagtccgtccccggggtttactgcctgtgcgtgttgtaccacggctacatttacacctatcgggtgtctcagacagaaacaggaagctggagcgccgagaccgcacccggcgtgcacaagcgatactttcggaagatcaaaaatctgatttcagcctttcaaaagcctgatcaaggaattgttatccccttgcagtatccagtggaaaagaaaagcagcgccaggtccactcaaggcatccgggaagaccccgatgtgtgtctaaaagccccctag

SEQ ID NO: 134129 - DNA, 387 bp, synthetic construct
  misc_feature 1..387: note = Description of Artificial Sequence: Synthetic coding sequence
  source 1..387: mol_type = other DNA
atggatgctgttgccgtctatcacggaaagatatcacgtgagacaggagaaaagttgctactggcaactggcctggatggttcttacctccttcgtgactccgagtccgtgccaggtgtgtattgcctgtgcgtcctttatcacgggtatatctatacgtatagggtgtctcagaccgagaccggatcatggagcgccgagactgcaccaggagtgcacaagcgctactttcggaagatcaagaatctcatctctgcttttcagaagccagaccaggggatagtgattcctcttcagtaccctgttgagaaaaagtcctccgcacgttctacgcaggggaccaccgggattagagaagatcctgatgtatgcctgaaggccccatag

SEQ ID NO: 134130 - DNA, 177 bp, synthetic construct
  misc_feature 1..177: note = Description of Artificial Sequence: Synthetic coding sequence
  source 1..177: mol_type = other DNA
atggacgctgtggcagtttaccacggcaagatcagccgcgaaactggtgaaaaactgctcctggccacaggactggacggctcctatctcctgcgtgacagtgagagcgtccctggggtgtactgcttatgcgtgcttcaccactggggctatatcaaatttatcaataaactgtag

SEQ ID NO: 134131 - DNA, 234 bp, synthetic construct
  misc_feature 1..234: note = Description of Artificial Sequence: Synthetic coding sequence
  source 1..234: mol_type = other DNA
atggatctcccttactatcacgggaggctcacaaaacaggattgcgaaacactcctcttaaaggagggcgtcgacggcaacttcctgcttcgggattccgagagtattcctggcgtcttgtgtctttgtgtcagcttcaaaaacatagtttacacatatcgtatttttagagaaaagcatggctactaccgtatacagaactctaatagcgactacgttgacgttctgccctag

SEQ ID NO: 134132 - DNA, 399 bp, synthetic construct
  misc_feature 1..399: note = Description of Artificial Sequence: Synthetic coding sequence
  source 1..399: mol_type = other DNA
atggacttgccatactaccatggacggctgaccaagcaagattgtgagacactgctgcttaaggagggcgtggacggtaactttcttctgagagactccgaatcaataccaggggtgctttgtctatgcgtcagttttaagaatatagtatacacatacagaatcttcagggagaaacacggatattatcgaattcagactgcagagggatctccaaagcaggtcttcccgtccctgaaagagctgatctccaaatttgagaagcccaaccaaggaatggttgttcacctcctgaaacccatcaagcggaccagtccaagcctaaggtggagaggccttaaattagagttggagaccttcgtgaattcaaacagcgattatgtggacgtgctgccgtag

SEQ ID NO: 134133 - DNA, 2271 bp, synthetic construct
  misc_feature 1..2271: note = Description of Artificial Sequence: Synthetic coding sequence
  source 1..2271: mol_type = other DNA
atgaatggcgctccctcgcccgaagatggcgcatccccaagctcacctccattgccacctcctcccccacctagttggcgcgagttctgcgagagccatgcacgcgctgcagcgcttgactttgctagacggtttagactgtacctagctagccaccctcagtacgccggtcctggcgccgaagcagcattctcccggaggttcgcagagctgtttctgcagcatttcgaggctgaggtggcaagagcaagcggaagtctaagcccccccatactggccccacttagcccgggagccgaaatctcacctcacgatctcagcctggaaagctgccgcgtcgggggcccactggccgtcctcggccctagtcggtcttctgaagatcttgctggacctctaccctcctccgtcagcagttcatctacaacgtcctccaaaccgaagctaaaaaagcggttttctctgaggagcgttgggagaagtgttcggggatctgtacgggggatactccagtggaggggcacggttgacccaccttcatctgccggcccactcgagacttcctcaggacctccagtcctgggaggaaacagtaattctaattcaagtggcggagcagggacagtcgggcgggggctcgtttcggatggaacctcacctggcgagcggtggacacacaggtttgagagattgagattgtcacgcggtggcggcgccttgaaggacggcgcaggcatggtccagcgagaggagctgctgagtttcatgggggccgaagaggccgctccagaccccgctggcgtggggagaggcggcggagtggctggtccaccctctggcggcggcggtcagccccagtggcaaaagtgtcggctattgctcagatccgaaggggagggaggcggcgggagccggctggagttcttcgtgccgccaaaggcttctagacctagactttccattccttgctcttccatcaccgatgttagaacaacaacagctctggagatgccggaccgggaaaacacctttgtcgtaaaagttgagggccccagcgagtacatcatggagacagtcgatgcccagcacgtgaaagcctgggtctccgatatccaggaatgcctctcccctgggccatgtcccgctactagtccccggcccatgacactgcctttggccccaggaactagctttctgacccgtgagaatactgactccttggaacttagttgtttgaaccactccgagtctttgcctagtcaggatttgttgctcggaccatccgagagtaatgatcgcttgtcccagggtgcttatggggggctgtctgatagaccttcagccagcatctctccttcctccgctagcattgccgctagtcacttcgattcaatggaactcctgccccccgagttgccacctaggatcccgatcgaagagggtccaccgaccggtactgtgcacccactcagcgcaccctaccctcctcttgatacaccagagacagcgacaggctcctttctcttccaaggggagccagaggggggggagggagatcaacccctgtctggctacccctggttccacggaatgctgtcaagattaaaggccgcccaacttgtcctgacaggaggaactggatctcacggcgtgttcctcgttcgccagtccgaaacccgccgcggcgaatatgtgctcacgtttaactttcagggcaaagcgaaacatctccgtctcagtctaaatgaagaagggcagtgtcgcgtacagcacctgtggtttcagtccattttcgacatgcttgagcattttcgagtccaccctatcccactggaatcaggtggcagctccgatgtggtactggtgagctatgtgccgagctcacagagacagcaagagccgacaaccagtcatgatcctccccaaccgcctgagcctccctcttggacagaccccccccagcctggagcagaagaggcatcacgcgcccccgaagtggctgcggctgcagctgctgctgcaaaggaacgccaagagaaagaaaaggccggtggaggcggtgtcccagaagagcttgttcccgtggtggagctggtgcctgttgtggaactggaggaggccattgccccagggtcagaagcccaaggggccggcagtgggggcgatgccggcgtgcccccaatggtccaacttcaacaatctcccttaggcggagatggggaggaggggggtcaccctcgtgctatcaataatcagtattcttttgtgtag

SEQ ID NO: 134134 - DNA, 2016 bp, synthetic construct
  misc_feature 1..2016: note = Description of Artificial Sequence: Synthetic coding sequence
  source 1..2016: mol_type = other DNA
atgaacggtgctccatcgcccgaggatggcgccagtccatcatccccccccctcccaccccctcccccacctagttggagagagttctgcgagtcccacgcccgcgcggccgctctagattttgcacgtcgcttccgcctttatctagctagccacccacagtatgccggccctggagctgaggcagctttcagtcgccgctttgcggagttattcctgcagcacttcgaagccgaagttgcacgagcctccgggagtcttagtcctcctattctggctcctctgtccccaggcgccgaaatctcaccacacgacttgtccctggaaagctgtcgagtcggggggcccttggctgtactgggtccgtcaaggagcagtgaagatctggctggccccttaccctcttccgtgagcagttccagcaccacaagtagcaagcctaaactcaaaaagcgtttcagcctacgctcggttgggagatctgtgcgcggcagcgtccgggggatcctccagtggaggggaaccgttgaccctccaagcagcgccggaccactggagacatccagtggccctccagtgctcggaggcaacagcaactccaattccagtggaggagctggcaccgttggacgtgggctcgtgtccgacggtacgtcgccgggcgagagatggacccatcgattcgagcgtctgcgactgagtagaggggggggagctctcaaggatggggctggtatggtgcagagggaggagctgttgtcgtttatgggcgccgaggaggccgcgcccgatcccgccggcgtgggcagaggcggcggcgtggctggaccaccaagcggcggaggcggccagccgcaatggcagaagtgtagactgctgctgcgatcagaaggagaaggaggcggggggagtcggctggagttcttcgtccctcccaaggccagtagacctcgcctctcgataccctgttcatctataactgatgtcagaactacaacagcgctcgagatgcccgaccgcgagaacaccttcgtggtgaaggtggagggaccatctgagtacattatggaaacagtagacgcacagcatgtgaaggcctgggtttccgacatccaagaatgtttatcccctgggccttgtccggctacctcccctcgcccgatgactttgcctttagcacctgggacttcttttctgacccgtgagaacacagattccctcgagttgtcttgcctcaaccatagcgaatctctgccgagccaggacctgttattgggaccatctgaatcgaacgatcgactgagtcaaggtgcgtacggcggattaagcgacaggccttcagcctcaatctctccatcctccgccagtattgctgcctctcattttgattctatggaactccttccccccgagctgccaccccgtattcccattgaagaagggccccctacagggaccgttcatccgttgagcgccccctatccaccactggatacaccggaaaccgccactggatcctttctttttcaaggcgaaccagagggtggagaaggcgatcagcccctatctggctacccatggttccatgggatgctgtcccgactcaaggctgcgcagctcgtcctgactggagggaccggatcccacggcgtgtttttggtacgacaaagtgaaacaaggcgaggcgagtatgtgttaacatttaactttcaggggaaggctaagcatttgcgtcttagcttaaatgaggaagggcaatgccgggtgcagcacctgtggttccagtctatctttgacatgttagaacactttcgagtacatccaattcctctggagtctggaggttcgagcgacgtcgtgcttgtctcatacgtcccctcgagccagcggcagcagggcagagagcaggctggctctcatgcaggggtttgcgaaggtgacggctgtcatccagacgcctcctgtacgttgatgccttttggcgcgtccgactgtgtgaccgatcacctgccctag

SEQ ID NO: 134135 - DNA, 2052 bp, synthetic construct
  misc_feature 1..2052: note = Description of Artificial Sequence: Synthetic coding sequence
  source 1..2052: mol_type = other DNA
atgaacggggccccaagccctgaagacggcgccagccccagcagtccacccttaccaccccctcctccacctagctggagagaattttgtgaatcacatgccagagcagcagcactggactttgctcggagatttcgcctgtatctcgcctcacacccacagtacgctggcccgggcgctgaagcggctttttcacggcgttttgcagagctatttctccagcacttcgaagctgaggtggcccgagcttctggatctctgagccccccgatactggctccactgtcccccggggcggaaatctccccccacgacttaagtctggaaagctgtcgcgtcggtggtcccctagcggtgcttgggccttccaggagtagtgaagaccttgccgggcccctgccatcaagcgtgtcgagcagtagcacgacaagctcaaagcccaaactgaaaaaaagatttagcttgcgttctgtcggacggtcggtgcgcggttccgtgagggggatcctccaatggagaggtactgtcgatcccccatcttcagcagggccacttgaaacctcatcgggcccacccgtgcttgggggaaattcaaatagcaattccagcggaggcgccgggaccgtgggcagggggctggtttctgatggtacttctcccggagagaggtggacacaccggttcgaacgcctgagattatccaggggggggggtgcgctgaaggacggggccgggatggtacaaagagaggagctcctgtcatttatgggggctgaggaggcagcccccgatcccgcaggggtgggtcgggggggcggcgtagctggcccaccatcaggtggcggcggacaacctcaatggcagaagtgccgactgctacttagatccgaaggcgagggtggtggaggctcacgcctcgagttcttcgtgccaccgaaagctagtcgtcccagactcagtattccatgttcaagcatcaccgacgtgcgaactacgaccgccctggagatgccagatagagaaaacactttcgtggtcaaagtcgaagggcccagcgagtatatcatggagacagttgatgctcagcacgtcaaggcttgggtttccgacatccaggaatgtctttcccctggcccttgcccagcaactagtccaagacccatgaccctgccattagctcccggaacgtccttcctgactagggagaatacagattcactggagctgtcgtgtctaaaccatagcgagagcctgccttctcaagaccttctactcggacctagcgagagcaacgatcgattatcccaaggagcctacgggggcctatctgaccgcccatccgcaagcatttccccatcctccgcatccattgccgcaagccacttcgattccatggagctactcccccccgaacttcctcccaggataccgatcgaggaggggccccctactgggaccgtgcaccccctctctgcaccttatccaccccttgacacacctgagactgctaccgggtctttcctttttcagggggagccagagggaggtgagggggatcagcctctgagtggatacccttggtttcacggcatgctatctcgattgaaggctgcacagctggtcctgacaggtgggaccggctcccatggcgtgttccttgtgagacagtccgaaacacggagaggagaatacgtattaacgtttaatttccagggaaaggcaaagcatttacgactgtcactgaacgaggagggtcagtgccgagtgcaacacctgtggtttcagagcatatttgatatgctggagcactttcgagtacatcccatcccccttgagagcggcggatccagcgatgtcgtgttggtatcttatgtaccgtcttctcagcggcagcagggcgaacagtctcggtccgctggggaggaggtccctgtgcatccaaggtccgaagcaggtagtcgattgggagccatgcgcggctgcgccagagagatggacgcaacccccatgcctccagccccaagttgtcctagcgaaagagtgaccgtgtag

SEQ ID NO: 134136 - DNA, 2016 bp, synthetic construct
  misc_feature 1..2016: note = Description of Artificial Sequence: Synthetic coding sequence
  source 1..2016: mol_type = other DNA
atgaacggagcacctagcccagaagatggcgcttccccgtccagcccccctttgcctccccccccccccccatcctggagagagttctgcgagtctcatgcaagagcagcagctctcgactttgcaaggcggttccgattgtacctggcttcacacccccagtacgccgggcccggagcagaagccgctttctcccgacggttcgcagagttgtttctgcagcactttgaagcagaagtggctagggcttccgggtctctctctccacctatcctggccccattgagcccgggggctgaaatctctccccacgatttatctcttgaatcctgccgagtggggggccccctggctgtgctgggtcccagtaggtcgtccgaagatctggccggtcccctgcctagttctgtgtcttctagctccacaactagtagtaagcccaaactcaaaaagagattcagtctccgtagcgttggacgctctgtgcgcggctctgtccgggggattttgcagtggagaggtaccgtggatccgccgtccagtgccggcccccttgagacctcaagcggtcccccagtccttggcggaaacagcaactctaatagctctgggggagccggcaccgtgggcagggggctcgtgagcgacggaacatcccccggggagcggtggacgcatcggttcgagagattgcgcttgtcccggggcgggggggcacttaaggacggtgccggcatggtgcaaagggaagaactgctgagtttcatgggagcagaggaggccgctcccgatcccgccggagtgggccggggcggtggcgttgccggaccacctagcggcggcggtgggcagccgcagtggcaaaagtgcaggcttttgcttaggagtgagggcgaaggtgggggaggatccagactggagttttttgtgcccccgaaagctagcagaccgagattatctattccttgtagctctattacagatgttcgaactactacagcactcgaaatgccagacagggaaaatactttcgtggtgaaggttgaaggaccttcagagtatatcatggagactgtggatgcccagcatgtaaaggcctgggtaagtgatattcaggaatgtctttcccccggaccttgcccagccaccagcccacggccaatgacactgccacttgctccaggcacctcctttctcactcgggaaaataccgatagcctggagctatcttgtctgaatcattctgaaagcctccccagccaagacctgctgttgggaccgagcgaatccaacgaccggctgtctcagggggcatacggaggattatccgatcgcccctccgctagcatttccccatctagtgcgagcatcgcagctagtcattttgatagcatggagctgctgcctcctgagctgcctccgagaatcccaattgaggaaggaccacccaccggaaccgtgcacccacttagtgccccctatcctccactggacactccggagacggctactggcagctttctgtttcagggagagcccgaaggcggtgagggggatcaaccgctctccggctacccgtggtttcacgggatgttgtcaaggctgaaggcagcacagttagtcttgactgggggaaccggaagtcacggcgtgttcttggttaggcagtccgaaaccagacgtggggagtacgttctcacctttaacttccagggcaaggccaagcatctgcgactctccctgaacgaggaggggcagtgtcgagtgcaacatctgtggtttcagtctatctttgacatgcttgaacatttccgagtgcatcccatacccctagagagtggggggtctagtgacgtggtgttggtatcatatgttccgagcagccagcgccagcaggggagagaacaggcggggtcccatgcaggggtgtgcgaaggggatgggtgccacccggatgcaagctgtactctcatgccttttggggcttcagattgcgtgacagatcatcttccatag

SEQ ID NO: 134137 - DNA, 1008 bp, synthetic construct
  misc_feature 1..1008: note = Description of Artificial Sequence: Synthetic coding sequence
  source 1..1008: mol_type = other DNA
atgcccgaccgcgaaaacacgttcgtggtgaaggtcgagggcccatcagaatatattatggagactgtggatgcccagcacgtcaaggcgtgggttagcgatatacaggaatgcctgtctcctggaccctgtcccgccactagcccgaggccaatgactctgcctctggctccagggacttctttcctgactagggaaaatactgactccttggagctgtcatgtcttaatcatagcgagagcctaccatctcaggatctcctgttgggaccaagcgagtctaacgataggttgagccagggggcgtacgggggcctctccgaccgtcctagcgcgagcattagtccttcttctgcttccattgcggcatcccacttcgactctatggagctactccctcctgagctccctccgagaattcctatcgaggaaggccccccgactggcaccgtacatcctctaagtgctccctatccaccacttgacactcccgagactgctacaggctcttttctctttcagggggaacccgaggggggggaaggggaccagcctctgtccggttacccatggttccacgggatgctaagtcgactgaaggcagcacaattggtgttaaccggaggtactggcagtcacggggtctttctcgtgagacagagcgagactagacgtggagaatacgtcctcacattcaactttcaggggaaggccaagcacctgcggctcagtcttaacgaggagggccagtgccgggtgcagcacttgtggttccagagtattttcgacatgctcgaacatttccgggttcatcccatacctctcgagagtggaggaagctctgatgtggtgctggttagctacgtgccttcaagccaaaggcagcagggccgtgaacaggctggctcacacgccggggtttgcgagggcgacgggtgccacccagatgcttcctgcactctcatgcctttcggggcaagcgactgtgtcacagaccatctgccgtag

SEQ ID NO: 134138 - DNA, 1122 bp, synthetic construct
  misc_feature 1..1122: note = Description of Artificial Sequence: Synthetic coding sequence
  source 1..1122: mol_type = other DNA
atggccgaagcttccagaccacggctctccatcccctgcagttcaatcactgatgtcaggacaacaacggctctcgagatgcctgatcgggagaacacttttgtggtgaaggtcgagggcccatcggaatacatcatggaaaccgtagacgcccagcacgtcaaggcttgggtaagcgatattcaggaatgcctgtctcccggtccgtgccccgcaacttctcctcgccctatgaccctgccactggctcccgggactagcttcctgaccagggagaataccgactccctagaactgagttgcttaaatcactcagaatctctgccttcacaagatctccttctcgggccaagcgagagtaatgacaggttatctcagggtgcttacggcgggctgagcgataggccttccgcctcgatttctccctcctccgcaagtatcgccgccagccacttcgacagtatggagttgctccctcccgagctgccaccacgcattcctatcgaagagggcccgcctacgggcactgtgcatcccttgagtgccccttaccctcctttggatactccagaaaccgcaactggaagtttcctcttccaaggtgagcctgaaggaggggagggggatcagcccctgtctggttacccctggtttcatgggatgctgtcacggctgaaggcagcgcagctggtgcttacgggagggactgggtcccacggggtcttcctggtccgacagtccgaaaccagacggggggagtacgtcctgacctttaacttccagggcaaggccaagcacctgcgactgtctctgaatgaagaggggcagtgtcgcgtgcagcacctctggtttcagtccatctttgatatgttggagcatttccgtgtccatcccatccccctagagtcgggtggcagcagcgacgtggtcctcgttagctacgtcccatcctcccagagacagcagggtgaacagagcaggagcgcaggggaggaagtcccagtccaccctcgttctgaggcaggtagcaggctgggagcaatgcgaggttgcgctcgtgaaatggacgcaacgccaatgcctcctgctccttcctgtccctcagagcgtgtgaccgtgtag

SEQ ID NO: 134139 - DNA, 1728 bp, synthetic construct
  misc_feature 1..1728: note = Description of Artificial Sequence: Synthetic coding sequence
  source 1..1728: mol_type = other DNA
atgaacgggccagctctgcagccgagctccccctcctccgccccaagcgccagtcctgctgccgcccccaggggatggagtgagttctgtgagctgcacgcagtcgccgctgcccgcgagcttgcccgacagtattggttgttcgccagggaacatccccagcatgcccccctgcgtgcagagttggtgtctttgcagttcacagacctatttcagcggtacttctgcagggaggtgagagatgggcgtgcaccaggccgcgactacagggacacaggaaggggccctccagctaaagccgaagcgagtccagaaccaggaccagggccggccgcccctgggttaccaaaggcacgcagcagcgaggaactggccccgccccgcccccccggcccgtgcagctttcagcacttccgacgatctcttagacacatctttagacggcgctctgcaggagaactccccgctgcacacacagccgctgccccgggaactccgggtgaggccgcggaaacaccagcacgcccggggttggccaaaaagtttctgccgtggtccctcgcccgggagcccccacccgaggccctgaaagaggctgtcttgcggtatagcctcgctgacgaagctagtatggattcaggggctcgttggcagcgcggccgactcgccctccgcagagcacccgggccggacggtcctgaccgagtcctggaactattcgacccccctaagtcatcgagacctaagctgcaggcggcctgtagctccattcaggaggtgcggtggtgcacgcggttggaaatgcccgataacctctatacattcgtgctgaaggttaaagacagaacggacatcatatttgaggtgggcgatgaacaacaattgaacagctggatggccgagttgagcgaatgtacagggaggggcctcgaaagcaccgaggctgagatgcatatcccatcagccctggaacccagtacatccagctcccccagaggcagtaccgactctctgaatcaaggagcaagtccaggtggacttctcgatcccgcatgccagaagaccgaccacttcctgtcctgctatccttggtttcatgggccaatttcacgtgtcaaggctgcccagctggttcagctgcaaggcccagatgcccacggagtgttcctggtccgacagtcagaaactagacgtggtgaatacgtgctcactttcaattttcagggtattgctaagcatctcaggttgagccttactgaacgtggtcagtgcagggtgcagcacctacactttccaagtgtcgtcgatatgctgcaccacttccagcgctcacccatacccttggaatgtggggcagcctgtgacgtgcggctatcgtcttatgtggtagtcgtgtctcaaccacccggctcctgcaatacagtgctgtttccgttctctctcccccattgggatagtgagtctttgccccattgggggtcagaattgggcctcccgcacttgtccagtagcggttgcccccggggactgtcacccgaggggctgccagggcggtcttcaccacccgagcagatcttccatctagtcccgtcacccgaagaactggccaacagtctacagcacctggaacatgagcctgtcaatcgggctagagactccgattacgagatggattcttcttctaggtcacatcttcgggccattgataatcagtatactcctctttag

SEQ ID NO: 134140 - DNA, 1122 bp, synthetic construct
  misc_feature 1..1122: note = Description of Artificial Sequence: Synthetic coding sequence
  source 1..1122: mol_type = other DNA
atggggtttccagtgctgtgtcgcggatggcggcgcacctggccaggttgcgccagctggctcggcgctcccccgccacagaagcctcttctaagtcccctgctgttgaaccatcggagttccaaatctagtcggcctaaattgcaggcggcatgcagttctatccaagaggtcaggtggtgcacacggctcgaaatgcctgataatctctacacctttgtcctgaaagtgaaagacagaaccgatattatatttgaggtcggggacgagcaacagttgaatagttggatggccgaattgtctgagtgcaccggcagggggctcgagagcacggaggccgaaatgcatattccctcggctctggaacctagtaccagtagtagcccacggggctcaactgatagcctgaaccagggggcctctcccgggggtcttctggaccctgcctgtcagaagactgatcatttcctgtcctgctacccctggtttcacggccctattagtagagtgaaggccgctcagctggtgcagttacagggccctgacgcccacggcgtatttctggtacggcagagcgagaccagacgtggcgagtatgtccttacattcaacttccagggcatcgcaaaacacctgcggctgtcactaacagaaagggggcagtgcagagtacaacatcttcattttccttccgtagtagatatgctacaccacttccaaagatccccaataccactggagtgcggcgccgcctgcgatgtccgtctgtccagctacgtagtcgtggtgtctcagccccccggtagctgcaatactgtgttattccccttctcacttccccactgggactcagagagtcttccacattggggaagtgagctcggcctgccccacctgtcatcatccggctgtcctcgcggacttagtcctgaaggattgccggggcgttcatcccccccagagcaaatttttcacctggtgccgagcccagaggagctagcaaattctcttcagcacttggaacacgaaccggtaaatagggctcgggacagtgactacgaaatggactctagctcccgctcccacctccgagctatcgataaccaatatacccccctgtag

SEQ ID NO: 134141 - DNA, 1209 bp, synthetic construct
  misc_feature 1..1209: note = Description of Artificial Sequence: Synthetic coding sequence
  source 1..1209: mol_type = other DNA
atgattccacccagttctcctcgcgaagatggcgtggacggattaccaaaggaggccgtgggagccgagcagcccccatccccggctagcacatcaagtcaggagtccaagttacagaaattaaagcgctccctgagctttaagaccaagagcctgagatcgaagtccgccgataacttctttcaacgcactaactctgaggacatgaagttgcaggcacatatggtggccgaaattagcccctccagctcacctctacccgctccggggtccctgaccagcactcctgcaagagctggcctgcatccaggcgggaaagcacacgctttccaggagtatatattcaagaagcctactttctgcgatgtctgtaaccatatgatcgtagggaccaatgccaaacacgggctgagatgtaaggcttgtaaaatgtccatccatcataagtgcactgacgggctggctccccagagatgcatgggtaaattgcctaaaggctttcggcgctactattcttcacctctgctgatccacgaacagttcggctgcataaaggaagtgatgcccattgcttgtggcaacaaggttgacccagtttatgagaccctgagatttgggacaagtctagctcagaggacaaaaaaaggctcctcaggttccgggtctgactccccccatcggaccagtactagtgatctggttgaagtgcccgaggaggctaacggacctggcggtggctacgacttacgtaagcgcagtaacagcgtctttacctatccagagaacgggacggatgatttccgggaccccgccaagaatattaatcaccagggctccctctctaaggaccccctgcagatgaacacttacgtggcactctacaagtttgtgcctcaggaaaatgaggacttggaaatgcgaccaggggacatcatcaccttactggaagactcgaacgaagattggtggaaaggcaaaatccaggaccgaattgggtttttccccgcaaacttcgtacagagactgcagcaaaatgaaaaaatatttagatgtgtcaggactttcattggctgtaaagagcagggccagatcactctaaaagagaatcaaatttgtgtttcttcagaagaggaacaggacggtttcatcagggtcctgagcggcaaaaagaaaggccttattccccttgacgtgttggagaacatctag

SEQ ID NO: 134142 - DNA, 1005 bp, synthetic construct
  misc_feature 1..1005: note = Description of Artificial Sequence: Synthetic coding sequence
  source 1..1005: mol_type = other DNA
atgaaacttcaggcacacatggtcgcggaaattagcccatcaagttccccacttcccgctccaggctctctgacaagcaccccggcccgggcgggactgcaccctggcgggaaggcccacgcctttcaggaatatatatttaaaaaacctactttttgtgatgtttgtaaccatatgattgtaggaactaacgccaagcatggcctccgatgcaaggcgtgcaagatgtccatccatcacaaatgcacggatggactagcccctcagagatgtatgggaaagctaccaaaagggtttcggaggtattatagtagccccttattaatccatgagcagtttggatgtattaaggaggtgatgcccatagcatgcgggaacaaagtcgatcccgtgtatgaaacactccgcttcgggacgtcgctcgcacagcgtactaagaagggaagttcaggtagtggctcggattcaccccatcgcacttccacaagtgacctagttgaagtgcccgaagaggcaaatggacccggtggggggtacgacctccgaaaacggtccaactctgtatttacctatccagagaacgggactgatgactttagggacccagccaaaaatataaatcaccagggttcgctgtccaaagaccctcttcaaatgaatacctacgtggccttatacaagttcgtcccgcaggagaatgaggacctggagatgcggccaggggacatcattacgctgctcgaggattctaacgaagattggtggaagggaaaaattcaggatcggataggcttctttcccgccaattttgtacagagattgcagcaaaatgagaagatttttcgctgcgtcagaaccttcattgggtgtaaggagcagggccagatcactttaaaggagaatcagatctgtgtgagttcagaagaggagcaagacgggttcatcagagttttgagcggaaagaagaaagggttgatccctctcgacgtgcttgagaatatttag

SEQ ID NO: 134143 - DNA, 4422 bp, synthetic construct
  misc_feature 1..4422: note = Description of Artificial Sequence: Synthetic coding sequence
  source 1..4422: mol_type = other DNA
gtagctattatcgcagggaatttcgaactggccgagtatataaaaaatcataaggaaactgacatagtgccatttagagaagcccccgcgtattccaataggcggagacgccccccgaacacccttgccgcaccacgcgtgctgttgcggtccaattcggacaataacctcaacgccagtgccccagactgggccgtttgctccaccgccacttcccatcgctccctgagcccccagctcctgcagcagatgcctagtaaaccggaaggcgccgccaagaccataggctcatatgtcccggggccccgctccagatcacctagcttaaaccggttgggtggagccggagaggatgggaaacggccccagcccctgtggcatgtcggctcaccatttgccctgggcgctaacaaggacagtctctctgccttcgagtatcccggtcctaagcgcaagctgtattccgcggtgcccggcaggctattcgtggcagttaagccatatcagcctcaagttgatggcgaaattcccctgcaccgtggcgatagagtgaaagtgctgagtatcggggaaggcgggttctgggagggatcagcccgcggacacattggctggttcccagcagagtgcgtcgaggaagtacagtgtaaacctcgcgattcccaggccgaaaccagagccgaccgtagcaaaaagcttttccggcactacacagtgggcagttatgacagttttgacacttctagtgattgcataattgaggagaagactgtggtactgcagaagaaggacaatgaagggttcggctttgtcttgcgtggggccaaagctgatactccaattgaagagtttactcccacccccgccttccccgccctgcagtatctagaatctgtcgatgaggggggagtagcctggcaggctgggttgcgcactggcgactttctcattgaagtgaataacgaaaacgttgtaaaggtagggcacagacaggtggtgaatatgatccggcagggcggcaatcatcttgtgcttaaggttgtgactgttacccggaatctcgacccagatgatactgccaggaaaaaagccccgcccccgcccaagcgcgccccgaccactgcattgacattaaggtcaaaatccatgacatccgagttggaggagctggttgacaaggacaagcccgaggagatcgtccccgcctcgaagccctcgagggcagcggagaatatggccgtggagccccgggtagctacaatcaagcagaggccctccagccggtgcttccctgccggaagtgacatgaactcggtatacgaaagacaagggatagcggtcatgacaccaacagtccctggcagcccaaaagcaccttttctgggcataccccgcgggaccatgcggcggcaaaaatctatcgactcccggattttcctgtcaggaatcacagaagaagagcggcagttcctggcgcctccaatgcttaaatttacgagatcattatctatgcccgacacgagtgaggacatcccacccccaccacagtcagtgccgccctccccccctcccccgtcccctaccacgtacaattgccccaagtccccgactccccgagtttacgggactataaagccagcgtttaatcagaactcagccgcaaaggttagtcctgcaactcggagtgatacagtagctaccatgatgcgggagaaaggcatgtactttcgcagggaactggaccgctatagcctcgatagtgaggatctgtattctaggaacgccggcccacaggcaaattttcggaataagcggggacagatgcctgagaatccttatagtgaggtgggcaagatcgcgtcaaaagcagtatatgtgccagccaaaccagccaggaggaaaggaatgctggtgaagcagtccaatgtagaggactcccctgagaaaacttgctctataccaataccaacaatcatagtgaaagagcctagcactagctcatcaggcaaatcttcccagggcagctcaatggagattgaccctcaggctcccgaacctccttcgcagcttcgtcctgatgaaagcctgacagtgagttctccttttgccgcagctatcgccggtgccgtccgcgatcgagaaaagaggctggaggcccgtcgcaatagtccagctttcctgagcactgatcttggagacgaggatgtggggctgggtcctcccgctccacgcacaaggccatcaatgttccctgaggaaggtgactttgccgacgaggatagcgccgagcaactgagctcaccaatgccatctgctacaccccgagaaccggaaaaccatttcgtcgggggcgccgaggctagcgctccgggagaagccggaagacccttgaattccacaagcaaagcgcagggccctgagagctcgcctgccgttcccagcgccagctctggcactgccgggccaggaaactatgtgcacccgctgaccggacgcctgctggacccctcttctcccctggcactggctctgagcgccagggatagagccatgaaagaatcacagcagggccccaagggtgaagcgcctaaggccgaccttaataaacctctttacattgacacgaagatgcgccccagcctggatgccgggttcccaacggtgactagacagaatactagaggaccattgcggaggcaggagacagaaaataaatatgagaccgaccttggccgcgatcgtaagggagacgacaagaaaaatatgctgattgacattatggatacttcccagcaaaagtccgctgggttactgatggtgcatacagtggatgctaccaaactcgataacgctctacaggaggaggacgagaaggcagaggttgaaatgaagcccgactccagcccatctgaggtaccagagggcgtctccgagaccgagggcgcactgcaaatttctgctgctccagaaccaaccacagttcctggccgcaccatcgtggcagtgggctcaatggaggaggccgttatcctgccatttaggatccccccacctcccctggcttctgtggacctggatgaggacttcatcttcaccgagcctctgccacctccgctggagttcgccaactcgtttgatattcctgacgacagggctgcaagcgtacctgctctgtccgacctggtcaaacagaagaaatccgacacacctcagtcgccatcacttaactcaagccaaccaacgaatagcgcagactctaagaaacccgcgagtctgagtaactgtttaccagccagttttttacctcctcctgaaagcttcgatgccgttgcagactccggcattgaagaagtggactccaggagctccagtgaccatcacttggaaaccacctctaccatttccacagtctcaagcatcagcaccctgtcctccgaaggaggcgagaatgtggacacttgtactgtgtatgcagacggacaggcatttatggttgataaaccccccgtccctcccaagcctaagatgaaacctatcatccataaatcaaatgctctctaccaggatgcgctggttgaagaagatgtcgattcgttcgttattccccctcctgctcctccacccccacctggtagcgcccagcccggcatggctaaggtcctgcagcctagaacatccaaactctggggagacgtaacagaaataaagtcaccgatactgtccgggcctaaagcgaatgtgatctctgagctgaacagtatccttcagcagatgaaccgagaaaaattggccaagcccggagaaggcttagactctcccatgggggcaaaaagtgctagccttgctcctcgctcccccgagattatgtccaccatcagcggcacaagatctaccaccgttaccttcactgtaaggcccgggaccagtcaaccgattaccctgcagtctaggcctcctgactatgagagtcgcacaagcggaaccaggagggctcctagccctgtggtgagccctacagagatgaataaagaaaccttgcctgccccactaagcgccgccactgccagtccaagtcccgccctcagcgacgtgtttagccttccttcccagccaccatctggcgatctgtttggattgaacccggcggggcgttccaggagcccatccccctccattctgcagcaacctatcagtaacaagcctttcacgaccaagccggtgcatctgtggaccaaacccgatgttgctgactggctggagagtcttaacctgggagagcacaaagaagccttcatggacaacgagatcgacgggagccacctgcccaatctgcagaaagaagacttgattgatttaggcgtgacccgggtcggacaccgaatgaacatcgaaagggccttgaaacagctccttgatagatag

SEQ ID NO: 134144 - DNA, 5553 bp, synthetic construct
  misc_feature 1..5553: note = Description of Artificial Sequence: Synthetic coding sequence
  source 1..5553: mol_type = other DNA
atgccccgctcccccacatccagcgaagacgaaatggcccaaagctttagcgactatagcgttggctcggaaagtgattcatcaaaagaggaaaccatatacgataccatcagagctaccgctgagaagccaggcggcgccaggaccgaggaatcccagggaaacacactcgttataagagtcgtaatccacgacctgcagcagaccaagtgcatcagattcaaccctgacgctaccgtgtgggtggcaaagcagcgaatcctgtgcacattgactcaatctctgaaagacgtactcaactacggtctgtttcagcccgcaagcaacggcagagatgggaaatttctggacgaagagagactcctgagggagtatccacagcccgttggtgagggtgttccttccctggagtttcggtacaaaaagagagtttacaagcaggcttccctggatgaaaagcagttggccaagctgcacacaaagactaatttaaagaagtgcatggatcatattcagcataggctcgtagagaaaattactaagatgctggatagagggctcgatccgaacttccacgaccctgaaacaggagaaactccactgactctggcggctcagctcgatgactcagtggaagtgatcaaagcattaaagaatgggggggcgcaccttgactttagagccaaggatgggatgacagctcttcataaagccgctcgggcgcgcaaccaggttgccctgaaaacactcctggagctgggcgcgtcacctgactacaaagatagctacggcctcacccctttgtatcacaccgcaatcgtcggcggcgacccatactgctgtgaactgctccttcacgaacacgccacagtgtgctgcaaagatgagaacggctggcatgagatccatcagtcgcgatgctggggacatatatctgagcctcaccacaccctcctgagcggatcagcccgtagccagcagtctcgttccgcatcatctgccctccatgtctgtgccatgtactcttctttctcttgtgtgagaatctccctactgtttcacgggaggattacagaacttaagcagtacaagaagtctacgccgtttcaggtcgctatcatagccggtaatttcgagttagcagaatacatcaaaaatcacaaggaaactgacattgtgccctttcgcgaggcaccagcctactctaaccggcgcagaagaccacccaatactctcgccgcccccagggtactccttagaagcaactccgataataatctaaacgcgagcgctcccgactgggctgtgtgtagtaccgcgacatcccacaggtctcttagcccccagctgctgcagcagatgccaagcaaacctgagggagctgctaagaccatcgggtcttacgtgccgggacccagatctcgtagccctagcctgaacagactaggaggcgccggggaggacggtaagagacctcagcccttgtggcatgtgggatcccctttcgccttaggcgcaaacaaagactcactaagcgcattcgagtaccccggcccaaaaagaaaactctattcagcagtgccaggccgtctctttgtggccgtcaagccttatcagccccaggtggacggtgaaattcccttacacaggggggatcgggttaaggttctgagcatcggagagggggggttttgggaagggtccgcaaggggacatattggctggtttccagctgaatgtgtcgaagaggtgcaatgtaaaccgagggacagccaagccgaaactagagccgaccggagtaagaaactttttaggcactatactgtgggcagttacgattcattcgatacaagctctgattgtatcattgaagagaagactgtcgttctgcaaaagaaggacaacgagggattcggattcgtgttaaggggggcaaaggccgacacccctattgaggaatttacacccacccccgccttccctgccctgcaatatctggagtcggtggacgagggaggagtcgcttggcaagcgggcttacgtaccggagattttctgattgaggtcaataatgagaatgttgttaaagtgggacaccgacaagtggtgaatatgatccgccaggggggaaaccatctggtactcaaggttgtaaccgtgactaggaacctcgatccggacgataccgcgcgcaagaaggcaccccctccccctaagcgggcacctacaacggccctcacattacggtccaagtccatgacatctgaacttgaagaacttgttgataaaggtgtgatccggaaagtgtcagataagcctgaggaaatcgtgccagcttcgaagccgtcacgtgcagctgagaacatggcagtagagcctcgagtcgctactattaagcagagaccatccagccgatgcttcccggctggttctgatatgaattctgtttatgaaaggcagggaattgcagtcatgacaccaacagtacctgggagtcccaaggccccttttctgggaatccccaggggcacaatgaggcggcagaaatctattgactcccgtatttttctgtctggcatcacagaggaagagagacagtttcttgctccacccatgctgaaatttacccgcagcctgtcaatgcctgacacgtcagaagacatcccccccccgcctcaatcagtccctccatctccacctccaccttcacccaccacctataactgtccaaagtccccgactcctcgggtttatggcaccatcaaacccgcctttaaccaaaatagtgcagctaaagtatcccccgcgaccagatccgatactgtggcaacaatgatgagagaaaaggggatgtactttaggcgagagctggatcgttattctttagattccgaggatttgtactccagaaacgctggccctcaagccaactttagaaacaaacgcgggcaaatgccggaaaatccatattccgaagtgggaaagatcgcgtctaaagcggtctacgtcccggcaaagccagcccgcaggaagggaatgttggtgaaacagtcgaatgtggaagactctcccgagaagacttgtagtatcccaatcccaacaattatagttaaagagccgtccacatctagctctgggaagtctagccagggatcatcaatggagatcgaccctcaggctcccgagcctccctctcagttgcgaccagacgaatcactgacagtctctagccctttcgctgcagcgattgctggcgcagtgagagaccgggagaagaggttggaggctcgaaggaactccccagcattcctcagcactgatctaggcgatgaagatgtcggcctcggtcctccagccccacgcacgcgtcccagcatgtttcccgaagaaggcgacttcgcggatgaggatagtgccgaacaactgtcctcccctatgccttccgccacaccccgggaaccagaaaatcactttgtcgggggggcagaagcatctgccccaggtgaagctggccggcccctaaattctacgagcaaagcgcagggcccagaatcctcacctgctgtgccctccgctagctccggaaccgcaggccccggcaattacgttcatcccctgactggccgactcctggaccctagctccccactggctttagctctgagcgcccgcgacagggctatgaaagaaagtcagcagggaccaaagggagaggcccccaaagcagatcttaacaaaccgctttacattgacactaagatgagaccttcattggatgcagggttccctaccgtgactagacaaaacacaaggggacctttaagacgccaggagacggagaacaagtatgagacagaccttggcagagataggaaaggggacgataagaaaaacatgctcatagacattatggatacgtcccagcagaagagcgctggactgctgatggtccacaccgttgatgcaacaaaactggataacgccttacaggaggaggatgagaaggctgaggtcgagatgaaacccgatagttccccgagcgaggtgcctgagggcgtgagtgaaactgagggagccctccagatcagtgctgccccagagcctacaaccgttcctgggcgaaccatcgtagcagtgggcagcatggaggaggcagtcatactaccttttcgcattcccccaccccccctagcgtccgtcgatctcgacgaggacttcatttttacagagccattgcccccccccctagaattcgccaatagtttcgacattccagatgacagagccgcgagcgtccctgccttgagcgacctcgtgaagcagaaaaagagcgatacaccacaaagtccatcccttaattcttcccaaccaactaatagtgcagactccaagaagcccgcaagcctgtccaactgcctgcctgcctctttcctgcccccacctgagagctttgatgccgttgccgatagcggtatcgaggaggtggattctcgctcgtcctccgaccaccacctggagaccacctcgaccatctccacagtaagttcaattagcaccttgagtagcgagggcggggaaaatgtagacacttgtacggtgtacgccgacggccaagcctttatggtcgacaaaccacccgtaccccctaaaccaaaaatgaagcctattattcacaagagcaacgcactttatcaggacgcactggtagaagaggatgtggactcctttgtgataccccctcccgctcctccccccccacctggttcggctcagcccggaatggcaaaggttctgcaacctagaacatcaaaactgtggggggacgtaactgaaatcaagtctcctatcttgtcaggccccaaggccaacgtaataagtgaactcaactccattctacagcagatgaaccgggagaagctggctaaaccgggggaaggccttgattcaccaatgggagccaaaagcgcatctcttgcgcctaggagtcctgagatcatgtctaccatctctgggacccgcagcaccacagtaaccttcaccgtgcggccaggtacgtcccagccaatcactctgcagagtaggccccctgactatgagtctcggactagtggcacaaggcgcgcccctagtcccgtggttagcccaaccgagatgaataaagagaccttgcccgcgccactgtcagctgccactgcctcacctagccctgctctatctgacgtattttcgttgccaagccagccaccttctggagatctgttcggactgaatccggctggcagaagcaggagtccgtcacctagcattctccaacaacccatcagtaacaagccatttaccacaaagcccgtgcatctgtggaccaaacccgatgtggccgattggctcgagtcattgaacctcggggagcataaggaggccttcatggataacgagattgacgggagtcacctgccaaacctgcaaaaggaggatttaattgaccttggcgtcacgagagtcggccaccggatgaatattgaaagagcacttaagcaacttcttgaccgatag

SEQ ID NO: 134145 - DNA, 846 bp, synthetic construct
  misc_feature 1..846: note = Description of Artificial Sequence: Synthetic coding sequence
  source 1..846: mol_type = other DNA
atgatgatgaacgttcccgggggcggagctgctgctgttatgatgaccggctacaacaacggtaggtgtccgcggaactccctgtattcagattgtatcattgaggagaaaacagtcgtgctgcagaagaaggataacgaaggattcggatttgtcttaagaggagccaaagccgacacaccaatcgaagagttcactccaaccccagcatttcccgctctccagtatctggagtcagtcgatgagggcggtgtcgcttggcaggccggacttcgcacgggtgactttcttattgaagtaaacaacgagaacgttgtgaaagtgggacaccggcaggtcgtgaatatgataaggcaaggtggcaaccatttggtgttgaaagttgtaaccgtgacgaggaatctcgatcctgatgatacagcacgaaagaaggccccgccgcctcctaagcgcgctcccacaacagcactgacattaagaagcaaatcgatgacaagtgagctggaggagctggtggataaaggggtcattaggaaaggcaaggacaagcccgaagaaattgtgccggcctctaagccatctcgggccgctgagaatatggcagtagaaccccgcgttgccacgataaaacagaggcccagctcccgatgctttcccgccgggtcagacatgaattctgtgtacgagcgacagggaatagcggtcatgacgcctacagtacccggctcgcctaaggcacctttcctgggaatcccccgaggtacaatgaggagacagaagtcaattggcaagaagtgcgggacgccgccccagaagctgcctctggggttccagacccagccctag

SEQ ID NO: 134146 - DNA, 3762 bp, synthetic construct
  misc_feature 1..3762: note = Description of Artificial Sequence: Synthetic coding sequence
  source 1..3762: mol_type = other DNA
atgatgaatgtacctggtgggggcgccgctgccgtcatgatgactggatacaacaacggcaggtgtccacggaattccctgtactcagactgcatcatcgaagagaagaccgtggtgcttcagaagaaggataacgaaggcttcggcttcgttctgaggggggccaaagccgatactccgatcgaagagtttaccccaactcccgccttccccgcactacagtatctggagtctgtggatgaaggaggcgtggcatggcaggctgggctgcgcaccggcgatttcctgatcgaagtcaacaatgagaatgtggttaaggtggggcatcgtcaggtggttaacatgatccggcagggggggaaccacttggtgttgaaggttgtaactgtgacccgaaatctggacccagacgatactgcacgcaaaaaggcaccccctccccctaaacgtgccccaaccacagccctcactctccgctccaaaagcatgaccagtgaacttgaggaattggttgataaggacaaacccgaagaaattgttcccgctagcaagcctagccgtgccgcagaaaatatggctgttgaacctcgcgtggccacgattaagcagagaccgagtagccggtgctttcccgctgggagcgatatgaactcagtgtacgagcgtcaggggattgcggtaatgacacccactgtaccaggcagccctaaggccccatttctcggtattcctcgggggaccatgaggaggcagaagagcatcgacagccggatctttctgtcaggaatcacggaggaggagaggcaattcctggcaccaccgatgctcaaatttactaggtcattgtcgatgccagacacatcggaggacatacctccccctcctcaatccgttcccccatctccccctcctccaagcccaaccacatataattgtccgaaaagtcccacgccccgagtgtatgggactatcaagcctgcatttaaccagaattctgccgctaaggtctccccagccacaaggagcgataccgtcgcgactatgatgcgtgaaaagggtatgtattttcgacgcgagttggaccgttacagcttggatagcgaggatctgtacagcagaaacgccggaccccaggctaattttcggaacaagcgcggccagatgccagagaatccctatagtgaggtaggaaagatcgcctctaaagctgtgtatgtgcctgcaaaacctgctaggcggaaggggatgttggttaaacagagtaacgtcgaggattcgcctgagaagacatgcagtatccccattcccaccattattgtaaaggaaccgagtaccagctccagcggcaagagttctcaggggtctagcatggaaattgatccccaggcgccagagcctccctcccagctgagaccggatgaatccctcacagtctcctccccttttgccgcagctatagcgggggcagttcgtgatcgtgagaagcgcttggaagcgcgcagaaactcacccgcctttctgtcaactgacttaggagacgaggatgtgggcctcggcccccctgccccgaggacaaggccaagtatgtttcctgaggagggcgacttcgcagacgaggactccgccgaacagctgtcctcacctatgccctctgccactcctcgggagcccgagaatcactttgtgggaggtgctgaggcttccgccccgggggaagcagggagacccttaaacagcacctctaaagctcaggggcccgagagtagcccagccgtgcctagtgccagcagcggaacagcaggcccaggaaattatgtgcaccccctgaccggtcgcctgttggacccatcctctcctctcgcccttgcgctgtcagcaagggatcgggccatgaaggagtctcagcaggggccgaagggggaagctcctaaagctgacctaaacaaacctctatacatcgatactaaaatgcggccatctctggacgctggctttccgacagttactcggcagaacacgcgtggacctctccgcagacaggagacggagaacaagtacgaaacggacttaggccgggatagaaaaggcgatgacaagaagaacatgctcatagatattatggatacatcacagcaaaagtcagcaggtcttctaatggtacacacagtggacgcaacaaagctggataacgccctccaagaggaggatgaaaaggccgaggtggaaatgaaacccgactcaagcccctcagaggtgcccgagggggtgtccgagacagaaggcgcgctgcagataagcgccgccccagaaccaacaaccgtgcccgggagaactatagttgccgtgggatccatggaggaagctgtcatcctgccatttcggatccctccacctcctcttgcctcggtggatctagatgaagacttcatcttcaccgagcccttaccgccaccactcgagttcgccaatagttttgacatcccggatgatcgcgccgcctccgtacccgccctcagtgacctagtgaagcagaaaaaatcagacacacctcagtctccatccctaaattcgtcgcaaccaaccaactcagcagattccaagaagcccgccagcctatctaattgcctgccagcctccttcctgcctccccccgagtcgtttgacgcagtggctgattctggcatagaagaagtggattcaaggagttctagcgaccatcaccttgagactacaagcacaataagcaccgtttcaagtataagtactctgtcaagtgagggtggagaaaatgttgacacctgcaccgtgtatgctgacggtcaggcattcatggtggacaagccgcccgtgccacctaagccgaagatgaaacccatcatacacaagagtaatgccttataccaggatgccctggtggaagaggatgtagactcctttgttatcccgcctcctgccccacccccaccaccaggctccgctcagccaggaatggccaaggtgctccagccaagaacatcaaaactctggggcgatgtgacagagattaaatcacctattctgagcgggccaaaagccaatgtcatttcggaactgaactccatactacagcaaatgaatagagaaaagctggcaaagccaggagagggacttgacagtccgatgggggccaagtctgcttcactagcccctcgatcacccgaaatcatgagcaccatcagtggtacacggtccacaacggtgactttcacagtaaggccaggtacctcacaacccattacactgcagagccgtccacccgattatgagtctagaacaagcggtaccaggcgggctccatctccagtagtctcgcccacagaaatgaacaaggagacccttccggcccctctgagcgccgccactgcatcccctagccccgccctgagcgacgtattttccctgccaagccagcccccttccggggacttattcgggctgaatccagcgggacggtctagaagtcccagccctagcatcctgcagcaacctattagtaataagcccttcacaacaaaaccggtccacctgtggacaaagcctgatgtcgccgattggctggaaagtctgaatctgggcgaacacaaagaagccttcatggacaatgaaattgacggctctcatttgcccaacttacagaaggaagacctcatcgacctgggtgtgactcgcgtcggccatagaatgaatatcgagagagcactgaaacagcttctcgatcgctag

SEQ ID NO: 134147 - DNA, 843 bp, synthetic construct
  misc_feature 1..843: note = Description of Artificial Sequence: Synthetic coding sequence
  source 1..843: mol_type = other DNA
atgatgaatgtgcccggtggcggcgcggccgccgtcatgatgactggttacaataatggcagatgccctcgaaacagtttatactcagattgcattatcgaggagaaaacagtcgttctgcagaaaaaggacaacgagggtttcggatttgttctgcgcggggccaaagcggacacccctatcgaggaattcacaccaactccagcattccctgctctgcagtacctggagagcgtcgacgaagggggagtcgcttggcaagccggactgagaaccggagactttctgatcgaagtgaataacgagaacgttgtgaaagtgggacacagacaggttgtgaacatgattcgacaaggaggcaatcatctagtgctgaaagtggttaccgttaccagaaaccttgatccagatgacactgccagaaaaaaggcccccccaccgcccaaacgggcccctaccaccgccttaactctcaggtctaagagcatgacctcggaactggaggagttagtggacaaagccagtgtccggaaaaagaaagataaaccagaggaaatcgttccggcttcaaagccttcaagggccgctgagaatatggcagtggagccacgggtggccacaatcaaacaacgccctagttctaggtgtttccccgcagggagcgacatgaactccgtctatgagcgccaggggatcgccgtcatgactcccacagtccctggatcgccgaaggccccattcttgggcatcccaagaggcaccatgagacgtcagaaatccatcggcaagaaatgtggaacacctcctcagaagcttcctcttggtttccaaactcagccgtag

SEQ ID NO: 134148 - DNA, 4413 bp, synthetic construct
  misc_feature 1..4413: note = Description of Artificial Sequence: Synthetic coding sequence
  source 1..4413: mol_type = other DNA
atgaagagcctgctcaacgcgttcaccaagaaagaggtcccctttcgcgaggcgccagcttatagcaaccgccgccgcagacctcccaatacactggcggccccaagagttctcctcaggtccaacagcgacaataacttgaacgcctccgcacctgattgggccgtgtgctccaccgccacatcccatagatccttgagcccccagctcctgcagcagatgccttcaaagcctgagggagctgctaaaaccattggttcctacgtgcctggaccacgatccagaagcccatcgctgaaccgactggggggcgctggcgaggatggcaaacgtccacaacctctgtggcatgtgggaagccctttcgctctcggagcaaacaaagattccctgtcagcctttgaataccccgggcctaagcgtaagctgtacagcgctgttcccggcagactgtttgtggcagttaagccttaccaaccccaggtcgatggggaaatcccccttcatagaggtgacagggtgaaagttctgagcataggggaaggcggtttttgggaaggctctgcacggggccacatcggttggtttccagcagagtgcgttgaagaggtgcagtgcaaacctcgtgactctcaagctgagacgcgggctgatcggtcaaagaagctgtttcgacactatacggttggatcgtacgactcttttgatactagcagtgattgcataatagaggagaaaacagtggtactgcaaaagaaggacaacgaggggtttggattcgtgctcagaggagctaaagccgacacacccatcgaggagtttacccctactccagctttcccagccctgcaatacctcgagtctgtcgatgagggcggtgtcgcctggcaggccggcctgcgcaccggagatttcctgattgaagtcaacaacgagaacgtcgttaaggtgggacaccgtcaggtagttaacatgatcagacagggaggaaatcacctggtgctgaaggttgtcactgtgacaaggaatctcgaccccgacgacacggcccgcaagaaagccccaccccccccgaagagggccccgaccaccgccttaacattgaggtctaaatctatgacctctgagctcgaggagttggttgataaggcatcagtaaggaagaagaaggataagcccgaggagatcgtgcccgcatctaaacctagcagagctgcagaaaacatggccgtggaaccgcgcgtcgccaccatcaagcagcggcccagttcccggtgctttccggctggaagcgatatgaactcagtgtatgagagacagggtatcgcagtcatgactccaaccgtcccaggttccccaaaggcacccttccttggaatccctcgcggaaccatgcgacgacagaagtctatcgatagcagaatttttttaagtggcatcactgaagaagaaagacagttcctggctccaccgatgttgaagttcacacggtctctctctatgcccgacacatctgaggacattccaccgccaccacagagcgtgccccctagcccaccacccccgagcccaactacgtacaactgcccgaaatccccaacgcctagagtttacgggactatcaaacctgcttttaaccagaacagtgccgctaaggtctcgccagcgacacgttcagacacagttgccacaatgatgagggagaagggcatgtacttcaggcgcgagcttgatagatacagcctggactcggaggacttatacagtaggaacgctggccctcaagcaaatttccgcaacaaaagaggtcaaatgcccgaaaatccttactctgaggtaggcaaaatcgcctccaaggctgtttatgtccctgccaaaccagcaagaagaaaaggtatgctggtgaagcagtctaacgttgaggattcacccgagaagacatgtagcatccccatccccaccataatcgtgaaggagccaagtacatcgagctcaggcaagtcatctcagggaagcagtatggaaatcgaccctcaggcccccgagcccccatctcagctgcggccggacgagagcttaacagtcagctccccattcgctgctgccatcgcgggagccgtgcgcgatagggagaagagactggaagccagaaggaattccccagcctttttatcaaccgatctgggcgatgaggatgtcggactggggccacccgcaccccggactcgaccctcaatgttcccggaagagggcgatttcgccgacgaagacagcgctgagcagctgtcatcccctatgccctcagcaactcctagggaacctgagaaccactttgtcggcggagccgaggccagcgctccaggagaggcaggccggccactaaactctacttcaaaagcccagggccctgagtccagtccggccgtgccatctgcatcctctggaaccgccggtccagggaactacgtccaccctttgaccggccggctgctggatccttcatcgccgctagctctggccctatctgctcgggaccgcgcaatgaaggaatcacaacagggacctaagggggaagcccccaaagccgacctgaataaaccgctgtatattgacactaagatgcgaccctctttagacgcagggttccctaccgtaacccgccagaacaccagaggtcccttgcgccgacaggagactgagaacaaatacgagacagacttaggccgagatcgaaaaggcgacgacaaaaagaatatgctcatcgatatcatggacaccagtcagcagaagtctgccggcctcctgatggtgcacacagtagacgccacgaaactcgacaatgccctgcaggaggaggatgaaaaagcagaggtggaaatgaagccagattccagccctagcgaggtcccagaaggagtctccgagactgaaggagctcttcagatctccgctgccccagagccaaccactgtgcctgggcggacgatagttgcagtggggagcatggaggaggccgtgatcctgccatttagaatccccccccccccactggcttctgtggatctcgacgaggacttcatttttactgagcccctccctccccccctggagtttgctaactccttcgatatccctgacgaccgggcggcttccgtacccgctctgtcggacttggttaagcagaagaagagcgacacaccacagagcccctcactcaatagctcgcagcccaccaacagcgctgactcaaagaagccagcctccttgtccaactgcctccccgccagctttctcccacctcctgagtccttcgatgccgtcgcagactctggtatcgaggaagtcgattctcggtcgtcttccgatcaccacctagagaccacatccacgatcagtactgtatcttccatcagcacactgagctccgagggaggagagaatgtcgacacctgcacagtttacgcggacggtcaggccttcatggtggacaagcctcctgttcctcccaagccaaagatgaagcctatcattcataagtcgaacgccctgtatcaggacgcactggtggaagaggatgtagacagttttgtcatcccacctccagccccacccccccctcctggctctgcccagccaggaatggccaaagtgctgcagcctcggacctctaaactgtggggagatgttactgagattaaaagtcccatcctttcgggtcccaaggcaaatgtgattagtgagctgaatagcatcctacagcaaatgaaccgggagaaactggcgaaacccggcgagggccttgatagtccaatgggggcgaaatctgcttccctggcacctcggagcccggagattatgagtaccatctcaggtacacgttcaaccacagtcaccttcacagtccgtcccggaacttcgcagccaatcacactgcagtcccgcccccctgattatgagagtagaacaagcggcacgaggagggccccttcaccagtcgtgtcccctactgagatgaataaagagacactgccagctccgctttctgctgcaaccgcctcaccttcccctgctctcagcgatgttttcagtctcccctcccagcccccaagtggcgacctgttcggactgaacccggcggggagaagtaggagcccttcaccttctattttgcagcaacccataagtaataagccatttaccactaagcccgtccatctgtggacaaaaccggacgtggccgattggttggaaagtctgaatcttggggagcacaaagaggccttcatggataacgaaatcgatggcagccatctacctaatctgcaaaaagaggatctcatagacctcggggtaacacgcgtcggccatcggatgaatattgagagagccctgaagcaactactggacagatag

SEQ ID NO: 134149 - DNA, 816 bp, synthetic construct
  misc_feature 1..816: note = Description of Artificial Sequence: Synthetic coding sequence
  source 1..816: mol_type = other DNA
atgatgatgaacgtgcctggcggcggtgcagctgctgtgatgatgactggctacaacaatggaaggtgtccccgcaattctctctattccgactgtatcattgaggagaaaactgtggtgcttcaaaaaaaagataacgaaggcttcggcttcgtgctccggggcgcaaaagcagatactcccattgaagaatttacgccaactccagcgttcccggccctgcagtacctggaaagtgtggacgagggaggagttgcctggcaggccggattgcgaacaggagattttctcatcgaagtgaacaatgaaaacgtagtgaaagtggggcacaggcaggtggtgaacatgatccggcagggtggtaaccaccttgtgttgaaagtggttacagtgacccggaacctcgatcctgacgacactgcccgcaaaaaggcacccccgccccctaagcgcgccccgacaacagcactgactctgagatccaaatcgatgacctcggagttagaggaactcgacaagcctgaggagattgtacccgcatctaagcccagccgggctgctgaaaatatggccgtggagcctcgggtggctacgattaagcaaagaccatccagcagatgcttccccgcgggaagcgacatgaactctgtatacgagagacagggtatcgctgttatgacacccaccgtgcccggttcacctaaggccccatttctgggtatcccccgaggtaccatgcgccgccagaaatcaattggcaagaagtgtggcaccccccctcaaaagctaccactgggattccaaacccagccgtag

SEQ ID NO: 134150 - DNA, 3765 bp, synthetic construct
  misc_feature 1..3765: note = Description of Artificial Sequence: Synthetic coding sequence
  source 1..3765: mol_type = other DNA
atgatgatgaatgtgccaggtgggggggccgctgctgtgatgatgaccgggtataacaacggccggtgcccacggaatagtctctactccgattgcatcatcgaagagaaaacagttgtcctgcagaaaaaggacaacgagggatttggcttcgtgctgcgaggggctaaagctgatacacccattgaggagtttactccaactcctgcttttcccgctctacaatatttggaatctgttgacgagggtggagtcgcctggcaggccgggctccgtaccggagattttctgattgaagtgaataatgaaaacgtcgtaaaagtgggccatcgacaggttgtgaacatgattcgacagggaggcaatcatctagtgttaaaagtcgtgacagtgacccggaacttggatccagatgataccgcacggaaaaaggcaccccctcctcccaagagggcccctacgaccgcacttacactccgctctaaatccatgacgtccgagcttgaggagctcgtagataaagataaaccagaggaaattgtcccagcttccaagccatcaagagccgcagagaacatggctgtagagcctcgagtagccactatcaagcagcgcccatcatccaggtgtttcccggccgggagcgatatgaatagtgtgtacgaacggcaaggcatagctgtcatgaccccgacagtgcccggatccccaaaagcaccttttcttggcataccaagaggcactatgaggaggcagaagtctatagattccagaatcttcctgagcggaatcacggaggaggaaaggcagttcttggctccgcccatgctgaagtttacacgaagtttgagcatgcccgacacatctgaggatatccccccacctccacagtcggtgcccccctctccccctcctccttcacctaccacctataactgtcccaagagtcctactcccagggtctatggtacgataaaaccagcctttaaccaaaacagcgccgctaaggtgagtccagccacccgctccgataccgtcgctaccatgatgagggagaaaggtatgtattttcgcagagagcttgacagatatagtctcgacagtgaggacctgtatagccgaaatgccggacctcaggccaactttaggaataagcgaggccagatgcccgaaaacccatattccgaggtcggcaagattgccagtaaggccgtttacgtgccggccaaacctgctaggcgaaagggtatgctggtgaagcagagcaacgttgaggactcccccgaaaagacctgcagtattcctatcccaactattatagtgaaggagccttctacttcctcctctgggaagtctagccagggctcaagcatggagatcgatcctcaggccccagaacccccttctcagcttagaccagacgaatccctcaccgtgtctagcccttttgccgccgccattgccggggcggtacgtgatagagaaaaacggctcgaggctagacggaacagccctgcattcctatcaacggatttaggcgacgaggatgtggggctcgggcctcctgcccctcgtacacgcccttccatgtttcccgaagagggagacttcgctgacgaagattccgcagaacagctgagctctcctatgccgtccgcgactccaagagagcctgagaaccatttcgttggaggcgcagaagccagtgcacccggagaagcagggcgtccactaaatagtacctccaaagcccagggacccgaatcctcccctgcggtgccttcagcgtccagcggtactgcgggaccagggaattacgtgcaccccttgactgggcgcctcttggacccttcaagccccttggccctagcactatcggcacgcgatcgggctatgaaagaatcccagcagggcccaaaaggcgaggcaccaaaggccgacctgaataaacccctgtatatcgataccaagatgcgtccatctctcgacgccggatttcctacagtgaccagacagaatactcgcggacccctgagacggcaagaaactgagaacaaatatgaaactgaccttggtagagacagaaagggcgatgataaaaaaaacatgctcatcgacatcatggatacctcacaacagaagtctgcgggattgcttatggtccatactgtcgacgcaactaaactggataatgctctccaggaagaagatgagaaggccgaagttgagatgaagccagattccagccccagtgaggtacccgagggagttagcgagacggaaggcgccttgcagataagcgccgcgccagaacctaccacggtgccgggccgaacaatcgtcgcagtgggttccatggaagaggctgtgattctccccttccggattccaccgcctcctctcgcgagtgtagatttggacgaggattttattttcacagagcccctcccccccccattggaatttgcgaactccttcgatatcccagacgaccgggctgccagcgttccggccttatccgatctagttaagcagaaaaagagcgacactccccagagcccatcactgaacagttctcagcctactaactctgccgacagcaagaaaccagccagtcttagcaattgtctgccagcttcctttctccccccaccagagtccttcgatgctgtagcagactcaggcatcgaagaagtcgattcaaggtccagctcagatcaccatctcgaaactacgtcaacgattagcacggttagttctatatcaactctgagtagtgaaggcggggagaacgtggatacctgcactgtctatgcagatgggcaggctttcatggtagataagccacccgttccacccaaacccaaaatgaaacctatcattcataagtctaatgccctgtaccaggatgcgctggttgaagaggatgttgacagcttcgtgattccccctcccgcacctcccccacctcctgggtcagcccagccaggcatggcaaaagtcctccaaccccgaacatccaagctgtggggcgacgtgacagagataaagtctcccatcctgtccggccccaaagctaatgtaatatccgagctcaacagcatcctacagcagatgaatagggaaaagctcgcaaagcccggtgaaggactggattctccaatgggcgctaagtctgccagcctggcccctcggtctcccgagatcatgagtacaatctctggtaccaggagcaccaccgtgacttttacggtgcggccagggactagtcagcccataacattacagagcaggcctccggattatgagtcaagaacttctggaacccgccgggccccgtctccggtagtttctccaaccgagatgaacaaggagacactacccgcccctcttagcgcggcaacggcttctccatcccccgccctttccgacgtcttttctctgcctagtcagccaccctccggcgatttgtttggactgaatccggccgggcgatctcggtccccatccccatccatactccagcaacctatcagtaacaagccatttactacaaaaccggttcatctttggacgaagcctgatgtcgccgactggttagagagcctgaatctgggcgagcacaaggaagcttttatggataatgagatcgatggatcacatctgccgaacctgcagaaggaggacctgattgatctgggagtgaccagggtcgggcaccgtatgaacattgagagggcgctgaagcagctacttgaccgctag

SEQ ID NO: 134151 - DNA, 915 bp, synthetic construct
  misc_feature 1..915: note = Description of Artificial Sequence: Synthetic coding sequence
  source 1..915: mol_type = other DNA
atgccccggagccctacgagttcagaagacgaaatggcccagagctttagtgattattccgttggatctgagagcgactcatccaaggaagaaaccatctacgacactatacgggccactgctgagaagccagggggcgcaagaacagaagaatcgcagggcaacaccctagttatccgggtagtaatccatgacctgcagcagaccaaatgtattaggttcaatcccgacgccaccgtctgggtcgcaaagcagcggattctgtgtactttgacgcagtctctcaaggatgtcctcaactacggccttttccagcccgcatcaaacgggcgggacggcaaattcctggatgaagagcgcttgctgagggagtacccccagcccgttggcgagggcgtccccagcttagaatttcgctataaaaagcgggtgtataaacaggcttcgctcgatgagaagcaactggctaagttacacactaaaactaatttaaagaagtgcatggaccacatccagcatcgcctggtggaaaaaattacaaaaatgctggaccggggcctggacccaaatttccacgaccccgagacaggcgaaacccccttgaccttggcagcccagctggacgactccgtagaagtcattaaggctcttaagaatggaggtgcacatctggatttcagggccaaagatggaatgaccgccctgcacaaggctgccagagccaggaatcaagtagccctgaagacgctgctggagcttggggccagtcccgactataaagactcgtacggcctaactcctttgtaccataccgcgattgtcgggggcgacccctattgttgcgaacttctgttgcatgaacacgccaccgtctgctgtaaagatgaaaatggatggcacgaaattcaccaatag

SEQ ID NO: 134152 - DNA, 5244 bp, synthetic construct
  misc_feature 1..5244: note = Description of Artificial Sequence: Synthetic coding sequence
  source 1..5244: mol_type = other DNA
atggatggacctggagcctccgccgtcgttgtgagagtgggtataccagatctgcagcaaaccaagtgcttgcggcttgaccctgcagctcctgtctgggctgcgaagcaacgcgtcttgtgcgcattaaatcacagtctgcaggatgctctcaattacgggctgttccaaccaccatctcgaggcagggcagggaaattcttagatgaagagcgactgctccaggagtacccgcccaatctagatactccattgccctatctcgagttcagatataaacggagggtatatgcccagaacctgatagatgacaaacagttcgctaaattgcataccaaggccaatctgaagaagttcatggattacgtgcagcttcactccaccgacaaagtggcacgcctcttggataaggggctcgatcccaacttccatgacccagattcaggagagtgccccctcagtctcgccgcccagctggacaacgctacggatctgctgaaggttctgaagaacggtggagctcacctcgattttcgaactcgggatggccttaccgccgtccattgcgcaaccagacaacgcaatgctgcagcactcacaactctgctggacctcggtgcttccccggattacaaggactctcgcggtttgaccccactgtatcacagcgccctcggcggcggagacgccctgtgttgcgagttactcctgcatgaccatgcgcagctcggaatcactgatgagaacggttggcaggagattcatcaagcttgccgattcggccacgtccagcacttggagcatctgctgttttacggcgctgatatgggtgctcagaatgcctccgggaacacagcgctccacatctgtgctctgtataaccaggagagttgtgcccgtgttctactcttccgcggggcgaatagggacgtgcggaactacaactcccaaacagcttttcaggtggctattatcgccggcaactttgagctagcagaagtcatcaagacacataaggactctgatgtcgtgccttttcgggaaacaccttcttatgctaagcgacggcgcctggccggcccttcaggcctggcgtcgccacgtcctctccagagatccgccagcgacatcaaccttaagggcgaggctcaaccggccgctagccctggtccatctctgcggtcccttcctcaccagttgttattacagaggctccaggaggagaaggatcgtgacagagatgccgatcaagaatcgaacattagcggaccattagccggccgcgccggccagagtaagatttcagacccagggcctggacctggaggtgtcggaggagccccactcccgccaccaggagcgccacgttcttgtatccgtatccgggcacgcttcccagctccacctgctccccctgcgcctcctccaagagggcccaagaggaaattatactccgctgtgcccggtagaaagttcattgcagtgaaagcccattctccccaaggggaaggggaaatcccactgcaccggggcgaggcagtgaaagtgctgagcatcggcgagggcggcttctgggaaggcacagtgaaaggacggaccggatggttccccgccgattgtgtagaggaggtgcagatgagacagcatgacactcgtccggaaacgagagaggaccgaacaaaacggctcttcagacactacactgtgggatcctatgattcactcacatcacacagcgattacgtgatcgacgataaggtggccgtgctacagaagagggaccacgaaggctttggctttgtgctgcgcggtgcgaaggccgaaactccaattgaagaattcactccaacgccagcctttccagccttgcagtacctggagagcgtcgacgttgagggggtcgcgtggcgagctgggctgcggactggcgacttcctgatcgaggtgaatggggtgaacgtcgtgaaagttggacacaaacaggtcgtggcattgataaggcagggtggcaacagactcgtgatgaaggtagtcagcgttacaaggaagcctgaagaggacggagctcggcgtcgggcaccaccacctcccaaacgcgcaccttcaactacactgaccttgcggtcgaagtcaatgaccgcggagctggaagagttggcgagcatccgaaggcgtaaaggggagaaactggacgagatgctcgccgccgcggccgaaccaacattgcgcccggacatcgcagacgcagactcacgcgctgctacggtcaagcagcggcctacatctcgtaggataacacctgctgagataagtagtctgttcgagaggcagggactccccggaccagaaaagctcccaggaagcttacgtaagggaattcccagaactaagtctgtcggagaggatgagaagttagcatcccttctcgagggcagatttcccagatctacctcgatgcaggatcctgtccgggagggcagaggcatccccccccctccacagaccgcaccaccacctccaccggccccatattacttcgactccggacctccacctgcgttcagccctcctccccctcctgggcgggcatacgatactgtcagaagcagtttcaagcccggccttgaagcacgactgggggctggtgcagccgggctctacgaacctggcgccgcgttaggtcctcttccctaccccgagcgacagaagagagctaggtccatgataatattgcaggactcagcccccgagtccggagacgcgccgcggccccctcccgctgcgacccctccagaaaggcccaagagaagaccacgaccccccggtccagacagtccttacgccaatttaggggctttctcggccagtctattcgctccttccaaaccacagcgtcggaagtctccactggtgaagcaactgcaggtagaggacgcacaagaacgggcagcccttgccgtcggctcaccagggccaggtggaggatcatttgccagagagccaagtccaacccatcgcgggccaagacccggagggcttgactatggcgccggcgacggaccaggactcgctttcggcggtccaggtccggccaaagacaggcggcttgaagaacgcagaagatccaccgtgttcttaagcgtgggggccattgagggttctgcaccaggggcagacctgccttccctccagccctctcgcagcattgacgaacggttacttggaacgggtccaactgccgggagagacctgttgctgcccagcccagtgagcgcgctgaagcccctagtttccggaccttctctgggacctagtgggtccacgttcatccaccctctcaccggcaaacccctggacccttcctctcctctagccctggccctcgcggccagagagagagctctggcatcgcaggcaccctctcgctccccaacaccggtgcactcccccgacgccgatagacctggtcctctctttgtcgacgtgcaggccagagacccagaacgagggagtctggcctcacctgcattctctcctagaagcccagcctggatcccggtgcccgccaggcgggaagcagaaaaggtccccagggaggagagaaagtcaccagaagataagaaatcgatgatcctatccgtgcttgacaccagtctgcagcggccagcgggacttattgtggtccatgccacctctaatggccaagagcccagccggctgggtggggcagaggaggaacggcccggcacaccggaacttgcaccggcaccaatgcagtcagccgccgtcgccgaaccattgccttccccccgcgcccagccccccgggggaacaccagccgatgcagggccggggcagggtagttcagaggaggaacctgagctggtcttcgccgtgaacctccctcccgcccaattgagctcctccgacgaggagacaagggaagagttagcccgcattggccttgtgcctcctcccgaagaattcgcaaatggagtgttgttggctacacccctggctggacccggcccaagtcctaccacagttccaagtcccgccagcggaaaaccctcctctgagccccctccggcccctgagtctgccgctgactccggcgttgaagaggctgatacccggagttcatccgatccacacctggagactacttccacaattagcaccgttagctccatgtctaccctttcctccgaatctggcgagctgacagatacacataccagcttcgccgacggccatacatttctcctcgagaaaccccctgtccctcccaagcccaagctcaagtctccattagggaaaggcccggtcacttttagggatcctctcttaaaacagagctccgacagtgagctaatggcccagcagcatcacgccgcatccgcagggctggcatccgctgccgggcccgcccggccacgctacttgttccagcgccgctcaaaactgtggggggatcctgtggagtctcgaggccttccaggacctgaggacgataagcctaccgtgatttccgaactgagctctagactgcaacaactgaataaagatactcgcagccttggcgaggagcccgtggggggtttgggctcactcctggatcctgcaaagaagtcaccaattgcggcagcacggcttttttccagcttgggagaattgtcttccatatccgcacagaggagcccgggggggccaggtgggggcgcaagttattcagtgcggccgagtggcagatatcccgtcgctcgacgcgccccatcaccggtaaaacctgcaagcctagagcgcgtggaaggtctaggagcaggggccggcggggcgggacgccccttcggcctcacacccccaaccatcctgaaatcttcgagcctgtcgattccgcacgaaccgaaagaggttcgcttcgttgtgagaagtgtttccgctcgttcaagatccccaagcccctccccgcttccttcccctgcaagtggaccgggcccaggcgcaccaggaccgcggcgtccattccagcagaaacccttacagctgtggtctaagtttgatgtcggtgattggctggaaagtatccacctgggagagcaccgagatcgcttcgaagaccacgagatcgagggagcacatcttcccgcactgaccaaagatgactttgtcgagttgggcgtcacccgggtgggacatagaatgaatatcgagagggctctccggcagttggacggatcatag

SEQ ID NO: 134153 - DNA, 5229 bp, synthetic construct
  misc_feature 1..5229: note = Description of Artificial Sequence: Synthetic coding sequence
  source 1..5229: mol_type = other DNA
atggacggaccaggcgctagcgccgtggtggtcagggtagggataccagacctgcagcaaactaaatgtttgcgcctggatcctgccgccccagtgtgggccgccaagcagcgggtgctttgcgcattgaatcacagtctccaggatgcactcaattatgggttattccagcctcctagtcgtgggcgggcaggtaagttcctcgacgaagaaaggctcctccaagagtatccccctaacctggacactcctctgccgtacctggaatttcggtataagcggagggtgtacgcccagaatttgattgacgacaagcaattcgcaaaacttcacaccaaggctaatctgaaaaagttcatggactacgtgcagctgcatagcacagacaaagttgcaagactactggacaagggactcgaccccaacttccatgaccccgattctggagagtgtccattaagcctcgctgctcaactggataatgctaccgaccttctgaaagtgttgaagaacggaggtgcacacctggattttcggaccagagacggccttaccgcggtgcactgcgcaacccggcagagaaatgcagcagccttgacaactctcttagacctgggagcctctccagactataaggactctcgaggcctcacccccctgtaccattcagccctgggtggcggcgacgcactgtgctgtgaattgctgctgcacgaccacgcccagctgggaatcacagatgagaatgggtggcaggaaatccatcaagcttgcaggtttggccatgttcagcatttggagcatctgctcttctacggcgctgatatgggcgcccagaacgcatccgggaataccgctctgcacatatgcgcactatacaatcaggagtcttgtgcccgcgtgctactctttagaggggccaacagagacgtccggaactataacagtcagacagcatttcaggtggctattatcgctgggaacttcgagctggccgaagttatcaagacccacaaggattctgacgtggttccgttcagagaaactcccagttacgccaaacgccgacgcttggccggcccatctgggttggcatcccctagaccactgcagagatccgcgagcgacatcaacctaaaaggagaagctcagccggctgcctctccgggcccaagtttaaggtcactgcctcaccaactccttctgcagaggctgcaagaggagaaggatagggaccgagacgccgatcaggaaagtaacatcagtggcccgctggctggccgcgccggccaaagcaagatttccgaaccaggagccccgcgatcatgtattcggataagggctcgctttcctgcaccccccgcacctcccgcgcctcctcccaggggtccgaaacgcaagctgtactccgccgtcccaggccggaagtttatcgcggttaaagcccattctccccagggcgaaggcgagatccctctccaccgaggagaggcggtcaaggttctgtcaatcggggagggcggcttctgggaggggaccgttaagggacggacgggttggttcccagctgattgcgttgaggaggttcaaatgaggcaacacgacacacgcccagagaccagagaagataggactaagagactgttcaggcattacaccgtggggtcatatgactcactcactagccactccgattacgtgatcgacgataaagtggcagtgctgcaaaagcgggaccatgagggcttcgggttcgtgctacgcggggcaaaggctgagaccccgatcgaagaatttactccaaccccggctttccccgccttacagtacctagaaagtgtggacgtggagggtgtggcctggcgggctgggttgaggactggtgattttctgattgaggtaaacggcgtgaatgtggtcaaggttggacacaaacaagtggtggcattaattaggcaaggaggaaaccggctcgtgatgaaggtcgtatcagtgacccggaaacccgaggaggacggggcaaggaggcgagccccacctccacccaaacgggctccaagtacaacgctgactctgcgctcaaaatctatgactgccgaacttgaggagctgggcgaatggcgtggtcgagagggaagcgagaagctagacgagatgctcgcagcagccgccgagcccactcttagacctgatatagcggatgccgacagccgtgctgctactgtaaagcagcgcccgacgtcaaggaggataacaccagcagagatatcgagcctgttcgaacgccagggcctccctggccccgagaaattgcctgggtcactgcggaaaggtataccgcgcactaaatcagttggtgaggatgagaagctggcatccctcttggaaggacgattccccaggagtacttccatgcaagaccccgtgcgcgaagggcgtggtattcctcccccaccccagactgctcccccccctccgccggccccttactatttcgattctggtcccccacctgccttcagcccccctccaccgcccggacgagcctatgacacggttcgatcctccttcaagcccggactcgaggcgcgactgggggcaggcgctgccgggctgtacgaacctggagctgcattgggccccctgccctatccagaacgccagaaacgtgcaagatccatgattattctccaggacagtgcaccagaatctggagacgccccacgccctccccccgccgctacccccccagaaagaccaaaacggagacctcggccccctggccctgacagtccatacgccaacctcggcgcgttcagtgcttcactatttgcaccctcaaaaccccagcgcaggaagtctcctcttgtaaagcagctgcaggtggaagatgcacaggagagagcggccctggcagtgggatccccaggacccggcggtggctcttttgccagagagcccagtcccacacatcggggcccacgtcccggggggttagactatggggccggagatggccctggactggctttcggcggacccggcccggcaaaggaccggagactggaagagaggcgcaggtccacagtgttcttgagtgtaggggcaatagaaggctcggcaccaggtgccgacctgccatccctgcaacccagtaggtctattgacgaacggcttctcggaactggacctaccgcaggaagggatctcttgctcccgagccccgtcagcgcactcaaacctctggttagcgggcccagtttaggtccctccggcagcaccttcattcaccccctaactggaaagcctctcgaccctagctcacctctggccttagccctcgcagccagggagcgagccctggctagccaagctccctccaggtcacccacacccgtccatagccctgacgccgatcgcccaggccccctcttcgttgacgtgcaggcccgggatccagagcgggggagcctggcatccccagccttttcacctcggagccctgcttggattccagttccagctagaagggaggccgagaaggtgccgcgcgaggaacggaaaagcccagaagacaaaaagtcaatgatcctttcagtccttgatacatccctacaacgccctgccggcttgatcgtcgtacacgcaactagtaatggccaagagccgtcccggctcggcggagcagaagaggaaagacctggcacaccagagctggcgcctgctcctatgcagtcagcagctgtagccgaacctctgccctctcctagggcccagccgcccggggggacaccagcggatgcgggccccggacagggctcttctgaggaagaacctgagctggtctttgctgtgaatttgcccccagcacagcttagttcaagtgacgaggagactcgcgaggagctggcacgaataggccttgtgccccctccagaagagttcgccaatggagtccttcttgctactccactcgcgggcccgggcccaagccctaccaccgtgccctccccggcctctggtaagcccagctcagaacctccccccgcacccgaaagcgcggccgattcaggcgtggaagaagccgacactcgaagcagtagtgacccacacctcgagaccactagtactatttccaccgtctcttccatgagtaccctgagcagcgagtctggcgagttgacagacactcacacttcctttgccgacggccacacttttctccttgaaaagcctcccgttcctcctaaacctaagctgaagagccctctgggcaagggtcccgtgaccttcagagatcctctgttgaagcaaagctccgattctgagctcatggcccaacaacaccatgccgcgtctgcaggcctggcaagcgcagcagggcccgcacgcccccgctatcttttccagagaaggagtaagctctggggggaccctgtcgaaagccgaggactgcccggccccgaggatgacaagccaacggttatatcagagctcagcagcaggcttcaacagctgaataaagatacaagatctctgggggaggagcctgtggggggactggggagcttactggacccagccaagaaaagccctatcgctgccgcacggtgccgaagccccatggtgggactcaggctattttctagtctcggtgagctcagttcaataagtgctcagagaagccctggcgggccaggaggtggcgctagttactcagtaaggcccagcgggaggtatcccgtcgcccggcgagcaccttcacctgtgaaacccgcatccctggaaagggtggaaggtctgggagccggcgcggggggtgcaggtcgtcccttcgggctgaccccacccactatattgaagtcctctagcctcagtatcccccacgagccaaaggaggtacgctttgtggtcaggagtgtttcagcccgcagcaggtcaccttctcccagccctttgccctctccagcctcaggccctggcccaggtgctcctgggccaagacgaccattccagcaaaagcccctgcagctgtggtccaaatttgacgttggcgattggctcgagtctatccacctgggcgaacatagggacaggtttgaagaccatgagattgagggagcccacctgccagcacttaccaaagatgacttcgtggaattgggagtgacacgggtgggtcataggatgaatattgaacgcgcgttgcgccagctggatggtagttag

SEQ ID NO: 134154 - DNA, 2736 bp, synthetic construct
  misc_feature 1..2736: note = Description of Artificial Sequence: Synthetic coding sequence
  source 1..2736: mol_type = other DNA
atgcccccaaggcggagtatcgttgaagtaaaggtgctcgacgtccagaaacgccgcgtccctaacaaacattacgtttacatcataagagttacctggagcagcggttcaaccgaagccatttacagacgctattcaaaattcttcgacctccagatgcagatgcttgataagtttccgatggagggaggccagaaggatcccaagcagagaatcatcccttttctcccaggcaaaatcctgtttcggcggagccacatccgcgatgtagctgtaaaaagactgattcctattgatgaatactgtaaggctctgatacagttgccaccttatatcagccagtgcgatgaggtgttgcagttctttgagacccggcctgaagatctcaatccacctaaagaggaacatatcgggaaaaaaaagagcgggggggaccagacttctgttgaccctatggtactggagcagtacgtggtggtggctaattatcagaaacaagagtctagcgagatatcactgtccgttggccaagtggtggatattattgaaaaaaatgagtccggatggtggtttgtgagcacagcagaggaacagggttgggtgcctgccacttgtttggagggacaggacggcgtccaagacgagtttagcctgcagcccgaggaagaggagaaatataccgtgatttacccttataccgcacgtgatcaggatgagatgaatctggagcgaggcgccgtcgtcgaggtgatccagaagaatctggaaggttggtggaaaattcggtaccagggaaaggaaggctgggcccctgcttcttacctcaaaaagaattccggtgaaccgctccctcccaagcccggaccaggttctccctcccatcctggtgcactggacctcgatggggtgagccggcagcaaaatgccgtggggcgcgaaaaagaacttctatcctcccaaagagatggccgattcgagggccggccggttcctgatggcgacgccaaacaaagaagccctaaaatgaggcagaggccccctcccaggcgggatatgaccatcccacgggggctgaacctacccaaacccccaatcccaccccaagtggaagaagaatattacaccatcgccgaattccagacaaccattccggatggtattagcttccaggctggtctgaaggtggaggtaattgagaaaaacctgtctggctggtggtacatccaaatagaagacaaggagggatgggcccctgccactttcattgacaagtacaagaagacaagtaatgcttctaggcccaattttctcgctcccttgccccacgaagtgacccagttacggctcggagaagcggcagcattagagaataataccggctctgaagcaacaggccccagtagaccgctgccggacgctccccatggggttatggattctggtctgccctggtccaaggattggaaaggatctaaagacgttctgagaaaggcatcctcagatatgagtgcgtcggccgggtacgaagagatttccgatcccgatatggaagagaaaccctcactgcccccgcgcaaggaatccattatcaagagcgagggcgaattactggagcgggagcgagagaggcagaggaccgaacagctgaggggcccgacacctaaacccccaggggtaattttgccaatgatgccggccaagcacatcccacccgctcgagattccagaagaccggagccaaagcctgataagtccagactcttccagctcaagaatgatatggggcttgagtgcggccacaaggtgctagctaaagaggtgaaaaaacctaatctgcggcctatatccaagtctaaaactgatctgcccgaggaaaaaccagatgcgacccctcagaaccctttcctcaaatctaggccccaagtgagaccaaaaccagctccatcacctaagaccgagcctccacagggagaggatcaggtagacatatgcaacctccgtagcaaacttcgtcctgccaagtcccaggacaagagtctgcttgacggagaggggccacaggcagtgggcgggcaggacgtggccttttcgcgcagttttctgcctggcgaaggacctggcagagcccaggatcggactggcaaacaagatggcctttcacctaaagaaatttcctgccgcgcccctcctcgacctgccaaaactactgacccggtgagcaaatctgtcccggtgcctctgcaagaagctcctcaacagcgccctgtagtgccaccgaggcgcccgcctccacccaagaagacgagttcctcttcaagaccgctcccagaggtgcgaggaccccagtgtgaaggacacgagtctagggccgccccaacccctggacgtgccttgctcgtcccaccaaaagccaaaccatttttgagtaattccttgggcggtcaagacgatactcgggggaagggctctttggggccctgggggacaggcaaaattggcgaaaatagggaaaaagcggcagccgcatcggtgcctaacgctgatggcctgaaggatagcctgtatgtggccgtggcagacttcgagggcgacaaagatacatcatccttccaggagggcacggtctttgaagtccgagaaaagaatagcagcggctggtggttttgccaggtgctgtctggcgctcctagctgggaggggtggatcccttctaattacctgcgaaaaaaaccatag

SEQ ID NO: 134155 - DNA, 2805 bp, synthetic construct
  misc_feature 1..2805: note = Description of Artificial Sequence: Synthetic coding sequence
  source 1..2805: mol_type = other DNA
atggaggagatctggaaattctccacctatctcaatctggggtatgtttcgatgtgccttgagcatctactgtttgatcacaaatactggctcaactgcattttagtcgaggacaccgaaattcaggtcagtgtcgatgataagcatctcgagaccatttatctgggtctattaatacaggaggggcacttcttctgtagagccctgtgttcggtaacgcccccagccgagaaagagggagaatgtctgaccctgtgtaagaacgagcttattagcgtaaaaatggctgaagctggctcggagttagaaggcgtctctctggttactggtcagcgagggctggtcttggtgtcagcactggagcctctccccctgccctttcaccaatggttcctgaaaaattatccaggtagttgtgggctatctcggaaacgggactggacgggcagctaccagatcgggcgcggtagatgcaaggctttgaccgggtacgagcccggggagaaagacgagctaaatttctaccaaggcgagtccatagaaataataggctttgtgatacccggattgcagtggtttattggaaagtccacctcaagtggccaggtgggatttgtccccacacgcaacatagaccctgactcctattctcccatgtcaagaaatagtgcctttcttagcgatgaggagcggtgcagtctgttggctctcggctcagataaacagactgagtgctcatcattcctgcatacattggcaaggaccgatattaccagcgtgtacagactttctggatttgagtcgatacagaaccccccaaatgacctaagcgctagccagcccgaggggttcaaggaggttagaccaggcagggcatgggaagaacatcaggccgttgggagtaggcaatcctcttcctccgaggactccagtttggaagaggaactcttgtccgctacttccgacagttataggttgcccgagccagacgaccttgatgatcctgaactgttgatggatctgtcaaccgggcaggaggaggaggcagaaaactttgcacctatcctcgcttttctcgatcatgaagggtacgctgatcattttaaaagcctttacgacttcagcttcagcttcctcacgtctagcttttattcattttccgaagaagatgaattcgtggcatacctggaggcaagccggaaatgggccaagaagtcacatatgacgtgggctcatgcccggctgtgtttcttgctcggccggttgagcatccggaaagtcaaactcagtcaggcacgggtgtattttgaagaggcgatccatatcctcaacggcgcatttgaagacttgtcccttgttgcaaccctctacataaacctggccgccatatacctgaaacagcgtctccgccataagggaagcgctctgctggagaaggcaggcgccctgttggcgtgtctgccggatagagagtccagcgcgaaacatgagctggacgtggtggcatacgttctgagacagggcattgtggtcggcagctcgcccctagaggcccgagcttgcttcctcgctataagactgctgctgagcctgggtcgccacgaagaagtgcttcccttcgccgaaagactacagctgctgtcagggcatcccccagcctccgaggcagtggcttctgtcctctcctttttatacgacaaaaagtatctgccacatttggctgtggcctctgtccagcagcacggaatccaatctgcacaggggatgtcattgcctatatggcaggtgcatttggtcttgcagaacaccactaaacttttgggctttcccagtcccggctggggcgaagtgtctgctctggcgtgccccatgctacggcaggccctggccgcctgtgaagagctcgctgacagatctacccagcgggctctctgcctcatcctctcaaaggtttacctagagcaccggtcaccagacggcgctatacactatctaagccaggctctggtgttgggacaattactcggagagcaggaaagctttgagtctagcctgtgcctcgcttgggcgtacctgctggcctcacaggcaaagaaagcccttgacgttctcgagccacttctgtgtagcctgaaagagaccgaatcactgactcagagaggtgtcatttacaatctgttgggccttgcgttacagggcgagggccgtgtcaaccgcgctgccaagagctatttgcgtgccctcaatagggctcaggaggtaggagacgtccacaaccaggctgttgccatggcaaatctggggcacctttccttgaagtcctgggcccagcaccccgccaggaactaccttttacaggcagtcagattgtactgtgaactacaggcaagcaaagaaacagacatggagctggtacaggtgttcctttggctggcacaggtgctggtgtctgggcaccagttgacgcatgggctcctgtgctacgaaatggcactcctgtttggactccggcacagacacttgaaatctaaatacgtcccgtgttgttgggaggcgatcgaaaaaagtgtcggatcttcctttattcatttcttaagccaggtcatttcatttatgtcactgctgtgcgtccaggtttcttttcgacctcccaacccctctgccattagtacggcactgtgcccacagactttgcgccatgctagtccaactatgtctaccgggtggccttggctgtccaactccgggaccggtagatggaaggggggctgttggtcaccatggggaagcttcatcggtacttag

SEQ ID NO: 134156 - DNA, 453 bp, synthetic construct
  misc_feature 1..453: note = Description of Artificial Sequence: Synthetic coding sequence
  source 1..453: mol_type = other DNA
atgagtgaacagatgatgcagagcgtcgggtgcaggattagtctctccgtgtttcaatttctcggcgaccagaggcaggagttggtagcgttccatagactcgcaaccgtatactattctctgcacatgtacgagatggccgaagactgctacctcaaaactttgagtctgtgtcccccctggctccagtctcctaaagaggcactgtattatgctaaagtctactacaggctgggccgactgactttctgtcagcttaaggatgcgcatgacgctactgaatatttcctactggctcttgccgccgccgtattactgggtgacgaagaactgcaggatacgatccgcagccgcctagacaacatttgtcaatctcctctttggcacagtcgcccctccggctgtagctcagaaagagctaggtggttgagcggtggtggcttagcactgtag

SEQ ID NO: 134157 - DNA, 3867 bp, synthetic construct
  misc_feature 1..3867: note = Description of Artificial Sequence: Synthetic coding sequence
  source 1..3867: mol_type = other DNA
atgggcggttgcttctgcattcctagggaaagaagtcttacacggggccccggcaaagagaccccgagcaaagaccctactgtgtcatccgaatgtattgcgtctagcgagtataaagagaagtgttttttgcctcagaatatcaatcctgatctcactctgtcattttgcgtgaaatcgagaagccggaggtgtgtgaacgggcctctgcaggaggccgctaggcgccgcctgtgggcacttgaaaatgaggatcaggaagtgagaatgctgtttaaggatttgtccgctcgtctagtgtctatccagtctcagcgggcccagttcctgattacttttaagaccatggaggaaatttggaagttctctacttacctcaacttgggatatgtgtctatgtgcctggagcacctgctgttcgatcataagtattggctgaattgcatcttggtggaggacacagaaatccaggtgtccgtggacgacaagcacctggagacaatctatctggggctgctcatccaagagggccatttcttttgtcgcgcactttgtagcgtcacaccacccgctgagaaggaaggggagtgtttgaccctctgtaagaacgagttaatctcagtgaaaatggctgaagcaggatctgaattagagggagtcagcctggtcacaggacagagggggctggtcctcgtatcggccctggaaccactccctcttccttttcatcagtggtttctgaaaaactacccgggtagctgtggcctttccaggaaaagggattggactggcagctaccagatcggccggggtaggtgtaaagccctgaccggctatgagccaggggagaaggatgaattaaatttttatcagggcgagtctattgagatcattggatttgtgatccccggcctccagtggtttatcggcaagtccaccagcagtggacaggtgggttttgtacctacacgaaatatagaccccgatagctattcccccatgtccagaaactcagccttcctcagtgatgaagagcgctgtagtctcctggcgctggggtccgataaacagactgaatgtagttccttcctccacacactagcccgcaccgacattacctccgtgtaccggttgtctggattcgaatccatccagaatcccccaaatgaccttagtgccagtcaacccgagggcttcaaggaagtgcgccccggtagagcctgggaggagcaccaggcagtggggtctaggcagagctctagcagtgaggacagctcgctggaggaggaactgctgtcggctacctccgacagctaccgactgcccgagcctgacgacttggatgacccagagttgttgatggatctgtcaaccgggcaggaagaagaggccgagaatttcgcccccatcctggccttcttggaccatgaggggtatgccgaccatttcaaaagtctttatgacttctctttcagctttttgacttcctcattctactctttttccgaagaagacgagttcgttgcctatctggaggcatctaggaagtgggcgaagaaaagtcatatgacctgggcacatgcgagactctgtttccttcttggccgattatcgattaggaaggtgaaactatctcaagctcgggtatattttgaggaggcaatccacattctcaacggtgcatttgaggacttaagcctggtggcaacactatacatcaacttagcagctatttacttgaaacagaggcttaggcataaaggaagtgctttgctggaaaaggcaggggctctgcttgcttgtctgcctgatcgggagtcttcagcaaaacacgaactggacgtggtcgcctatgttctcaggcagggtatagtcgtgggaagcagccccctcgaagctagggcgtgttttttagctatcaggctcctcctatctctgggcagacatgaagaggtgcttcccttcgcagagcggctgcagttgctctccgggcatccacccgctagtgaagctgtggcttctgtgctgtcattcctctatgataagaagtaccttccacatctggctgtcgcttctgtccaacagcacggaatccaatccgcccagggcatgtccttaccgatatggcaagtccacctggtgctgcagaacaccactaagctcttaggttttccatcacctgggtggggagaagtgtctgcgctagcctgccccatgctgcgccaggcactcgctgcatgcgaggagttagctgaccgctccacacaacgtgcgctctgtttgattctcagcaaggtttacctggaacatagatccccagacggggccattcactacttgagccaggccctggtcctggggcagttgctgggcgagcaggagtcatttgaaagtagcttatgcctggcctgggcctacctgctcgccagtcaagccaaaaaagctctggacgtgctggaaccgctgctgtgctctcttaaggaaaccgagtcccttactcagcgaggcgtcatttataatttgctcggactcgctctccagggggagggccgtgttaatcgtgcggctaagtcttatctgagagccctgaaccgggcccaggaggtcggcgacgtgcataatcaggccgtcgccatggcgaatttgggccacttgagcttgaaatcctgggctcaacaccctgcccggaattatctgttacaagccgtgaggctgtactgtgagttgcaggccagtaaggagactgacatggaactcgtgcaggtgtttctctggctcgcccaagttctggtgtctggccatcagctcactcacggcttgttgtgctatgaaatggcattgctgtttggtctgcggcaccggcacctgaagagtcagctccaggctacgaagagcctgtgccatttttatagcagcgtctcccccaaccccgaggcatgtattacttaccacgaacactggcttgccctagctcagcagctcagggacagggaaatggagggcaggttgttagagtctttagggcagctgtatcggaacctgaacacagcgagaagtctgcgcagaagtcttacttgtattaaggaatccctcagaatctttattgatctgggcgagacagacaaggcggcagaagcatggctgggggcgggacgtctccattacctgatgcaggaggacgaactggtcgaattgtgtctgcaggcggctatccagaccgcactgaagagcgaagaacctctgctggccctgaagctttacgaggaggcgggcgatgtgttctttaacggaaccaggcataggcaccacgccgtagagtattatcgcgcaggggccgtccccctcgcccgtcggttaaaagcagtcagaacagaattgcgtatctttaacaaactcacagaattgcagatttctctggaaggctacgagaaggctctcgagtttgcgactctggccgccagactatccactgtcactggggatcagaggcaggaactggtcgccttccacaggttggccaccgtgtactattcgcttcatatgtacgaaatggccgaagactgctatctgaagaccctgagcctgtgtcccccctggctgcagagtcccaaggaggccctgtattacgccaaggtgtattacaggctcggtcgccttactttttgtcagctgaaagacgcacacgatgccaccgagtacttcctcttggctttggccgcagcagtcttgctaggagatgaggagctgcaggacacaattagatcaaggctggacaacatttgtcagagtccactgtggcacagccgcccgtctggctgctcctccgagcgagccagatggctatcaggtggcggtctggcactgtag

SEQ ID NO: 134158 - DNA, 2181 bp, synthetic construct
  misc_feature 1..2181: note = Description of Artificial Sequence: Synthetic coding sequence
  source 1..2181: mol_type = other DNA
atggatttgtccactggccaagaggaggaagcggagaacttcgccccaatcctggcttttctcgatcacgaaggatatgccgaccacttcaaaagcctgtacgatttcagtttttcatttctaactagctcattctactcttttagcgaggaagacgagttcgtagcctacctggaagccagccggaagtgggctaaaaaaagtcatatgacctgggcacatgctagactttgtttcctgcttgggagactctccatccgcaaggtaaagttgtcgcaggccagggtgtattttgaagaagcgatacacattctcaatggggcttttgaagatctgtcgctggtagcgacactgtatattaatttggccgccatttatctcaagcaaaggctcaggcacaaaggcagtgcccttttggagaaggccggtgccctactcgcttgtctgccagaccgagagtccagtgccaagcatgaactcgatgtggttgcctacgtcttgcggcaaggaattgtcgtgggttcaagtccactggaagcgcgagcatgtttcctggcgatccgacttctcctgagtctggggcgacatgaggaggtactgccattcgctgaacgcctccagctgctgtctggacatccccctgcaagcgaggccgtggcatcagtgctatcctttttatatgacaagaaatatcttccacacctggctgtagcaagtgtgcagcaacacgggattcagagtgcccaaggcatgtccttgccgatctggcaggtccatctggttctccagaacacgacaaaattacttggttttccctcccccggatggggcgaagtgagtgccctggcctgtccaatgttgaggcaagctcttgccgcatgcgaggagctggctgacaggtcgacacaacgggctctgtgtctgattctgagcaaggtttatctggagcacagatcgcccgatggtgccatccattatctgagtcaggcccttgtactcggccagctgctgggggagcaggaatccttcgaatccagtctgtgcttggcgtgggcctacctgcttgcgagccaggcaaagaaagcactagacgtcctagagccgctgctctgttcgctcaaggagaccgaatcactgactcaacgcggcgtaatttataatcttttgggcttagccctgcagggagaggggagagttaatagagcggcgaaaagttacctgagggccctgaatcgggcgcaggaggtgggcgatgtgcataaccaggcggtggccatggcaaacctcggccacctgtctctcaaatcctgggcgcaacatcctgccagaaactatctccttcaagcagttcgtctctactgcgagctgcaggcctccaaagagacagacatggaactggtacaggttttcctgtggctcgctcaagtcctcgtgtctgggcaccaattaacacatgggctgttatgttacgaaatggctttgctgttcggcctgcgacatagacatctcaagtctcagctccaggcaaccaagtccctgtgccacttctattctagtgttagccccaaccctgaggcgtgcataacttaccatgaacattggctcgcccttgcacagcagctgagagatcgtgagatggaaggccgccttttggagtctctcgggcaactgtaccggaacctgaacaccgctaggtccctgaggaggagcctgacatgtatcaaagagtcattgcgcattttcattgacctcggtgagaccgataaggcagcagaggcttggctgggcgcaggacggttgcactatcttatgcaagaggatgagcttgtagaactgtgccttcaggcagcgatacagaccgccctgaaaagcgaagaaccccttctcgcactgaagttgtatgaggaagccggagatgttttcttcaatgggacaaggcatcggcaccacgccgtggagtattaccgggctggcgccgtgcctctggctcgcaggcttaaagcagtgaggaccgaattacgcatttttaacaaacttaccgagctccagatttcacttgaagggtacgagaaagctttggaatttgctaccctagctgccaggctgtctactgtaacagaggcccgcgccggcggcctttctcctccgggttattccgtcctcttgccagcccatgtttag

SEQ ID NO: 134159 - DNA, 720 bp, synthetic construct
  misc_feature 1..720: note = Description of Artificial Sequence: Synthetic coding sequence
  source 1..720: mol_type = other DNA
atgccgctgcttctgttgggagagacggagcccctgaagctcgaaagggactgcaggtcccccgtggatccttgggcggccgctagtcccgatcttgcccttgcttgcctttgtcattgtcaggacctgtcatctggagcctttcctgacaggggtgttttaggaggcgttctgtttccaacagttgaaatggtgattaaggtgttcgtcgcgactagctcaggcagcatcgctatcaggaagaagcagcaagaagttgtgggcttccttgaggccaacaaaatagatttcaaggagctggatatagctggtgacgaggataaccggcgatggatgagggagaatgttccgggagagaaaaaacctcagaatggaattcctctgccgcctcagatctttaacgaagagcagtattgcggagactttgactcatttttcagcgccaaggaagagaatatcatttactcattccttggattagcacccccacctgacagcaaaggcagcgaaaaagccgaggagggtggtgagacagaagcacagaaggaaggatctgaggatgtggggaacctgcctgaggcacaagagaagaatgaggaagagggtgaaacagccactgaggaaaccgaggaaatcgctatggaaggcgctgagggagaagccgaggaagaggaggagacagctgaaggcgaagagccaggtgaggacgaagatagttag

SEQ ID NO: 134160 - DNA, 387 bp, synthetic construct
  misc_feature 1..387: note = Description of Artificial Sequence: Synthetic coding sequence
  source 1..387: mol_type = other DNA
atgcgggaaaacgtcccaggggaaaagaagccccagaacggcatccccctgcctccacaaattttcaacgaggaacaatactgcggtgacttcgacagttttttcagcgctaaggaggaaaacataatttactcctttctaggactcgcgcctccccctgatagcaaaggtagcgagaaggccgaggagggtggcgagaccgaagcacagaaagaaggctctgaggacgtgggcaaccttcctgaagcacaagagaagaacgaggaagagggggagaccgccacagaggaaaccgaggaaatcgctatggaaggggccgagggagaagccgaagaagaagaggaaactgcggagggtgaagaacccggcgaggacgaggactcttag

SEQ ID NO: 134161 - DNA, 387 bp, synthetic construct
  misc_feature 1..387: note = Description of Artificial Sequence: Synthetic coding sequence
  source 1..387: mol_type = other DNA
atgagagagaatgtgccgggggagaagaaacctcagaatgggataccactccctcctcagatcttcaacgaagagcagtattgcggggatttcgatagcttcttcagtgccaaagaagaaaatattatttactcattccttggcctggcacccccaccggactccaaaggttctgagaaggccgaggagggaggcgagacggaggcccagaaagagggcagtgaagatgtgggcaatctgcctgaggctcaggagaagaacgaggaggaaggtgagactgctaccgaggagactgaggaaatagcaatggagggagctgagggcgaggctgaagaggaggaagagaccgccgaaggagaagagcctggagaagatgaagacagctag

SEQ ID NO: 134162 - DNA, 387 bp, synthetic construct
  misc_feature 1..387: note = Description of Artificial Sequence: Synthetic coding sequence
  source 1..387: mol_type = other DNA
atgcgagaaaacgtccctggcgagaagaaaccacaaaacgggattcctttgccaccgcaaatctttaacgaggagcagtattgcggcgactttgacagcttcttttccgcgaaggaggagaacataatatattctttcctcgggctggctcctccccctgattccaaggggtctgagaaggctgaggaggggggtgagaccgaggctcagaaagaaggcagcgaggatgttggaaacctccccgaggctcaggagaagaacgaagaagaaggcgagactgcaacggaagagactgaggaaatcgccatggagggcgctgagggggaggcggaagaggaggaagagactgctgaaggcgaggaacctggcgaggacgaggactcctag

SEQ ID NO: 134163 - DNA, 321 bp, synthetic construct
  misc_feature 1..321: note = Description of Artificial Sequence: Synthetic coding sequence
  source 1..321: mol_type = other DNA
atgcgagagaacgtccctggggaaaagaagccacaaaatggcatcccactccctccgcaaatatttaacgaagaacaatactgcggagacttcgactcctttttttccgccaaagaagagaacatcatctacagttttcttggcctggctcccccacctgatagtaaaggttctgaaaaagctgaagagggcggcgagacagaggcgcagaaagagggatcggaggacgttggaaatctccctgaggcacaggaaaaaaacgaggaggagggcgagactgcaactgaggagacggaggagatcgcgatggagggagcatag

SEQ ID NO: 134164 - DNA, 2373 bp, synthetic construct
  misc_feature 1..2373: note = Description of Artificial Sequence: Synthetic coding sequence
  source 1..2373: mol_type = other DNA
atgaacattatgaatacagaacagtcgcagaacagcatagttagccgtatcaaggtattcgaagggcagaccaacatcgaaacttcaggtctaccaaagaaaccggagatcacgccaaggtctctccctccgaagcccactgtttcctcaggtaaaccctctgtggcccccaagcctgccgcgaaccgggcatctggggagtgggattctggaacagagaacaggctcaaagttactagcaaggagggcctgacaccctaccctccactgcaggaggccggcagcatccctgtgaccaagccggagctccccaaaaagcccaacccaggtctgataagatcagttaatcccgagattccaggtagggggccacttgccgaaagctccgactccgggaagaaagtgcctactcccgcacccagacctctgctcctcaaaaaatcggtgagctccgaaaatcccacatatccctctgccccgctgaagcctgtcacagttcctccccgcctggccggcgcctcccaggcaaaggcttacaagtccctcggcgaaggccccccggccaacccaccagtgccagtcctccagtcaaaaccgctcgtggacattgatttgatttcattcgatgatgatgttctcccaacccccagtggaaatctcgctgaggagtccgtggggagcgagatggttctggaccctttccagctgccagccaagactgagcctattaaggaacgggctgttcagccagctccaacgcgcaagccaaccgtcattagaattcctgcgaaaccaggaaaatgcttgcatgaagacccccagagtcccccgcctcttccggccgagaaacctatcggaaatacattttcgactgtcagcggtaagctgtctaacgtcgaacggacacgcaacctggaatctaatcacccgggtcagaccggcggctttgtccgcgtccccccccgcttacccccaagacccgtcaacggcaagacgatccctacccaacaacccccaactaaggtaccaccggaaagacccccccctcccaagctcagtgccacccggcgctctaacaaaaaattaccattcaaccggagcagttcggacatggacttgcagaagaagcagtccaacctggcgactggactgtctaaggccaaatctcaagtttttaagaatcaagatcctgtactgcccccgagacccaagcccggtcatcctctttattccaagtatatgttgtctgtgccccatggtattgcgaatgaggatatagtatctcagaacccgggtgaactgagctgtaagcgaggggatgttctggtcatgctgaagcaaactgaaaataattatctcgagtgccagaaaggtgaggacactgggagagttcacctgagtcagatgaagattatcacaccactagacgaacatctgaggagccgccctaacgaccccagtcatgctcagaagccagtggattctggagccccgcatgctgtggtacttcacgactttccagctgagcaggtggacgacctcaatttaaccagcggcgaaattgtatacctcctcgaaaagattgacaccgactggtacaggggcaactgtcggaaccagataggtattttccccgcaaattacgtgaaggtgatcatcgatattcccgaaggtggaaatgggaaacgcgagtgtgtgtcctcgcactgtgtgaaaggatcacgttgcgtcgcacgcttcgaatatatcggagaacaaaaggacgaactgtctttcagtgagggtgagatcataattctgaaggagtacgtgaacgaggagtgggctcgaggcgaagtgcgggggcgaactggtatattccccctgaactttgtagagccagtcgaagactatcccacttcaggcgccaacgttctgagtaccaaagtgcctctgaagaccaaaaaggaagatagcggctccaatagccaagtcaactccctacccgccgaatggtgcgaggcactgcatagcttcactgctgagacctcagatgatctgtcttttaagcggggggaccggatacaaatactcgagcgcctcgacagcgactggtgtagaggacgcctgcaggacagggagggcatctttcccgcagtgtttgtcaggccatgcccggccgaagccaaaagcatgctcgccattgtgccaaaaggcagaaaagctaaagctctgtacgactttagaggggagaacgaggatgagctctcctttaaagctggagatatcattactgagctggagtccgttgacgatgattggatgtccggcgagctgatgggcaagtctgggatttttcctaagaactacatacaatttctgcagatctcttag

SEQ ID NO: 134165 - DNA, 2373 bp, synthetic construct
  misc_feature 1..2373: note = Description of Artificial Sequence: Synthetic coding sequence
  source 1..2373: mol_type = other DNA
atgaatataatgaataccgagcagagccagaactcaattgtgagccggataaaggtcttcgagggtcagacgaacatcgagacttccggccttcctaagaagccagaaatcactcctaggtccctgccacccaagcccaccgtgagctctggaaaaccgagcgtggcacccaaaccggcagcaaaccgagcatccggggaatgggattccggaaccgaaaacaggctgaaagttacatctaaggagggtctaaccccctacccacccctgcaggaggcgggcagtatacctgtgacaaaacctgagttgcccaagaaacctaatccgggcttaatacgtagtgtcaatccagagataccaggacggggacccctagctgagtcatccgattccggaaaaaaggtgcccacacccgccccacgaccgctgttattgaagaagtctgtttccagcgagaaccccacgtatccatccgcgcctctgaagcctgtgacagtccccccccggctggcaggcgcttcccaagccaaagcttacaaaagcctgggtgagggccctccagccaaccctcctgtgcccgtgctgcaatccaaacccttggtagacattgacctgatctcatttgacgatgatgttttaccgacaccatctgggaacctagctgaggagtctgtcggatcagagatggtgctggatcccttccagctgcccgccaagacagaacccattaaggaaagggcggtgcagcccgctccgacacgcaaacccaccgtgatcaggatccctgccaagcccggtaagtgcctgcatgaggaccctcagtcacccccaccactgcccgccgagaaaccaattggaaacacgttctcgacagtcagtggtaagctgagtaacgtcgagcgcacacgcaatctggagagtaatcacccaggacaaaccggaggtttcgtcagggttcctccacgcctgcctccacgcccggtcaacggaaaaactattcccactcagcagccacccaccaaggtgcctcctgaacggcctccacccccaaaactatcggcgacccggcggtctaataagaagttacctttcaataggagttcgtccgacatggatctccagaaaaagcagtcaaacctggccaccggcctgagcaaggccaagagccaggtgttcaagaatcaggaccctgtgcttccacctaggccaaaacccggccatcccttatatagcaaatacatgctgtccgttccacatggcattgctaacgaagacatcgtgtctcagaatcctggtgagttgagttgcaagcgaggcgacgtgctggtgatgttgaagcagacagagaataactacctcgaatgtcagaaaggagaggatacaggacgcgtgcatctgtcacagatgaagatcatcacaccactcgatgagcacttgcgcagcaggcctaatgatcctagccacgcccaaaagcctgtggatagcggagctcctcacgccgtagtgttacatgattttcccgctgagcaggtggatgatctcaacctcacaagtggggaaattgtttatctgctcgagaaaattgatactgactggtaccgcggcaactgcaggaaccagattggaatattccccgccaattacgtgaaggtgataattgatatccccgagggaggtaacggaaagagggagtgcgtgagcagtcattgcgtgaaaggttcgcggtgcgtggcgcgttttgagtacataggtgagcaaaaggatgagctttccttttcagaaggcgagatcatcatccttaaagagtacgtgaacgaggaatgggcccgcggagaggtgcggggcaggacaggcatctttccacttaacttcgtggagccagtcgaagactaccccacaagtggtgcaaacgtgctttccaccaaagtgcccctgaagactaaaaaagaagacagcggctccaactcacaggtcaattctctccccgcagagtggtgcgaagccctccactcatttaccgctgagacaagtgatgacttgtcctttaaaaggggcgaccgtatccaaatcctcgagaggcttgacagcgactggtgtaggggaaggctccaagatagggagggcatattcccagcagttttcgtacgcccatgtcccgcagaggcaaagtcgatgctcgccatcgttcccaaaggacgaaaggccaaagcattgtacgacttcaggggagaaaatgaggacgaactgtccttcaaggctggggacatcattacggagctagagagtgttgatgatgactggatgtctggggagctgatggggaagtcagggatttttcccaaaaattacatccagttcttgcagatcagttag

SEQ ID NO: 134166 - DNA, 2304 bp, synthetic construct
  misc_feature 1..2304: note = Description of Artificial Sequence: Synthetic coding sequence
  source 1..2304: mol_type = other DNA
atgaatatcatgaatactgaacagagccagaattctatagtgtctcgtatcaaggtgtttgagggacaaaccaatatcgaaacctcgggtctccccaaaaaaccagagatcaccccccgaagcctaccccctaagcccactgtctcctcaggaaagccgagcgtggctcccaagcctgccgccaacagggcatctggagaatgggactcaggaaccgagaatcggctaaaggtaacaagtaaggaaggtctcacaccctacccccccctccaggaagcgggaagtattccggtgaccaagcccgagctccctaagaagccaaacccaggcctcatccgtagtgtgaatcccgaaatacctggccgcgggccccttgctgaatccagtgattcaggcaagaaggtacccacgcctgctcccaggccattactccttaagaagtctgtaagctctgaaaaccctacatatcctagtgctccactgaagccagtgactgtgccacccaggctggctggagcaagccaggccaaagcatacaaaagcctaggtgaaggaccacccgccaatcctcccgtacctgtgctgcagtccaaacccctcgttgacatcgatctcattagtttcgatgacgacgtcctccccacgccttcaggaaatttagcagaggaatccgtggggtctgagatggttctggatccttttcaactgcctgctaagaccgagccaatcaaggagagagctgtccagccagcccccacccgcaagcctacagtgattcgcatacctgctaagccaggcaaatgtctgcacgaggacccccagtcccctccccctctgccagcagaaaaacccattggaaacacgttctcaacggtttcgggcaagctcagtaacgtggagcgtacccggaacctcgaatccaaccaccccggccagacagggggctttgtgagggtcccccccaggttgcctccaagacctgtgaacggtaagacgataccgacccaacagcctcccaccaaggtcccccccgagaggccaccgccgcctaaactttctgcaaccaggcggagcaacaaaaagctgccttttaacaggtctagctctgatatggacctgcaaaaaaaacaatctaatctggctactggactctctaaagctaaatcccaggtgttcaagaatcaggatccagtactccccccacggcctaagccaggccatccattgtacagcaaatacatgcgaggtgatgtgctggtgatgttgaaacagaccgagaataactacctggagtgtcagaagggagaggataccgggcgtgtccacctttctcagatgaaaatcatcactcctttggatgaacacttgagaagcaggcctaatgacccatcccatgcccagaaacccgtggatagtggggctccccacgccgtcgtgctgcacgactttcccgccgagcaggttgacgatctgaatctgacgagcggcgaaattgtgtacctcctggaaaaaatagataccgattggtaccgaggcaattgcaggaaccagattggcatcttcccagctaactacgttaaagtgattattgatattcctgagggcggcaatggcaagcgtgaatgcgtctcttctcactgtgtcaaaggatcacgatgcgtggcccggtttgagtatataggggaacagaaggacgagctctcatttagcgaaggcgaaatcatcattctgaaagaatacgtgaacgaggaatgggcccggggcgaagtgaggggtagaacggggattttccctctgaacttcgtggagccagtcgaggactaccctacctctggagctaacgtactgtcaacaaaggtccctttgaaaaccaagaaagaagactctggatcaaactcacaagtcaactctctgcccgcggaatggtgtgaagctctacactcgttcaccgctgaaacaagtgatgacttatcattcaaaaggggcgatcggatccagatactggagcgcctagattcggactggtgtcgaggaagactccaggaccgggaaggaatatttccagctgtgtttgtaaggccctgtccagccgaggccaagtcaatgctcgccatagtgcccaaaggacgaaaggccaaggctctatacgattttcgaggggagaatgaagatgaactgtctttcaaagcaggtgatattattaccgagctggagtccgtcgatgacgattggatgtcaggggaactcatgggcaagtccgggatctttccaaagaattacatacagttcctgcagatttcatag

SEQ ID NO: 134167 - DNA, 2196 bp, synthetic construct
  misc_feature 1..2196: note = Description of Artificial Sequence: Synthetic coding sequence
  source 1..2196: mol_type = other DNA
atgaacataatgaacactgaacagagccagaactcgattgtatctcgaattaaggtgttcgaggggcaaaccaatatagagacctccggattgcctaagaagcctgaaatcaccccacggtccctgcctcctaagccaaccgtgagcagcgggaagccctctgtggccccgaaacctgcagcgaacagagcttcaggtgaatgggactcaggaaccgaaaataggttgaaggttaccagcaaggaagggttaaccccttacccgcctctccaggaggcaggttctatcccagtgaccaaacctgagcttccaaaaaaaccaaatcctggcctgatccgcagcgttaacccggagatccctgggcggggaccactggcagaatcctctgatagtggcaagaaagttcctactcccgccccccggccattgcttttgaaaaagagtgtgtcgagcgagaaccccacttacccgagcgctccactgaaaccagttaccgtgccccccaggcttgccggcgcttctcaagccaaggcttacaagagcctcggggagggacccccagcgaatccgccggtaccagttctccagtccaagcctctcgtagatatcgacctcattagctttgatgacgacgttctgcccactccatcaggcaatctggctgaagaatccgtgggctccgagatggttctgggtctgcacgaggaccctcaaagtccccccccactccccgccgagaagcccattgggaatactttctctacagtatcagggaaactgtctaatgtggagaggaccagaaatcttgaatcaaatcatcccggccaaacaggcgggttcgtgagggtgccgccacggctccccccaaggcccgtgaacggcaagaccatcccgactcagcaacctccaaccaaggtgccccccgaaagaccaccgcctcctaaactgagcgccacgcgtcgatctaacaaaaagctcccgtttaatcgctcctcaagtgacatggatctgcaaaaaaagcagtcaaatctagccacggggttgtcaaaagccaagagtcaggtgttcaaaaaccaggatccggtgcttcctcctagacctaaacctggccacccattgtactctaaatatatgaggggggatgtgctggtgatgctgaagcaaacggagaacaactacctggagtgccagaaaggagaggacacggggagggtccacctgtcccagatgaaaataatcacgcctctcgatgaacacctccgctcccggcctaatgatccctctcatgctcagaagccagttgactccggggcacctcatgccgtcgtgctgcacgacttcccagctgagcaagtcgatgatctgaaccttaccagcggcgagatcgtgtatctccttgagaaaatcgatactgattggtacagaggcaactgtcggaaccagattggcatatttccagccaactatgtcaaggtgatcatcgatatacctgaaggcggtaacggcaagcgggaatgtgtgtccagccactgcgtgaaaggatctcgctgtgtggcaaggtttgagtacatcggcgaacagaaggatgagctctcattttctgaaggagagattattattctcaaggagtacgtgaacgaggagtgggccaggggagaggtaaggggccggaccggtatctttcctctgaatttcgtggaaccagtagaggattaccccacctctggcgcaaatgtgctctctactaaggtcccacttaaaacgaagaaagaggacagtgggtccaattctcaggtgaacagtctgcctgcggagtggtgcgaagccttgcattctttcacagccgagacatcggatgacctgtcctttaaacgcggagatcgaatccaaattttagagaggttggacagtgactggtgtcgcggccggcttcaggatcgcgagggaatattccccgcggtgtttgtccgaccctgtcccgccgaggctaaatcaatgcttgctatcgtgcctaagggtaggaaggctaaggctttgtacgatttcagaggagagaatgaggacgagttatcattcaaagcgggtgacattatcactgagctggagagtgttgatgacgactggatgagtggcgagctcatggggaaaagcgggatcttccctaaaaactacatacagttccttcagatctcatag

SEQ ID NO: 134168 - DNA, 2196 bp, synthetic construct
  misc_feature 1..2196: note = Description of Artificial Sequence: Synthetic coding sequence
  source 1..2196: mol_type = other DNA
atgaacataatgaacactgaacagtctcagaactccatcgtgtcacgaatcaaggtttttgaaggacagactaacatagaaacctccggcctgcctaaaaaacctgagataactccgcgatctttgccgcctaagcctacagtaagctccgggaagccttctgtggccccaaagcccgctgcaaaccgggcttccggcgagtgggacagcggcactgaaaatcgattgaaggtaacttctaaggaaggattgaccccttatcccccattgcaagaagccggctctattcccgtaactaaaccggaattaccgaaaaagcccaaccccggactgatccgctctgtcaacccagagatccctggcaggggaccactggctgaatcaagtgatagtggaaagaaagtgcccaccccggctccgagaccgttgctcttgaaaaagtcagtttcaagcgaaaaccccacgtatccaagcgcccccctgaagcccgtgacggttcctcctcgcttagctggggcttctcaggcaaaagcttacaaatcactaggagaaggtcctcccgctaacccacccgtacccgtcctccagagcaagccactcgtagacatcgatctcatttcattcgacgatgatgtgttgccaactcctagcggaaacctcgctgaagagagtgttggttctgagatggtactgggactccacgaagacccccagtctccaccaccgctgccagcagagaagccaattgggaacactttcagtacggtgtccggcaaactcagtaacgtggaacggacccgcaatctggagagcaaccacccaggccagacgggcggttttgtccgggtgcccccccgtcttccacccagacctgtgaatggtaagaccattcctacccaacagccccccaccaaagtgcccccagaacggcccccaccccctaaattgagtgccacacggagaagcaacaagaaactgccattcaatcggagctccagtgacatggatctgcagaaaaagcaaagcaacctagccaccggcctgtccaaggcaaagagtcaagtgtttaagaatcaggacccggttttgcctcctagacccaagcctgggcacccactctacagcaaatacatgcgtggcgatgtactagtgatgcttaagcaaacagagaacaactatctggagtgccaaaagggcgaggacactggtcgtgtccacctatcacaaatgaagattattactccgctggatgaacatttacgctctagacccaatgacccctctcacgctcaaaagcccgttgattccggcgcacctcacgccgtggtgctccacgactttcctgcagagcaggttgacgacctcaatctcactagtggcgagatcgtgtacctcctggagaagattgacacagattggtatcgtggtaactgtcgcaaccagatcgggatctttcccgccaactacgttaaggtgatcatcgacatccctgagggcggtaatgggaagcgggagtgtgtgagctctcattgtgtaaagggcagccggtgtgtggccaggttcgagtacattggagaacagaaagatgagctgtccttcagtgagggcgagattatcattctgaaagagtatgttaacgaggaatgggcccgaggtgaggtcagaggaaggaccggaatttttccgctcaactttgtggagcccgtcgaggactaccctacctctggagctaatgtgttgtctacgaaagtgccactgaaaactaagaaagaagattccgggagtaatagccaggtgaacagcttgccagccgaatggtgcgaggcactgcattcattcacggccgagacatccgacgatctgagcttcaagcgcggtgaccgcatacagattctggagaggctggatagtgactggtgtaggggcagactgcaagatcgcgaggggatctttcccgcggtgtttgttcgaccctgccccgccgaagccaaaagcatgttagccatagtccctaaaggccggaaggcaaaggccttgtatgactttcggggagagaacgaggacgaactgtccttcaaggctggggacattatcacggaacttgaatccgtcgacgacgactggatgtctggcgagctgatgggaaaaagcgggattttccccaagaactatatccagttcctccaaatctcgtag

SEQ ID NO: 134169 - DNA, 2304 bp, synthetic construct
  misc_feature 1..2304: note = Description of Artificial Sequence: Synthetic coding sequence
  source 1..2304: mol_type = other DNA
atgaatattatgaacaccgagcaatcccagaactccatcgtgtccaggataaaagtgtttgagggacagaccaatatcgaaactagcgggttgcccaagaagccagagatcactccccgctccctgcctccaaagccaacagtcagctctgggaagcccagcgtggcgccaaaaccggcagccaaccgggcctcaggggaatgggactccggcacagagaaccgtctcaaggtgacttctaaggaaggtctcacgccttaccctcccctgcaggaagctggatcaatccctgtcaccaaacccgagctgccgaagaagcctaaccctggactcatcaggagtgtgaaccccgagatccccgggagaggtcctttagccgagagtagcgatagtggaaagaaagtacctacacctgcccctagacccctgctgctgaagaaaagcgtaagcagcgagaatcctacgtatccatctgcgcccttaaagccagtgacggttccacccagattggccggtgcgagccaagccaaggcctataagtctctgggtgaaggccctccagcaaacccccctgtaccagtcctccagtctaaacccctcgtggatatcgacctcattagtttcgacgatgacgtgttgcccacaccatccgggaacctggctgaggagtccgtggggtcagagatggtgcttgatccgtttcaactcccagccaagactgagcctattaaagaaagagctgtgcagcccgcgcccacccgaaaaccgacggtcatccgcatccccgccaaaccagggaagtgcctgcacgaagacccccagagcccaccacctttgcctgctgagaaaccaatcgggaatacattctcaaccgtctcaggcaaactgtccaatgtggagcggacgcgcaacttggagtctaatcaccccgggcagacgggagggtttgtgagagtgccacctaggctgccaccaagacctgttaatggcaaaaccattcctacccagcaaccccctaccaaggtccctccggaaagacctccacctccgaagctgtccgccacccggcggtctaataagaagctgcctttcaatagaagttccagcgacatggatctgcagaagaaacaaagcaacctggccacaggtctcagtaaggctaaatcgcaggtgtttaaaaatcaggaccccgtgctgccccctcgccccaaaccagggcacccattatacagtaaatatatgaggggcgatgtgctcgttatgctgaagcaaactgaaaacaactacctggaatgtcagaagggggaagacaccggacgggtgcatctgtcgcagatgaagatcattacacctctggacgagcatttgaggtctaggcccaatgacccatctcacgcccagaaacctgtggattccggagctccgcacgcggtggtgttgcacgacttcccggctgagcaagttgacgatcttaacctgacctcaggagaaatagtctatctgctggagaagatcgatacggactggtacagagggaattgtaggaatcagatcgggatatttcccgccaattacgtgaaggtcattatcgacattccagaaggcgggaatggcaaacgggagtgcgtgtcttcacattgcgtgaaaggttctcgctgtgtcgcgcgattcgagtacatcggggaacagaaggatgagctgtctttttcagaaggggagatcataatcttgaaggagtatgtgaatgaggagtgggcgcgcggcgaagtgcggggccggacaggcattttcccattgaatttcgtggaaccagtggaggattaccccacctccggagcgaacgtcttatccactaaagtgccattaaaaactaagaaggaagactctggcagtaattcccaagtgaacagtcttccggccgagtggtgcgaggccctgcactcgttcacggccgaaacatccgacgatctttccttcaagaggggtgacagaatacaaatcctggagcgactggactctgactggtgccgaggcaggcttcaagatcgcgaaggcatcttcccagccgttttcgtacggccctgtccagcagaagcgaagtctatgctagctatcgtgccaaagggccgaaaagcaaaagccttatatgactttcggggggaaaacgaagacgaactgtcattcaaggccggcgacatcatcacagagttggagtcagtagatgatgactggatgtccggggagttaatgggaaagagtggaatatttccaaagaactacattcaattccttcagataagctag

SEQ ID NO: 134170 - DNA, 2304 bp, synthetic construct
  misc_feature 1..2304: note = Description of Artificial Sequence: Synthetic coding sequence
  source 1..2304: mol_type = other DNA
atgaatatcatgaataccgaacagtcacagaactctattgtatctcggatcaaggtgttcgagggccagactaacatcgagaccagtggacttcccaagaagcctgagatcactcctaggagtttgccaccaaagccaacagtttccagtgggaagccatccgtggcccctaaacctgctgcaaaccgcgctagtggcgaatgggattcggggaccgagaatcgtttgaaggttaccagcaaagagggcctcacaccctaccctccactgcaggaggctgggtcgattcccgtcaccaagccggagttgcccaaaaagcccaatccaggactcatcagatctgtgaaccccgagatccctggaagaggacctctcgctgaaagttccgatagtgggaaaaaggtgcccactcctgcgcctcgccccctgctgctaaaaaaatcagtttccagcgaaaatcctacgtatccgtcggcaccgttaaaaccagtgacggtcccaccacggctcgccggggccagccaggccaaagcatataagtcacttggagagggaccgccggcaaatcccccagtcccagttctgcagtctaagcctctcgtagacattgacctgattagcttcgatgatgacgtactgcctacaccatccggcaacttagccgaggagtctgtaggttcagagatggttctggatccttttcagctgcccgccaaaactgagcctatcaaagagagagcggtacaacccgcaccaacgagaaagcctaccgtgatccgaattcccgccaagcccggtaaatgcctgcatgaagatcctcaatcgcccccacctctccccgctgagaaacctatcgggaataccttctcaaccgtgtcaggcaaactatccaacgttgaacgcaccagaaacctggaatcaaaccatccagggcagacagggggcttcgtacgtgtcccccctaggctgcctccaaggcctgtgaacggcaagactattccgacacagcagccaccaacaaaagtcccacccgaaagacccccacccccaaaactctcggccacacggcggagcaacaagaagctgccattcaaccgctcctcctcagacatggacctccagaaaaaacaatccaatctggcgacggggctctctaaagccaagtctcaggtgttcaagaatcaagatccagtcctccctccgcgtccaaagcctggacacccgctgtacagcaaatacatgcgcggcgatgtgcttgtgatgctcaagcagactgaaaacaactacttggagtgccaaaagggagaggataccgggcgcgtccatcttagtcagatgaagataattacaccactcgatgaacatctgaggagcagacctaatgatccgtcccatgcccagaaacccgtcgactcaggcgccccacatgctgtcgtgttacacgatttccccgctgaacaggtggatgatctgaatctgacttcgggggaaattgtgtacctcctggagaaaatcgacaccgattggtatcgcggtaactgtcgtaaccaaatcggtatattcccagcaaactacgtaaaggttatcatagatattccagaaggtgggaatggcaaaagggagtgcgtttcctctcattgcgtaaagggctcacggtgtgtcgcacgctttgagtacattggagagcaaaaggacgaactatctttttccgagggggagatcattattttgaaggagtacgtgaacgaggagtgggctcgtggcgaggtacgaggccgaacaggaatctttcccctcaacttcgtcgaaccggtcgaggattaccctacctcaggcgctaatgtgctatctaccaaagtgcctctgaagacaaaaaaggaggacagtgggagtaattctcaagttaactccctacctgcagaatggtgtgaagctttgcactcgttcacagccgaaaccagcgacgacctttcattcaagaggggagacagaattcagatcctcgagcgcttggacagcgattggtgccgcggtcggctgcaggaccgggaggggatttttcctgctgtgttcgttagaccatgtccggctgaagctaagtctatgctagccattgtgcccaaaggacggaaagccaaggcactgtatgactttcgtggtgaaaatgaagacgaactctcgtttaaggccggggatatcatcacagagctggaatctgtggatgacgattggatgtcaggcgagttgatgggcaagagtgggatctttcctaagaactacatccagttcctgcagatcagttag

SEQ ID NO: 134171 - DNA, 2190 bp, synthetic construct
  misc_feature 1..2190: note = Description of Artificial Sequence: Synthetic coding sequence
  source 1..2190: mol_type = other DNA
atggatgacctgactctcctggatctgctggaatgcccagtttgtttcgaaaagctggatgtaaccgccaaggtactgccgtgccaacataccttctgtaagccttgcttgcagcgcgttttcaaagctcataaagagctcagatgcccagagtgtcgaacacccgttttctctaacatagaggcgctgcccgccaacctcctgctggtgaggttgttggacggcgtgcggagcggccagtcatctggacggggcggttcctttcgaaggccaggaactatgacactgcaggatggcagaaaatccagaactaaccctagacggcttcaggcctcaccgtttcgactggttcccaatgtacgcattcatatggacggagtccccagggcgaaggctctctgtaattaccgcggacagaatcccggcgacctccgctttaacaaaggagacatcatcttgctgagacgacagcttgatgagaattggtatcagggggagattaatggcataagcggcaattttcccgcctcgtccgtggaggtcattaaacagctgcctcagcctccaccactgtgccgggccttgtataacttcgacttgcggggtaaggacaagtctgagaaccaggattgtctgaccttccttaaggacgatattataaccgtcatcagccgcgtcgacgagaattgggcggaggggaagctcggcgataaggtgggcatttttcccatcctgttcgttgagcccaacctgacagcacgacacttgctggagaaaaacaaagggcggcagtcttcccggactaagaacctctctctggtgtcttctagtagcaggggcaacacatctacactgcggagaggccctggttctagacgaaaagtgcccgggcagttcagcatcaccaccgccctgaacactctaaacagaatggtgcattctccttccggccgacacatggtagaaataagtacacccgtcctcatcagcagcagcaatccatcagtgattactcagccaatggaaaaggcagatgttccctcctcatgcgtgggacaggttagcacttatcaccccgcacctgtgagtcccggccactctactgccgtggtgagccttcccggatcccagcaacatctgagtgccaatatgttcgtggcactccactcctacagtgcccacggacctgacgagctcgatctacaaaagggggagggcgtccgagtcttaggcaaatgtcaggacggttggctgcgtggggttagcttggtgacaggcagggtcggcatttttcccaacaactacgtgatccccatattccggaagaccagtagttttccggatagccgatctcccggtctgtataccacttggaccctgagcacctccagtgtctcctcacagggatcaatatctgagggagatccccgccaaagcaggcccttcaagagcgtgttcgtcccaactgcaattgtcaacccggtgagaagtaccgcagggccaggcactttaggacaaggtagcttgaggaaagggcgatccagtatgcgcaaaaacgggagcttgcagcgccccttgcagtccgggattcctactttagtggtgggctcgctgcggcggtcccccaccatggtcctacgcccacagcagttccaattttaccaaccccaggggattccctcctctcccagcgccgtggttgtagaaatgggttcaaagcccgcattgacaggcgagccagccctgacttgtatctcaaggggatctgaagcctggatccattctgccgctagttctctaatcatggaggacaaggagatcccgattaagtctgagcccctgcccaagccacccgcgagtgcacccccatcgattcttgttaagccagaaaatagcagaaatggaatagaaaagcaggtgaaaactgtgaggtttcagaactacagcccgccccccacaaagcactataccagtcatccaactagcggaaaacccgaacagccagctacgcttaaagcatctcagccagaggccgcaagcttgggccccgagatgaccgtcctgtttgcccaccgttcggggtgccacagcgggcagcaaaccgatctgcggaggaagtccgcactggggaaggccacgaccctggtgtccaccgcgtccggtacacagactgtctttccatccaagtag

SEQ ID NO: 134172 - DNA, 2190 bp, synthetic construct
  misc_feature 1..2190: note = Description of Artificial Sequence: Synthetic coding sequence
  source 1..2190: mol_type = other DNA
atggacgacctgacactcctggacttgctggagtgccctgtgtgttttgagaagctagatgtgaccgccaaagttcttccttgccaacacaccttttgtaaaccgtgcctgcagcgcgtctttaaggcacacaaggaactgcgatgccccgaatgccggacacctgttttctccaacatcgaggccctgccagctaatctcttactggtgcgccttctggatggcgtcagaagtgggcagtcgtctggccgagggggcagctttcgaagacccggcaccatgacactgcaagacggacggaagagccgcaccaatccccggaggttgcaggctagtccgttccgtctcgtgcctaacgttagaatccacatggacggagttccacgtgcaaaggccctgtgtaattatcgggggcagaatcctggtgacttgagatttaacaaaggagatatcattctacttcggcgtcaactggatgagaattggtatcagggcgaaatcaatggaatttccggaaacttcccggcatcctccgtcgaagtcattaagcagttgccgcagcctcctcccttgtgccgggccctatacaattttgatctcagaggtaaggataaatcagagaatcaggactgcctgacattcctcaaggacgatatcatcaccgtgatatccagagttgacgaaaactgggcagaggggaaactgggggacaaagtgggcatatttcctatactctttgtggaacctaatctgacggcaagacatctcttggaaaagaacaaggggaggcaatcatccaggaccaagaacttgagcctggtcagcagctcatctagggggaacacatccactctgcgaaggggacctggttctagacgcaaagtccccggacaattctctattaccaccgctctgaacacactgaaccggatggtgcattcacccagcgggcgccatatggtggagatcagtaccccggtcctcatcagtagttccaatccatctgtgattacccagcccatggagaaggcggacgtgccaagctcttgcgtggggcaggtttctacctaccacccagccccagtgtcacccggacactctacggccgtggtgagcctgcccgggtcccagcagcacttgtctgccaacatgtttgtcgcgttacacagctatagtgcacatggccccgacgaactagatttgcagaaaggtgaaggcgtacgcgtcttgggaaagtgccaggatggatggctgaggggagtcagcctggtgacagggcgcgtcgggatttttcccaacaattatgtcatacccatttttaggaaaacgtcctcatttcctgattcacgttctccaggactgtacactacttggacactttcaacaagttctgtttcctcccagggctctatcagcgagggggacccacgccaatccaggccctttaaatctgtgtttgttccaacagccattgttaatccagtccgatccaccgccggacctggcactcttgggcagggatccttacgtaaaggccggtccagtatgcgtaagaacggctctctgcagcgccctctacagtccggcataccaacattggtggttggttcacttcgacggtcaccgacaatggtgctgcggccccagcagttccagttctaccagccacaaggcatcccctcatcaccatctgctgtggttgtggagatgggatccaaacctgctcttacgggcgagcctgcactgacttgcatcagccgcggttctgaggcttggatccactctgccgctagcagcctcatcatggaggacaaggaaattccgataaaatccgagcctctgcccaaaccaccggcttcagcccccccaagtatccttgtgaagcctgaaaactcacgcaatggcatcgaaaagcaggttaaaaccgtcaggtttcagaactactctcctccccccacaaagcattacacctcccaccctaccagtgggaagcccgagcaaccggctaccttgaaggcaagtcagccagaggcagcgtctttgggcccggagatgacggtattgttcgcacatcggtccggctgccactctggacagcagactgaccttagacgcaagagtgctctgggcaaggccaccacactcgtgtccacggcttccggcacccagactgttttcccttctaaatag

SEQ ID NO: 134173 - DNA, 387 bp, synthetic construct
  misc_feature 1..387: note = Description of Artificial Sequence: Synthetic coding sequence
  source 1..387: mol_type = other DNA
atggaggataaggaaattcctattaaaagcgaacccctccccaagccccctgcgtccgctccaccgtccatactggtcaagcccgagaattcgcgaaatggaattgagaaacaggttaaaaccgtcaggtttcaaaattacagtcccccacccaccaaacattatacgtcgcaccctacttcagggaagcccgagcagccagccacacttaaagcgtcccagcctgaggccgcatctcttggtcccgagatgacggttctgtttgcccacagatctggttgtcattccggccagcaaactgaccttagaagaaagtctgccctggggaaagccactacgctggtgtcgactgcgtctgggactcagactgtgttcccaagtaaatag

SEQ ID NO: 134174 - DNA, 1686 bp, synthetic construct
  misc_feature 1..1686: note = Description of Artificial Sequence: Synthetic coding sequence
  source 1..1686: mol_type = other DNA
atggccgctgaggagatgcactggccagttcctatgaaggcgattggggcacaaaatctcctgaccatgcccgggggggtggccaaggccgggtacctgcataaaaagggcggaacgcaattgcaattgttaaagtggcccttacgctttgtgatcatccataagcggtgtgtttactacttcaagtcctccacctcagcttctcctcaaggcgccttttcccttagcggatataaccgtgtgatgcgagccgctgaagagacaaccagtaacaatgtattcccctttaagattattcacatcagcaagaaacatcggacttggttcttctcagcttcctccgaagaagaaaggaaaagctggatggcactactgcgacgggagattggccactttcatgaaaaaaaggatctccccctggatacctccgacagctcttcagacacagattccttttacggagccgtggagaggccagtggacatctctctgtctccttaccccactgataatgaagactacgaacacgacgatgaggatgactcttatctggagcctgatagccctgagccaggccgcctggaagatgctttaatgcacccgccggcatatccaccgccccccgtgcctacccctcgcaaacctgcctttagcgatatgccgcgtgctcattcattcacttcaaagggcccgggcccgctgctgccacctcctcctccaaagcacggcctgcctgacgtgggcctggctgcggaagattcaaagagagaccctctctgtcctcgccgggcggagccatgtccaagggtcccagccaccccccgccgcatgagcgaccctcccttgtcaactatgccaacagcaccagggcttagaaaacctccctgcttccgcgaaagcgcgagtccttcaccagagccatggacccctggccatggcgcttgttccacctctagtgccgccattatggccaccgccacctcccgcaattgcgataagctgaagagctttcacctctccccacgaggaccgcctaccagtgaacctcctcctgtcccggccaataagcccaagttcctgaagatcgcggaagaggacccacctcgcgaagccgctatgccgggcctgttcgttccacctgtggcacctagacctcccgcgcttaagctccctgtgcctgaggccatggcccggccagccgtgttgccaaggccagagaagccccagctgccgcatctccagcgaagtcctcctgatggtcagagttttcgctcttttagtttcgagaagccccgccagccctcccaggctgatactggcggggatgattcagacgaagattacgaaaaggttccccttccaaattcagtttttgtcaacaccacggagtcctgtgaagtcgagagactcttcaaggcgacatccccccgcggagagccacaggacggactgtactgtattagaaactcctcaacaaagtccgggaaggtcctagtggtgtgggatgagaccagcaataaggtaagaaactatagaatttttgagaaggattctaagttttatcttgaaggggaggtgctgttcgtatcagtcggctcaatggttgagcactatcacacacacgtactgccgtctcatcagagtctgcttctgaggcatccctacggatatacagggccccgatag

SEQ ID NO: 134175 - DNA, 294 bp, synthetic construct
  misc_feature 1..294: note = Description of Artificial Sequence: Synthetic coding sequence
  source 1..294: mol_type = other DNA
atggcagccgaggagatgcattggcctgtgccaatgaaagccatcggggctcaaaatctactaaccatgccagggggcgttgcaaaggcagggtacctacataaaaaaggcggaacccagttacaactactgaagtggccgcttaggttcgtgatcatccataagagatgcgtctactacttcaagtcgtcgacgagcgcatccccccagggcgctttctctttgagtgggtacaatcgccagccgcggccccagccagcccaggccctttcccagacagaagcaggaccatag

SEQ ID NO: 134176 - DNA, 1686 bp, synthetic construct
  misc_feature 1..1686: note = Description of Artificial Sequence: Synthetic coding sequence
  source 1..1686: mol_type = other DNA
atggcggcggaggaaatgcattggcccgtgcccatgaaagctattggtgcccagaacctgttaaccatgcctggtggagtggcaaaggccgggtacttgcataaaaaagggggtacccaactgcagcttctaaaatggcctttgcgctttgtgataatccataaacgctgtgtgtattattttaagagcagcactagtgcttctcctcagggtgctttctccctgtcaggctacaaccgtgtgatgcgggccgctgaagagactacctccaacaacgtcttccccttcaaaataattcatatatctaaaaaacataggacatggttttttagcgcttcaagcgaagaagagcgtaagtcttggatggcccttttaagaagagagattggtcacttccatgaaaaaaaggatttgcctctcgacacctctgacagttcatctgacacggactccttttacggagcagtcgaaaggccggtggacatctctctctcaccataccccacagacaatgaggattatgaacacgacgatgaggacgactcttacctggaacctgactcccccgaaccaggccgtctcgaagatgcactgatgcatccccccgcctatccgcccccacccgtgccaacccctaggaaacccgccttcagtgacatgcctcgggcacatagcttcacttcaaagggccctgggcctcttctgcctccaccgccccctaagcatggcctaccggatgtgggattagctgcggaggactccaagcgtgacccactctgtccgcggcgtgcggagccgtgtccccgggtgccggcaacaccaaggagaatgagcgaccctcctctttcaacgatgcctacagcacccgggttacgcaagcctccctgctttagggaatccgccagccctagtcccgagccatggaccccaggccacggcgcttgcagcacgagctcagccgctataatggccaccgccacatccagaaattgtgacaagctgaaatcgttccacctgtctcctaggggcccgcccaccagcgaaccaccccctgtgccggccaataaacctaagtttttgaagatcgctgaagaagacccgcctagggaggcggcgatgcccggattattcgtgcctcccgttgcaccgagaccccccgctctcaaattacctgtgcccgaggcaatggcccggccggccgtgctgccccggcccgagaagcctcagttaccacacctgcagagatcacctcccgacggccaatctttcaggagtttcagcttcgagaagccaaggcagccatcgcaagccgatacaggaggcgacgactccgacgaggattacgagaaagtgcctctccctaacagcgttttcgtgaatactacggagtcttgtgaggtcgaaagattatttaaggccacaagtccccggggagaaccccaggatggtctgtactgcatcaggaactcttccacgaagtctggcaaagtgctggtggtttgggacgagacatctaataaggttcggaattacagaattttcgagaaggatagcaagttctatcttgaaggcgaggtgttgtttgtgagcgtaggatcaatggttgaacactatcacacacacgttctgcccagccaccagtcactgctgcttcggcacccttatgggtacaccgggccacggtag

SEQ ID NO: 134177 - DNA, 1770 bp, synthetic construct
  misc_feature 1..1770: note = Description of Artificial Sequence: Synthetic coding sequence
  source 1..1770: mol_type = other DNA
atggcctctctcggtcctcgcacccctgccccgagcaggtctagaggacgccgtgctatgtgttgggttagtacaatatctttcatggctgctgaggagatgcactggccagtgcccatgaaggcaatcggcgctcagaacttattgacaatgcctggcggtgtggctaaggcagggtacctacacaaaaaaggcggaacacagttacagcttctgaagtggcctctccgcttcgtcatcatacataagcgatgcgtctattactttaagagctccacctctgcaagcccacaaggcgccttctctttgtctggatacaatcgcgttatgagagctgctgaggaaactacctctaacaatgtgttcccgttcaaaatcatccatatctccaagaagcacagaacttggttcttctctgctagctcagaagaagagaggaaatcgtggatggccctgcttcggagagaaataggccacttccacgaaaagaaggatctccccctggatacaagcgactcatcaagcgacactgattctttctatggcgccgtagaacgcccagtggacatctccctgtcaccctatccaacagacaacgaggactatgaacacgatgacgaggatgactcttatctcgaacccgatagtccagaaccaggccgccttgaggacgctctgatgcaccccccagcatatccacccccacccgtgcccacgccccggaagccagccttcagcgatatgccacgcgcacatagcttcacaagcaaaggccccggcccactcctgcctccacctccccctaaacacggattaccagatgtcgggctggctgccgaagattcgaagagagatccactgtgcccacgcagggccgaaccatgtccacgcgttcctgcgaccccgcggaggatgagcgaccccccactttctactatgcccacggccccagggttgcggaaacccccgtgtttcagagagagcgcttcgccctcacctgaaccttggacacctggtcacggcgcgtgtagcacctcatcagctgcgatcatggctaccgcgacttctaggaattgtgacaagctgaagtctttccacctgagccccagaggtccgcccaccagcgagccaccccccgtgccagcaaacaagcccaaatttctgaaaattgccgaggaagatcctcctagggaggctgctatgccaggtttgttcgtcccacctgtggcccctcggcctcctgccctcaagctgcctgtacccgaggcgatggctcgtccagctgtactaccgcggccagagaagccccagctgccccacctgcagcggagccctcccgacgggcagagtttcagatcattttcattcgaaaaacctcgccagccttcacaagcagacaccggcggcgacgactccgacgaggactacgaaaaggtgccactacccaactccgtatttgtcaacactactgagtcttgtgaggtggagaggctatttaaagctacttctccccggggcgaacctcaagacggactttattgcatacggaatagtagcaccaagtccgggaaggtcctagtggtttgggacgagacatcaaataaggttaggaattaccggatctttgagaaggactcgaagttctacctggaaggcgaggttctgtttgtcagtgtagggtccatggtggagcactatcacacacacgtgctccccagccaccagtccctgttgcttaggcacccctacgggtataccggtccccgctag

SEQ ID NO: 134178 - DNA, 1686 bp, synthetic construct
  misc_feature 1..1686: note = Description of Artificial Sequence: Synthetic coding sequence
  source 1..1686: mol_type = other DNA
atggctgctgaggagatgcattggccagtgccaatgaaagccataggggcccagaacttactcactatgccgggcggtgtggcaaaggccggctatctgcacaagaagggagggacgcagctccagctgctcaagtggcccctcagatttgttatcatccacaaaaggtgcgtttactatttcaagagtagcactagtgccagcccccagggggcatttagtttgagtggatataaccgggtaatgcgggccgccgaagagaccacctccaataatgtatttccgtttaagattatccacatctctaagaaacatcgtacctggttcttctctgcgtcaagcgaagaggaaagaaaatcctggatggccctgctcagacgggagatcggccactttcacgagaagaaagacctaccacttgacacctcagattcctcatccgacaccgattctttttatggagctgtggaaagacccgtggatataagtctatccccctatcccaccgacaacgaggattacgagcacgatgacgaagatgactcctacctagaacctgattcccctgaacccggcagactggaagacgctctgatgcacccccctgcttacccccctcctcctgtgcccacacccagaaagccggccttcagtgacatgcctcgtgcacactccttcaccagcaagggtccgggtccactgcttcccccccctccccccaagcacggactcccagacgtaggtttagccgctgaggactcaaagcgcgaccccctgtgtcctagaagggccgagccttgtcccagggttcccgctacacccagacggatgtccgatccaccgctgagcaccatgcccactgccccaggcctcagaaagccgccatgtttcagagagtccgcctctccatcacccgaaccatggactccggggcacggagcctgttcaacctcttccgcagcgataatggctactgcaaccagcagaaattgcgacaaactgaagtccttccacctgagcccacgtggaccccctacaagcgaaccccctcccgtgccagcaaacaagccaaagttcctgaagattgccgaagaggatcctcccagggaggcagccatgccaggcctgttcgtgcctcctgtggcaccccggcctcccgcgttgaagcttcctgttccagaggctatggccagaccggccgtcttgccgcggcccgagaaacctcagctgccacatctgcagaggtccccaccagacgggcagtcattccgcagtttcagtttcgagaaacctagacagccttctcaggcagacaccggaggggacgattcggacgaagattatgagaaagtgccactgcctaacagcgttttcgtcaatacaaccgaaagttgtgaagtggagaggctgtttaaggcgacgtcgcctaggggcgaacctcaggatggcctgtactgcatccgcaactctagtacaaagtccggaaaggtgttggtagtttgggacgaaacatccaacaaggtgcggaactacagaatattcgaaaaggatagcaagttttacttggagggggaggttctctttgtgtccgttggctctatggtcgagcattaccacactcatgtgttgccctcccaccagtcgctgcttctgcgccacccttatggatacactggtcctcgctag

SEQ ID NO: 134179 - DNA, 429 bp, synthetic construct
  misc_feature 1..429: note = Description of Artificial Sequence: Synthetic coding sequence
  source 1..429: mol_type = other DNA
atggccgcagaggagatgcactggccggtacctatgaaagctatcggagcccaaaacctcctaaccatgcctggtggggtcgccaaagccggctacctacacaaaaagggcggcacacagcttcaattattaaaatggcctctgagattcgtgatcatccacaagcgctgcgtctattacttcaaatcctcaaccagcgcttcccctcagggcgccttcagcctgagtggatataaccgggtcatgcgggcggccgaggagactacctccaacaatgtctttccctttaaaatcattcatatcagcaagaaacaccgtacatggtttttctctgcatctagcgaagaagagaggaagagctggatggccctgctaagacgagaaattggccactttcacgaaaagaaggatttacctctggatacctag

SEQ ID NO: 134180 - DNA, 429 bp, synthetic construct
  misc_feature 1..429: note = Description of Artificial Sequence: Synthetic coding sequence
  source 1..429: mol_type = other DNA
atggctgccgaggaaatgcactggccggtccccatgaaagccatcggggctcagaatttgttaacaatgcccggaggggtggcaaaagccggttacctgcataaaaaggggggtactcagctccagctgctcaaatggccactgagatttgtgatcatccacaagcgctgtgtgtattatttcaagagttcaacttcagctagtccacagggagcattctcactttctgggtataacagagtgatgcgggccgcggaagagaccacaagcaataatgtatttcctttcaaaatcattcatatctctaaaaagcaccgcacgtggttcttctccgcctcttccgaggaagagagaaagtcatggatggctctcctgaggcgagagattggacacttccacgaaaagaaagacctgcccctagacacctag

SEQ ID NO: 134181 - DNA, 1857 bp, synthetic construct
  misc_feature 1..1857: note = Description of Artificial Sequence: Synthetic coding sequence
  source 1..1857: mol_type = other DNA
atggcaggctctgggccaagaccaaggtcctggggaagaagggaggccggagcacgcgacgaggcagcggcagctggaggaagaggcccaggcccgtgccgatgcagccaggggcggcgggcatggatagcccccggtaaaccagctatgccggctgcatggacacctttcatggctgctgaagagatgcattggccagtccccatgaaggctatcggtgctcaaaatctgttaactatgccgggcggcgtggctaaggcgggttacctgcacaaaaagggcggcactcagcttcaattgctcaagtggccactcagattcgttatcatccataagaggtgtgtctattatttcaagagttctacatccgcatcaccccagggtgccttttctctttccggctataatagggtgatgagggcagccgaagagacaactagcaacaatgtttttcctttcaagataattcatatctcgaaaaaacacaggacgtggtttttttcagcgagctctgaggaagagagaaagtcttggatggctcttttgagaagagagatcgggcatttccatgagaaaaaggacctgcctctggacacgagcgactcctcctcagatactgactcattttatggagctgtggaacggcctgtggatattagcctgagcccgtaccccacggacaacgaggattatgagcacgacgacgaggacgacagctacctcgaacccgactctcctgaacctggccgactggaggacgccctgatgcaccccccagcttatccaccccctcccgtaccgactcccaggaaacccgcgttcagtgatatgcccagggcccactcatttacctctaaaggtcctggacctttgctgcccccccccccacctaagcatgggttgcccgacgtcggcttggctgccgaggatagcaaacgggatcctctctgtcctagacgggctgagccctgccctagggtacccgcaacacctaggagaatgagtgatccacccttaagcactatgcccaccgcccctggtttgcgaaaacctccttgtttccgcgagagtgcttcaccatcccctgagccatggacgcctggccacggcgcctgctccacctcttctgcagcgattatggctacggccacctcgagaaattgcgataagctgaaatcctttcacctgagtccccgcggtccacctacatccgagccaccacctgtgccggctaacaaacctaaattcctaaagatagccgaagaggaccccccgcgcgaggcggccatgcctgggctcttcgttccacccgtagcaccacgacccccagcactcaagctacccgtgccggaggccatggctcgacctgccgtcctgcctaggcccgaaaagcctcagctgccgcatttacagcgtagcccacctgacggccagtcattccgttcgtttagtttcgagaagccgcgccagccttcccaggccgacaccggaggcgacgactctgacgaggactacgagaaggtgcccctgcctaacagcgtgtttgtaaacactacggagtcatgtgaggtggagagactcttcaaagctacaagcccacgaggcgagccacaagatggcctttattgcatcaggaattcctctaccaagtcaggaaaagtgttggtggtgtgggacgagacatctaataaagttcgaaactatcggatctttgagaaggactccaaattctaccttgagggagaagtactcttcgtgtccgttggctctatggttgagcattaccatacacacgtgctgcctagccaccaaagcctcctgctaagacatccctacggttacaccggcccaagatag

SEQ ID NO: 134182 - DNA, 519 bp, synthetic construct
  misc_feature 1..519: note = Description of Artificial Sequence: Synthetic coding sequence
  source 1..519: mol_type = other DNA
atggctgccgaggagatgcactggccagtgcctatgaaggcaattggagctcagaatctgctgactatgccagggggagtcgctaaggcagggtatcttcacaagaaaggaggtacacagttgcaactgctgaaatggcctttgcgctttgtgatcatccacaaacgttgtgtgtattactttaagagctctacctccgcaagcccacagggtgctttcagcctatctggatacaatagggttatgagggcggccgaggagaccacttctaacaacgttttcccatttaagattatccacatcagcaaaaaacaccgaacatggttctttagtgccagttcagaggaagagcgcaagtcatggatggccttacttcgtcgtgagattgggcactttcatgaaaagaaggaccttcctctggacacaagtgactccagcagcgatacagatagcttctacggagctgtggaacggccagtggatatttccttaagtccctatcccactgacaacgagtag

SEQ ID NO: 134183 - DNA, 567 bp, synthetic construct
  misc_feature 1..567: note = Description of Artificial Sequence: Synthetic coding sequence
  source 1..567: mol_type = other DNA
atggcagctgaagaaatgcattggcctgtacccatgaaggccattggagcccagaatctgctcaccatgcccggcggagtcgctaaagcgggttacctacataaaaaggggggcacacagttgcagctgctgaaatggcccctcagattcgtgatcattcataaacggtgcgtgtactactttaagtcatcaacatccgcttccccacagggcgccttcagcctcagcggctacaatcgggtcatgcgagccgccgaagagacgacctcgaataatgtgttcccttttaaaattattcatatatcaaaaaaacacagaacatggttcttctctgcaagctcagaggaggagagaaaaagctggatggctttattacgccgcgaaataggccatttccatgaaaagaaggacctaccattggacacatctgactctagctccgacaccgacagcttttatggcgccgtggaaagaccggtagatatatctctgtccccatatcccactgataatgaggattacgagcacgatgatgaggatgattcctacttggagcccgatagttag

SEQ ID NO: 134184 - DNA, 1686 bp, synthetic construct
  misc_feature 1..1686: note = Description of Artificial Sequence: Synthetic coding sequence
  source 1..1686: mol_type = other DNA
atggctgctgaggagatgcactggccagtcccaatgaaggccatcggggctcagaacttgctcacaatgcctggcggggttgccaaggcaggttacctgcataaaaagggcggcacgcagctccagctcctgaagtggcctctgcgcttcgtgataatccataagcgatgtgtgtactacttcaagtcgagcacctccgctagcccgcaaggggccttctctctgtcaggatacaacagggtgatgagggctgccgaggagaccacctccaacaacgtctttccttttaagatcatccatataagtaagaagcacagaacgtggtttttcagcgcctcctcagaagaagagagaaaatcctggatggctttactgaggagagagatcggacacttccacgagaaaaaggacctgcccctggatactagcgattccagctctgacaccgattcgttctacggagcagtggaacgcccagtggacatatccttgtcgccataccctacagacaacgaggactatgagcatgatgacgaggatgattcatacctggaaccagattctcccgagccaggacggttggaagacgctcttatgcaccctcccgcgtacccgcctcctccggtacccactcctcgaaagccagcgtttagcgatatgccacgagctcactctttcacttccaaaggtcctggccctctgctgccaccgcccccaccaaagcatggcctcccagatgttggtctggccgccgaggactccaagagggatccactctgccctaggagggctgaaccatgccccagggtaccggcaacacctcgcagaatgtccgacccaccactgagtacaatgccaactgcccccggcttacgcaagcccccgtgctttagggaatccgcatctccatccccagagccttggacacccggacacggagcatgttcgacctcctctgccgctatcatggccacagctacctcacgaaattgcgacaagctgaagagcttccacctgtcaccccggggccctccaacaagcgaaccaccgcctgtgcccgccaataagccgaaatttctcaaaattgctgaggaggatcccccccgagaggcggccatgcctggtcttttcgttccccccgtcgcccccaggcctccagcactaaaactgcccgtcccagaagcaatggcgaggcctgccgtcttgccccggccagaaaaaccacagctcccacacctgcagagaagccccccggacggtcagagttttagatccttctctttcgaaaaaccccggcagcctagccaggccgacactggaggtgatgatagtgatgaagactacgaaaaggtgccactgcccaacagcgtgtttgtaaataccactgaaagctgtgaggtcgagaggctgtttaaggccacttctccccgtggcgaaccgcaagacggcctgtactgtattcggaacagttctaccaagtccgggaaggtactggtcgtctgggacgagacgtccaacaaagtgagaaattacaggatctttgagaaagacagtaagttttacctagagggcgaggtgctgttcgtgagcgtgggatcaatggtggaacactaccacacacatgttctgccctctcaccaatcacttctcctgcgacacccttatggttacactggtccgcgctag

SEQ ID NO: 134185 - DNA, 585 bp, synthetic construct
  misc_feature 1..585: note = Description of Artificial Sequence: Synthetic coding sequence
  source 1..585: mol_type = other DNA
atggctgctgaggagatgcattggcctgtgcctatgaaagccatcggagcccaaaacctgctgaccatgcccggaggggtggccaaggcgggctatctgcacaagaaggggggcactcaactccagctgctcaagtggcccttacgcttcgtgattatacataagcgttgcgtttattacttcaaaagttccacctcagccagccctcagggcgcattcagtctcagtgggtacaacagagtaatgagggctgcagaagaaacaaccagtaataacgttttcccattcaagattattcacatctctaaaaagcaccgaacttggttcttttccgcatcaagcgaggaggagcgcaagtcgtggatggctttattaaggagagagatcggccatttccatgaaaagaaggatttacccctggacacctcagattcttcttccgatacagacagtttttatggcgccgtggaacgccctgtggacatctctttgtcaccttaccctacggataacgaagattacgagcacgatgacgaagatgactcatatctcgaacccgactctcctgagccaggccggctgtag

SEQ ID NO: 134186 - DNA, 411 bp, synthetic construct
  misc_feature 1..411: note = Description of Artificial Sequence: Synthetic coding sequence
  source 1..411: mol_type = other DNA
atggcagccgaagaaatgcactggcccgtgcctatgaaggccatcggggctcagaatctgctcaccatgcccggcggtgtggcgaaggctggctatcttcacaagaaagggggaacccagctgcaactcttaaaatggccgctgaggtttgtgatcatacacaagaggtgtgtttactatttcaaatcaagtacttctgcaagtccacagggggctttctctctgagtgggtacaaccgcgttatgagggcagccgaggagaccacctctaataacgtgtttccattcaagatcattcatattagcaagaagcatcgaacctggtttttctcggcatcaagtgaggaggagcggaaatcctggatggcactgctcagaagggagattggacatttccacgagaaaaagtag

SEQ ID NO: 134187 - DNA, 2892 bp, synthetic construct
  misc_feature 1..2892: note = Description of Artificial Sequence: Synthetic coding sequence
  source 1..2892: mol_type = other DNA
atggcagcacagcggattcgtgcggcgaattccaatggactccccagatgcaagtccgagggtacgctgatcgacctgagcgagggctttagcgaaacgtccttcaatgacattaaggtgccttctcccagtgcattactggtggataaccctacgccctttgggaatgccaaagaggtcatcgcaattaaagattactgcccaactaattttacaactctcaagtttagtaaaggagaccatctgtatgtcttagatacctccgggggcgagtggtggtacgctcataatactaccgagatgggctatatcccctcctcttacgtgcagccgctcaattataggaactcaacattgtccgacagcgggatgattgacaatctaccagactccccggacgaagtcgctaaagaactggagcttcttggtggctggaccgatgacaagaaagtgccagggaggatgtatagcaataatcctttctggaatggagttcagaccaatccctttttgaacggtaatgtaccagtcatgccctcgctggacgagttgaaccccaagtctacagttgacctactgttgttcgacgcgggcacatctagttttaccgaatcctcctccgctactaccaatagcaccggaaacatttttgacgagctccctgtaacaaatggactgcacgccgagcctccggtccgccgcgacaatccgttctttagatccaagcggtcttacagtttaagcgagctcagcgttcttcaggccaaatctgacgcacccaccagcagtagctttttcaccgggctcaagtctcccgcccctgaacagtttcagtcgcgcgaggattttcggacagcctggctcaaccatcggaagctcgcccgttcatgccacgatcttgatctcctggggcagtcacccggatggggccaaacgcaggccgttgaaaccaatatcgtatgcaaattggactcctccgggggagccgtccagctccccgatacctccatctcgatccatgtcccagaagggcatgtggcccccggcgaaacacagcaaatctcaatgaaagctctgttagacccccctctggagttgaactctgaccggtcctgttccataagccctgtgctggaggtgaagctctccaacctagaggtgaaaactagcattatactggaaatgaaggtctccgccgaaatcaagaacgacctattctccaaaagtaccgtgggcctgcagtgcctcaggtctgattccaaggagggtccctacgtgtctgtgcctttgaattgttcatgtggcgacactgttcaggctcagcttcataacctggagccgtgcatgtacgtggccgtggttgcccatggtccttctatcctctacccctccactgtttgggattttataaacaagaaggttacagttgggctgtacggaccaaagcatatccatccatctttcaaaaccgtggtaactatttttggccacgactgcgccccgaagacacttctcgtctccgaggtaacccgccaggcgcctaaccctgcccccgttgctctgcagctgtggggcaaacatcagttcgttctctcccggccccaggatttgaaggtttgcatgtttagcaacatgactaactatgaggtcaaagcctcggaacaagcaaaggtggtccgaggctttcagctcaaactcggcaaggtgtctcggttgatatttccaataacctcacaaaatccaaatgaactatcagacttcactttgagggttcaggtcaaggacgaccaggaagcaatcctgactcagttctgtgttcagaccccacagcctcctcccaagtccgctattaagccatcgggccagcgccgatttttaaagaaaaacgaggtcggcaagattatcctgtccccctttgctacaacaacaaagtacccaaccttccaggatcgacctgtgtcttccctgaaatttggtaaactgctgaaaaccgtcgtccggcagaataagaaccattacctcttggaatataagaaaggcgacggtatcgcgctcttgagtgaggagcgcgtcagacttcggggacaactctggacaaaagagtggtacatcggatactatcaaggccgcgttggattggttcatactaagaatgtgctggtcgtggggagagcccgcccctctctctgttctggccccgaattgagcacttccgttctgctcgaacagattctgaggccgtgtaaatttctgacctacatctatgcctctgtacgaacactgctgatggaaaacatttcatcttggcgatctttcgctgacgctttgggctacgtgaaccttccgctaaccttcttctgcagagctgagctggattccgagccagagcgggtggcgtcagtgctggagaagctgaaggaagattgtaataacactgaaaacaaagagagaaaatcattccagaaagaactagtgatggctttgctgaagatggactgtcaaggcctggtcgtgcgcctgattcaagattttgtgctactaacgaccgctgttgaggtggctcagcgatggagagaattggcggagaaacttgccaaagtaagcaagcagcagatggatgcctacgaatcccctcaccgggaccgaaatggggtcgtcgattccgaggccatgtggaaaccagcctacgacttcctgctcacctggtcgcaccaaatcggcgacagctaccgtgatgttattcaggagttacatttgggcctggacaagatgaaaaatcccataacaaagagatggaaacatctgacaggtaccctgatcctcgttaactccctggatgtgctccgggcagcagcattctcaccagcagatcaggatgatttcgtcatctag

SEQ ID NO: 134188 - DNA, 2892 bp, synthetic construct
  misc_feature 1..2892: note = Description of Artificial Sequence: Synthetic coding sequence
  source 1..2892: mol_type = other DNA
atggctgcccagagaatcagagctgctaacagcaatggtctcccacgttgtaagtcagagggtactctaatagacctgagtgaaggattctccgaaacctcattcaatgacatcaaagtgccttccccctctgcccttctggtggacaacccgaccccatttggcaacgctaaagaggtgatagcgatcaaggattactgtccaactaattttacaacacttaagttttctaaaggagaccacctttacgtgctggatacttctggcggagaatggtggtatgctcataatacgaccgaaatgggctacattccgagctcatacgtccagcccctgaactataggaacagtactctgtccgattccgggatgatcgataacctgccagactcacccgacgaggtggctaaagagctggaactgcttggtgggtggaccgacgacaagaaggttccaggtaggatgtattctaataatccattttggaatggggtccagacaaacccctttctcaacggaaacgtgcctgttatgccgagcctggatgagctgaaccctaaaagcactgtcgacttgctcttatttgacgctggtacaagctctttcaccgaaagtagttctgccacaacaaactccacaggaaatatcttcgacgagctaccggtaacgaatgggctacacgccgaaccaccggtaagacgcgataaccctttttttaggtctaagcgctcctactctctgtccgaactctctgtgcttcaggcaaaatccgatgccccgacttccagctcctttttcaccggtctaaagagcccagccccggagcagtttcagtctcgggaagacttccgcacagcatggctcaatcataggaaactcgcaagatcatgccacgatctggaccttctaggacaatcccctggttggggtcagactcaggcagttgaaaccaacattgtctgcaaactcgattcctcagggggtgcagtgcagctccccgacaccagcatctccatccatgtccccgaaggccacgttgctcctggcgaaacccagcagatcagcatgaaggccctcctcgatcccccattagaactgaatagtgataggagttgctccatctcgcccgtgctggaagtgaaactttccaatctggaggtgaaaactagcatcatactggagatgaaggtttctgccgagataaagaatgacttgtttagcaagagtactgtggggcttcagtgcctgagaagtgattctaaagaggggccatacgtttcagtcccacttaattgctcttgcggtgatactgtgcaagcccagctccacaacctcgagccttgtatgtatgtcgcagtggtagctcacggaccctctattctgtatccctcgactgtgtgggacttcataaacaagaaagtgacagtcggcctgtacggtcctaagcatatccacccctctttcaagactgttgtcaccattttcgggcacgactgtgcccctaagactctcctggtctcagaggtgacccggcaagcccccaaccctgccccagttgccctgcaattatggggcaaacaccagttcgtgttgagcaggccacaggacttaaaggtctgtatgttctctaacatgactaattatgaagtcaaggcgtctgagcaggccaaggttgttagaggttttcagctcaagctcggaaaggtgtcaaggttgatattccctattacatcccaaaaccccaacgaactgtccgatttcacattgagagtccaggtcaaagatgaccaggaggctatcctaactcagttttgcgtccagactcctcagcctccgccaaaaagcgccattaaacctagcggacaacgccgtttcctaaagaaaaatgaggttggaaaaattattcttagccctttcgccacaactacaaagtaccccaccttccaagatcggccagttagtagtctgaaattcgggaaattattaaaaaccgtcgtaaggcagaacaagaatcactacttattggagtacaaaaaaggcgatggtatcgctcttctttcagaagaacgcgtgcggctcagaggccaactgtggaccaaggagtggtatatcgggtactaccaggggcgggtcggtctggtgcatacaaagaacgtgctcgtagtcggaagggcccgtcctagtctgtgcagcggcccagagttatccacatcagtgctcctggaacagatcctaaggccatgtaaattcctgacctatatctatgcgagcgtaagaacgctgctgatggaaaacatttcttcatggcgttctttcgcagacgcactcgggtacgtgaacctgcccctcacctttttctgtagggccgagctggatagcgaaccggagcgtgtcgcatccgttctcgagaagctgaaggaggactgcaataatactgagaacaaagaaagaaagagttttcaaaaggagctggttatggcgctgctgaaaatggattgccaagggctcgtcgtgcggctgatccaggatttcgtcctacttaccacagctgtcgaagtggcccagcggtggcgggagttagcagaaaagttagccaaagtctcaaaacaacagatggacgcctatgagagcccccacagagaccggaatggcgttgtggactctgaagcgatgtggaaacccgcctacgacttcctccttacatggagtcaccagataggcgacagctaccgcgatgtgatacaagaactgcacctggggctggataagatgaagaatcctatcacaaagcggtggaaacacctcactgggacgctcatcctggtcaatagcctcgatgtactcagagctgctgcctttagccctgctgatcaggacgactttgtaatctag

SEQ ID NO: 134189 - DNA, 2892 bp, synthetic construct
  misc_feature 1..2892: note = Description of Artificial Sequence: Synthetic coding sequence
  source 1..2892: mol_type = other DNA
atggcagcacagcggataagagctgccaattcaaacggtctaccacgctgcaaatctgaggggacccttatcgacctgtccgagggtttctctgagacaagtttcaacgatatcaaggtaccaagcccctccgcgctactggtggataatcccaccccgtttggcaatgccaaagaggtgattgccataaaagactattgccctactaacttcacaacgttgaaattcagcaagggagaccacttgtatgtgctggatacatcaggaggagaatggtggtacgcccataatacaaccgaaatgggctacattccctccagctatgttcaaccgctaaattaccggaactcgaccctgtcagattccggtatgatagataacttgcccgattcaccagatgaagtggcgaaggagctggagctgctgggaggctggaccgacgataagaaagtacctgggcgtatgtattcgaataaccctttttggaatggtgtgcaaactaatccattcctgaatggcaatgtgcccgtcatgccaagcctagatgagctgaacccgaaaagcaccgttgacctccttttgttcgatgcaggcaccagttcattcactgaaagctcttctgcaactaccaattcaacgggcaacatcttcgacgagctgccagtaaccaatggcctacacgccgagcccccagttaggcgggacaaccctttctttcggtccaaacgctcctacagcctcagtgagctatcggtgctccaggccaagagcgacgccccgaccagtagttctttttttacaggcctcaaatctccagctccggaacagttccaatcaagagaagactttagaaccgcctggctgaaccaccgtaagctggctagaagttgtcatgacctggacctgttgggtcagtccccagggtggggacagacacaagccgtggaaacaaatatcgtttgtaaactagacagctcaggaggagccgtgcagctgcctgacacctccatttccatacatgtgcctgaagggcacgtagcccctggtgaaacacaacagatctcaatgaaagcactgctggacccacccttggagctgaacagcgacagatcgtgcagcatcagccctgtcttagaggtcaaactgagcaacctggaagtgaaaacgtccatcattctggagatgaaagtctctgcagagatcaagaacgatttattctccaaatccactgtgggcctgcagtgcctgcgcagtgactccaaagagggcccctacgtttctgttcctctgaattgcagctgcggcgacaccgtgcaagcgcaactgcacaatctggaaccctgtatgtatgtggctgtcgtggcccacggaccgtccatcctctatccatctactgtgtgggacttcattaataaaaaagtcacagtcggcctctacgggcctaagcatattcatccttcgtttaagaccgtggtgaccatcttcggacacgactgtgcaccgaagaccctcctggtttccgaagtgacaaggcaggctcccaaccctgctcccgttgccctccagctgtgggggaagcaccagttcgtgctgtcaagacctcaggacctaaaggtttgcatgttttccaacatgacaaactatgaggtcaaagcaagcgagcaggcaaaagtggtccgaggcttccagctgaagctgggaaaagtgtcaagactgatcttccccatcacttcccaaaatcctaatgagctgtctgacttcacactcagagtgcaggtgaaagatgatcaagaagcaatcttaacacagttttgtgtccaaaccccccagccgccgccaaagagcgcaatcaagcctagtgggcagcgccgtttcctcaagaagaacgaggtgggaaagatcatactctcaccttttgccactaccaccaagtatccaacctttcaggaccgccctgtgtctagcctcaaattcggaaagctgctgaaaacagtggtcagacagaacaaaaaccattacttattggagtacaagaagggggatggtatagctttactcagtgaggagagagtgcgtctccgcggccagctgtggacaaaagaatggtatattggctattatcagggaagagtggggcttgtgcataccaaaaatgtgttagtcgtggggcgggccagaccatctctttgctccgggcccgaactgagcacctctgtgctgctggagcagatcctgagaccttgtaagttcctaacctatatttacgcaagcgtgcggaccttgctgatggagaacatctcatcatggcggagtttcgccgatgccctggggtatgtgaatttgcctcttacattcttctgccgggctgagttagatagtgaaccagaacgtgtcgcctccgttctggagaaattgaaagaagattgtaacaacaccgagaacaaggagcgcaagtcgtttcagaaagagctcgtaatggcgttactcaaaatggactgccaagggctggttgtgagactcatccaggacttcgtgctcttgacgacggctgtggaagtggcccagaggtggcgcgagttagccgagaaactcgccaaggtgagtaagcagcaaatggatgcatatgagtctccgcacagggacagaaacggcgtggtcgattcggaagccatgtggaagccagcgtatgattttttacttacctggagtcatcagatcggcgactcatatcgggatgtcatccaagagctccatctggggttggacaagatgaagaaccccattacaaaacgctggaagcatctcaccggtaccctaattctcgttaatagcctagatgtactgcgagccgccgctttcagcccagccgatcaggatgacttcgtgatttag

SEQ ID NO: 134190 - DNA, 369 bp, synthetic construct
  misc_feature 1..369: note = Description of Artificial Sequence: Synthetic coding sequence
  source 1..369: mol_type = other DNA
atggcagctcagagaattcgcgctgctaattcaaatgggctacctcggtgtaaaagcgagggcactctgatcgatttatccgagggcttttcagaaacttcattcaatgatattaaagtcccctcaccttcagctctgctggtggacaaccccacccctttcgggaacgctaaggaagttatcgcaatcaaggactattgtccgaccaacttcaccactctcaagttctccaaaggcgatcacctttacgtattagatacatctggaggggagtggtggtacgcccataacaccacagagatgggatacatcccatcaagttacgttcagccattaaactacaggaactccactctaagcgacagctag

SEQ ID NO: 134191 - DNA, 1662 bp, synthetic construct
  misc_feature 1..1662: note = Description of Artificial Sequence: Synthetic coding sequence
  source 1..1662: mol_type = other DNA
atggctgcacagaggatcagagctgccaattcgaatggcctgccaagatgcaagtcagagggaacacttatcgacctaagtgaggggttttcggagacttcttttaatgatatcaaagtgcccagcccatccgccctgctcgttgacaacccaacaccattcgggaatgccaaagaggtcattgccataaaagattactgccctacaaactttactaccctaaaattcagcaagggggaccacttgtacgttctggacacaagcggcggcgagtggtggtacgctcataacaccaccgagatgggctatatccctagctcctacgttcagccgttgaactaccgtaactctacactcagtgactcaggaatgatcgacaatctgcccgacagtccagacgaggtggcaaaggagcttgaactgctgggcggttggacggatgataagaaagttcccggcagaatgtacagcaataatcctttttggaatggagtccagacaaatccattcctcaacggaaatgtgcctgtgatgccctcgctagacgagctgaatccgaagtctaccgtggatttgctgctcttcgacgccggcacctcttcatttaccgaatcttccagcgcgacaacaaattcaacagggaacatttttgatgagctgccagtgaccaacggccttcacgccgagcctcctgtgagaagggacaaccctttcttccgttcaaagagatcttattccctgtccgaactgagcgtactgcaggccaagtccgatgcaccaacttcttcaagcttcttcacgggccttaagtctccagcccctgagcagtttcagtcccgagaagacttcagaaccgcttggctcaaccataggaaattggctcggagctgtcatgatttagatcttcttggccagagccccgggtggggacagactcaggcagtagaaacgaatattgtgtgtaaactggatagctcagggggagcagtgcagcttccagatacaagcatctctattcacgtgcctgagggccatgtcgcgcccggggaaacacaacagatcagtatgaaggcgctgctagatcctcccctcgagctgaatagcgatcgcagttgcagcatctcccccgttctggaggtgaagctcagcaatctggaagtaaaaactagcatcatcttagaaatgaaggtgagcgccgagatcaaaaacgatctcttctccaagtcgaccgtgggtctccaatgcctcaggagtgactccaaagaagggccctatgtgtccgtgcccctgaactgtagctgcggtgatacagtccaggctcaactccataatttggaaccttgcatgtacgtcgctgtggttgcccacggcccgtccatcctttaccctagcaccgtttgggatttcattaacaagaaggtgacagtcggcctgtatggcccaaaacacattcaccccagtttcaaaacagtagtaaccattttcggacatgactgcgcgccaaaaacactgctggttagcgaagtgacccgccaagcccccaaccccccaattactaagcgctggaaacacttaactggtacgctcatactggttaacagcctcgacgtgctccgcgcagccgcattctccccagccgaccaggacgatttcgtcatctag

SEQ ID NO: 134192 - DNA, 171 bp, synthetic construct
  misc_feature 1..171: note = Description of Artificial Sequence: Synthetic coding sequence
  source 1..171: mol_type = other DNA
atggcagctcagcgcatcagggcggccaactcaaacggcttgccacgatgtaaatccgaaggaactctgattgatctttctgagggattcagcgaaacttcttttaacgacataaaagtaccgagtcccagcgcactgcttgttgataaccccacccctttcggcaattag

SEQ ID NO: 134193 - DNA, 522 bp, synthetic construct
  misc_feature 1..522: note = Description of Artificial Sequence: Synthetic coding sequence
  source 1..522: mol_type = other DNA
atggctgcccaacggataagagccgccaacagcaacggtctccctcgatgcaagtcagaaggcaccctcattgatttatccgagggattcagcgagacaagctttaacgatatcaaggtgcccagcccctccgcactacttgtcgacaaccccacccctttcggtaacgctaaggaggtcatagccattaaagactactgccccaccaatttcacaacacttaagtttagcaagggggaccacttatatgtgctggatactagtggcggcgagtggtggtacgcacataatactacagaaatgggctatatacctagcagctacgtgcagccgcttaattaccgaaacagtactttatcagactcaggtatgatagataatctgcctgacagcccagacgaagtagccaaagagttggagcttctgggggggtggaccgatgataaaaaggtgccagggcgaatgtacagcaacaaccccttctggaacggagtgcaaactaatcccttcctgaatggctag

SEQ ID NO: 134194 - DNA, 174 bp, synthetic construct
  misc_feature 1..174: note = Description of Artificial Sequence: Synthetic coding sequence
  source 1..174: mol_type = other DNA
atggccgctcagcgaataagagcggctaacagtaatggtcttcctaggtgtaagtcagaaggcaccctgatcgacctgtcagagggtttttccgaaacatcctttaatgacatcaaggtgcccagcccctctgccctgctggtggataatccaactcctttcgggaacgcctag

SEQ ID NO: 134195 - DNA, 606 bp, synthetic construct
  misc_feature 1..606: note = Description of Artificial Sequence: Synthetic coding sequence
  source 1..606: mol_type = other DNA
atggagaacattagttcatggcggtcctttgcagacgccttaggttacgtcaaccttcccctcacattcttttgccgagcagagctggatagtgagcccgaaagggtcgccagtgtgctcgaaaaacttaaggaagattgcaacaatacagaaaataaagagcggaagtccttccaaaaagaactggtgatggcccttcttaagatggattgtcaggggctggttgtgagactgatacaggacttcgtactgttaaccactgccgtcgaggtcgctcagagatggcgcgaactagccgaaaagctggccaaggtgagcaaacagcagatggatgcctatgagtctccccatagggaccggaacggagtggtcgactcagaagccatgtggaaaccggcttatgatttcctattgacatggtcacaccagatcggggactcgtaccgggacgtgatccaagaattgcacctcggtctcgacaaaatgaaaaatcctattacgaagaggtggaagcacctcaccggtacgctgattctggtcaacagtctggacgtcctgagggctgccgcattttccccagccgatcaggatgacttcgtgatctag

SEQ ID NO: 134196 - DNA, 897 bp, synthetic construct
  misc_feature 1..897: note = Description of Artificial Sequence: Synthetic coding sequence
  source 1..897: mol_type = other DNA
atgctgaatcacgccacccaacgcgttatggaagctgaacagaccaaaactcggagtgagctcgtacacaaagagacagccgcacgctataatgctgccatgggccgtatgcgccaactagaaaagaagctgaaacgcgccattaataagagcaagccatatttcgagctcaaagctaaatactacgttcagctggagcaattgaagaaaacggtcgacgatctccaggccaaacttaccctcgccaaaggagaatataaaatggcccttaagaatttagaaatgatctcagatgagatccacgagcggaggagatcctccgccatgggcccccgaggttgtggggtgggcgcagaagggagttctacttcagttgaagatctacccgggagtaaaccagagccagacgctataagcgtagcctcggaggctttcgaggatgattcttgctccaacttcgttagtgaagatgactccgagacccagagcgtgtcttctttttcatcaggacccacttcgccttcagagatgccagatcaattcccagctgtggtgcggccaggctccctcgatttgccctctcctgtgtcactgagcgaatttgggatgatgtttccagtgctaggcccccgtagtgaatgctcaggtgcgtcatccccggagtgcgaggtggagcggggtgaccgtgcggaaggtgcagagaataagacctccgacaaagccaacaacaacaggggcctcagttcctctagcggtagtggaggctccagcaaatcccagtcctccacctcacctgaaggccaggccttagagaatagaatgaagcagttgtctttacagtgttctaagggccgggacggaatcattgctgacatcaagatggtccagataggatag

SEQ ID NO: 134197 - DNA, 387 bp, synthetic construct
  misc_feature 1..387: note = Description of Artificial Sequence: Synthetic coding sequence
  source 1..387: mol_type = other DNA
atgcttaatcacgctacccagcgcgttatggaagccgagcagactaaaaccagatccgagctagtccataaggaaacagctgcacgctacaacgccgctatggggcgaatgaggcagcttgaaaaaaagctgaaacgcgcgatcaacaaaagtaaaccctacttcgaactaaaagctaagtattacgtgcaactcgagcagttgaagaagaccgtcgatgaccttcaggccaagctgactttggcgaaaggagaatataagatggccctgaaaaatctcgagatgatatctgatgaaatacacgaacgtcggcggtcttccgctatgggtccccggggatgcggggtgggggcagaggggagctccactagcgtggaagacctatag

SEQ ID NO: 134198 - DNA, 1368 bp, synthetic construct
  misc_feature 1..1368: note = Description of Artificial Sequence: Synthetic coding sequence
  source 1..1368: mol_type = other DNA
atggatgccgcactcaaaagaagtagaagcgaagaaccagctgagatattaccccctgcccgggacgaggaggaggaagaagaggaggggatggaacagggtcttgaagaagaagaggaggttgatccgaggattcagggagaactggagaagctgaatcaatctaccgacgatattaacaggcgggaaaccgagctggaggacgcaaggcagaagtttcgcagtgtgctggttgaggcaacggtgaagctggatgagttggtaaagaaaattggaaaggccgttgaagacagtaagccatactgggaggccaggcgagtcgctaggcaagctcagcttgaggcgcagaaggccacccaggactttcaacgggctactgaggtactgagagccgcaaaagaaacaattagtctagccgaacagcggctgctcgaggacgacaagcgccagttcgacagcgcatggcaggagatgctgaaccacgccacccagcgggtgatggaagctgaacagaccaagacaagaagtgagctggtacacaaggaaacagcagctcggtataatgccgccatgggtaggatgagacaactggaaaaaaaattaaagagggctatcaacaagtctaagccctacttcgagctgaaggccaaatactatgtgcagctggagcagctgaagaagacggtggacgacctgcaggctaagctgaccttagctaaaggcgagtacaaaatggccctcaagaatttagagatgatctcggacgagatccacgagcggaggcgttcgtcggcgatgggcccacgtggctgcggggtgggagcggagggctcctccactagcgtggaagaccttcctggatccaaacctgaacctgatgctatctccgtcgcctcagaggctttcgaagacgattcctgcagtaattttgtttcagaagacgacagtgaaactcagtccgtgtcttccttctcaagcggaccaacctcccccagcgaaatgcctgaccagtttcccgccgtggttcgacccggttctctcgacctcccctccccggtgagcttgtcggaatttgggatgatgttcccagtgctcgggcccagaagcgagtgctccggcgcttcttcacctgagtgtgaggtggaaagaggcgaccgggccgagggggccgaaaataaaacctccgacaaagccaataacaacagaggactctcctccagctcagggtccggagggagttctaaaagtcagtctagtacgtcacctgaagggcaggccctcgagaatcggatgaaacaattgtcccttcagtgctccaaggggcgggacggcattatagcggatatcaagatggtgcagattgggtag

SEQ ID NO: 134199 - DNA, 897 bp, synthetic construct
  misc_feature 1..897: note = Description of Artificial Sequence: Synthetic coding sequence
  source 1..897: mol_type = other DNA
atgctcaatcacgcaactcaacgggtgatggaggccgaacagacgaagactaggtcggagctggtccataaagaaaccgcggcccgatacaatgccgcaatggggagaatgcgtcagttggagaagaagctgaaaagagccatcaataaaagtaagccatatttcgaacttaaggccaagtactatgtgcagttggaacagcttaaaaagaccgttgatgacctgcaggccaagctcacactcgccaagggggaatacaaaatggctttgaaaaatctggaaatgatctctgatgagatccacgagcgacgcaggtcttctgccatggggccacgggggtgtggcgtgggtgcagaagggtccagcactagtgtggaggatctccctggcagcaagcctgagcctgatgccatttctgtcgcatcagaagcatttgaggacgatagctgctccaacttcgtgagcgaggatgacagcgaaacacagtcggtctccagtttctcctcagggcccacctcccctagcgagatgcccgaccaattccccgccgtagttcgacccggttctttagaccttccgtctccagtcagcttatcggaattcggtatgatgtttcccgtgttgggtccgcgatccgaatgtagcggagcgagcagccctgaatgcgaggtggagcgaggagaccgggccgagggggcggagaacaaaacatcagacaaggctaataacaatagaggtctttcctcctcgtccggttccggtggctcttcaaagagccagtcgtcgacgagccccgagggacaggctctcgagaatcgaatgaagcagttatctctacagtgtagcaagggaagagatggcattattgcagatatcaaaatggtgcagattgggtag

SEQ ID NO: 134200 - DNA, 156 bp, synthetic construct
  misc_feature 1..156: note = Description of Artificial Sequence: Synthetic coding sequence
  source 1..156: mol_type = other DNA
atgctgaaccacgctacccagcgggtgatggaagctgaacaaacaaaaaccagaagcgagctagtccataaggaaacggcagccaggtataatgcggccatgggcaggatgaggcaacttgaaaagaaactgaaacgggccattaacaagtcctag

SEQ ID NO: 134201 - DNA, 897 bp, synthetic construct
  misc_feature 1..897: note = Description of Artificial Sequence: Synthetic coding sequence
  source 1..897: mol_type = other DNA
atgctgaatcacgcgacccaacgcgttatggaagcggaacagacgaaaaccagaagtgagctcgtgcataaagaaaccgccgccagatataatgcagccatgggtaggatgagacagttagaaaagaaactgaaaagggcaatcaacaaatccaagccctacttcgagctcaaggccaagtattacgtccagctggaacagcttaaaaaaacagtggacgacctgcaggccaagttgactctggctaaaggggaatacaaaatggccttaaagaatttggaaatgattagcgatgagatccacgaacgccggcgcagtagtgccatggggcctcgtgggtgtggggtaggagcggagggctccagcacaagcgtggaagatctgcctggaagcaagccggagcccgacgctatcagcgtggcgtccgaagccttcgaggatgactcctgctcgaatttcgtgagtgaagacgattccgagactcagagtgtgtctagctttagcagcggccccacctctccaagcgaaatgcctgatcaattccctgccgtggtgagacctggttcactggacctaccttctcccgtgtccttatctgaattcggaatgatgttcccagttctgggccctcggagtgaatgcagcggagctagtagccccgagtgcgaggttgaacgtggagatagagccgaaggcgccgagaataaaacatcagataaagctaataacaacagaggactgagtagtagttctggctccggagggtcatctaagagtcagtcctccaccagtcccgaggggcaggccctggagaaccgcatgaagcagctgagtctgcagtgcagcaaaggccgtgatggtataatcgctgatatcaaaatggtgcagataggttag

SEQ ID NO: 134202 - DNA, 2580 bp, synthetic construct
  misc_feature 1..2580: note = Description of Artificial Sequence: Synthetic coding sequence
  source 1..2580: mol_type = other DNA
atgatggagggcctcaaaaagcgcacgaggaaggcatttggcatccgtaagaaggaaaaggatactgacagcacaggtagtccagatagagacggcattcaaggtaaaaagaagacccaaaagacccagttgctgcttaccagctgtttctggttacgcgctctgtccctcacactgtcgcagaaaaaaagcaacggagctcccaacgggttctatgccgagatcgactgggagcgatacaacagtcctgaattagacgaagaaggatactcaatcagaccagaggagcccgggtcgactaaggggaagcacttctacagctcaagtgaaagcgaagaggaagaggagtcccacaagaaatttaatatcaaaatcaagccccttcagtccaaggatattctgaaaaacgctgccacggtggatgagctgaaagcatccattggcaacattgccctgtcaccttccccagtccggaaatctccacgccgctctccaggcgccatcaagcggaatctctccagcgaggaggtagccaggccacgccgatctacaccaaccccagagctcatctctaagaaacctccggatgacacaacggctcttgctcctctgttcggaccccctctggagtccgcctttgacgagcagaaaactgaggtcctgcttgatcagccagaaatttggggctctggacagcctattaacccaagcatggagtcacccaaactgactaggccatttcccacagggacacccccaccgctgcctcccaaaaatgtcccagcgactccaccgcgcactggaagccctctgaccattggccctgggaatgaccagagcgccaccgaggtgaagatcgagaagctgccctccatcaatgacttagatagtatcttcggaccagttctctctcctaaatcggtggcagtgaacgccgaggagaagtgggtccacttttctgacaccagccctgaacacgtcactccagagctaaccccccgggaaaaagtggtctcgccacccgctacgccagacaatcccgcagatagccctgcccccggccctctgggcccgccgggtcctaccggccccccaggaccaccaggcccaccgcgaaacgtgctctcgccactgaatcttgaggaagttcagaagaaggtggccgaacagaccttcattaaagacgattacttagaaaccatttcctcaccaaaggattttggcctcggccagcgcgccaccccaccaccaccgccgccccctacctacaggactgttgtgtcctccccgggtccagggtctggcccgggtcccgggacgacctccgatgggaagaccgaggcccagcgctatcaagttatctgccccagcctgcaggctggcggcaacgagctggacagctacagcggtgcatcttcaccggcacgccccgcgacccctttagtaccctgccgatcaacaacgcctcccccaccacctccaaggcctccttcaagacctaagttaccccccggaaagccgggagtgggtgacgtgtccaggccttttagcccacccatccattcctcttccccaccacctatcgcacctctcgccagagccgaatctacaagcagcatatcatccactaactctttgagcgctgcgactacccctacagtggaaaatgaacagccttcactggtttggtttgatcggggaaagttttatctgacttttgagggcagttcgcggggaccctcccccctaactatgggagctcaggataccttacctgtggctgcagcctttacggagaccgtcaatgcatatttcaagggcgccgacccctcaaaatgcattgttaaaataaccggagaaatggtgttgtcttttcctgctggtattactagacatttcgccaataatccaagtcccgccgctctgacattccgcgtgattaattttagccggctggaacatgtgctcccgaatccacagctgttatgctgtgacaacactcagaatgatgctaacacaaaggagttctgggtgaacatgcctaatctgatgacccacctgaagaaagtatccgaacagaagccccaggccacctactacaacgtcgatatgcttaagtatcaagtttccgcacagggcattcagtccacccctctcaacttggccgtaaactggaggtgcgagccctcaagtacagatctgagaatcgactataagtataataccgacgccatgacaacagccgttgcccttaacaacgttcagttcttagtgccgattgatgggggcgtgacgaagctgcaggccgtgctgcctcccgccgtgtggaatgcggaacagcagcggatcctgtggaaaattccggacattagccaaaagtctgaaaacggtggggttggaagcttactggccagattccaactctctgaaggtccatccaagcccagtccattggttgtgcaattcacatctgaggggtccacgctgtctggctgcgatatcgagttagtgggggctgggtaccgcttctcgctcataaaaaagcggttcgccgccggaaagtacctggcggataactag

SEQ ID NO: 134203 - DNA, 1857 bp, synthetic construct
  misc_feature 1..1857: note = Description of Artificial Sequence: Synthetic coding sequence
  source 1..1857: mol_type = other DNA
atgatggaggggctcaaaaaaaggactcgtaaggcttttggaatacgcaagaaagagaaagataccgacagcaccggaagtcccgacagggatggtatcaactcacccgaactggatgaagaggggtacagtattcgcccagaagagcccggctcaacaaagggcaaacatttctattcttcaagtgaatccgaagaggaagaggaatcccataagaagttcaatattaaaattaagccccttcaatccaaagacatcctcaaaaatgcagccacagttgatgagttgaaggccagtatcggtaatatagcccttagtccatcaccggtcaggaagtctccgagaaggagccctggggcaataaaacggaacctaagcagtgaggaagtcgcccggccccgccgctcaactcctacacccgaactgattagtaaaaagccacctgatgacacaaccgcactggccccactgtttggtccacccctggaatcagcgttcgacgaacagaagactgaggttttgctggatcaacctgaaatctgggggtcgggccagcccatcaacccatccatggaaagtccaaagctgactaggccctttcctaccggaactcctccacctctcccgccaaagaatgtccccgccacgccacccagaaccggctcacccctgacaatcgggcctggagcttcttcccctgctcgtcctgctacccccctggtaccatgccgaagtacgaccccccctcctccaccacctcgccctccgtccaggcctaagctgcctcctgggaaacctggagttggcgacgtaagtaggcctttcagtccacccatccactcctcttctcctcctccaattgcccctctggcccgcgctgaaagcacaagcagcatctcttcaaccaacagtctgtcagctgcaaccaccccaaccgttgagaacgaacagccctccctagtgtggtttgacagaggtaagttctacttgaccttcgaaggatcatcacggggccctagccccttaactatgggggcacaggatactcttcctgttgctgcagcatttacagagaccgtaaacgcttacttcaaaggagctgacccgtccaagtgcatcgtgaagattaccggggagatggttctctcgtttcccgccgggataacaaggcacttcgcgaacaatccatcgccagcagccctgacattcagagttataaacttttcaaggctggaacatgtcctcccaaaccctcagctcctgtgctgcgataatacccagaacgatgccaacacgaaagagttttgggttaatatgccaaatctgatgactcatcttaaaaaggtttccgaacagaagccacaggcgacctactacaacgtcgacatgttgaagtatcaggtatccgctcagggaatccagagcacccctctcaacttggcagtcaattggaggtgtgagccctcctcaaccgacctgagaatcgattacaagtataataccgacgccatgaccaccgctgttgccctgaataatgtgcagtttttggtacctatcgacggcggagtgacaaaactgcaggccgtgctgcctcccgcggtgtggaacgcagagcagcaacgcatactttggaagattccagacattagccagaagagcgaaaacggcggggtgggttccctcctggcacgatttcagctgtctgaaggacccagcaagccaagtcctctcgtcgtccaatttacttccgaggggagtactctgtcgggctgcgatattgaactggtgggcgcaggctatcggtttagtctcatcaaaaagcgcttcgccgctgggaagtacctggcagacaactag

SEQ ID NO: 134204 - DNA, 1893 bp, synthetic construct
  misc_feature 1..1893: note = Description of Artificial Sequence: Synthetic coding sequence
  source 1..1893: mol_type = other DNA
atggagggattaaaaaagcggacacggaaagctttcggtatcagaaagaaggaaaaagatactgactctacagggtcccccgatcgtgacggtattaagaagtctaacggcgcacctaatggcttctatgcagaaatagactgggagcggtacaattctcctgagcttgacgaagaaggatattctatcaggcccgaagagcccgggtccaccaaaggtaagcatttttacagtagcagtgaaagcgaggaagaagaagaatcacataaaaagttcaacattaaaattaagcccctgcagtcaaaagacatcttgaaaaacgcggctacggtggatgagctgaaggcttctatcggtaacatagccctaagtcctagccctgtgggggcaatcaaaagaaatctgtcttccgaagaggtggcgaggccacggcgttcaacacccacacccgaactgatttcaaagaaaccaccagacgatacaaccgccttagcccccctgtttgggccgcctttggaaagcgctttcgacgagcaaaaaactgaagtactactggaccagcctgagatttggggcagtggacagcctatcaaccccagtatggagtcccctaaactgacaagaccattccccaccgggacgccaccccctctgccccctaaaaatgtgcctgccacacctcctcgcactggcagtcccctgaccattgggccaggtgcttcctcccctgcgaggcccgccaccccccttgtcccctgtaggagcaccacacctcctccccccccacctaggcccccaagtcgccccaagttaccacccggaaagcccggagtgggagatgtttcaaggccattctccccaccaatccactcttcttctcccccaccgatagcgcccctggctagggctgaaagcacttcatccatcagctccactaactcactatcagccgcaacaactcctaccgtagttagtgaagacgatgtcttctacgacaagttgcccagtttcgagaggcggtgcgaaactcccgccggatccagtcggggcccatcaccactgactatgggggcccaggacactttgcctgttgcggcagcctttacagagaccgttaatgcatacttcaaaggcgccgacccatctaagtgtatcgtgaagatcacgggtgagatggttctcagttttcccgcaggaattactaggcatttcgctaataacccatctcctgccgctctgacctttcgcgtcataaatttctcacgacttgaacatgtgctacccaacccccagttgctgtgttgtgacaacacccagaatgatgcaaataccaaggagttctgggtaaacatgccaaacctaatgacacacctgaaaaaggtgtcggaacagaagccgcaagcaacttattataatgtggatatgcttaaatatcaagtgtctgcccaggggatccagtccacgcctctgaatttagccgtcaattggaggtgcgagcccagctcaactgatctgaggatcgactataagtacaacacggatgccatgaccacagccgttgctctgaataacgtccagttcctggtccctattgacggcggagtcactaagctccaggctgtgctgccacctgccgtgtggaacgccgagcagcagagaatcctgtggaaaattccagacatctcacaaaagagtgagaacggcggggtaggatcccttctggccagatttcaattatctgaaggcccctcaaagcctagtcctctcgtcgtgcagttcacaagcgaaggaagcaccctgtctggatgtgacatcgagttggtaggcgccgggtaccggttttctttgataaaaaaacgcttcgcggctggcaagtatcttgcagataattag

SEQ ID NO: 134205 - DNA, 2487 bp, synthetic construct
  misc_feature 1..2487: note = Description of Artificial Sequence: Synthetic coding sequence
  source 1..2487: mol_type = other DNA
atgatggaaggtctgaagaaacgcactcgtaaggcctttggcattagaaaaaaagagaaagacaccgactcaactggcagcccggatcgggatgggatccaaccttccccccacgagccaccgtataactcaaaggccgagtgtgctagggaagggggaaaaaaagtcagcaagaaatcaaacggtgcccccaacggcttctatgccgaaattgactgggaaaggtacaattctcccgagctggacgaggaagggtactctatccggccagaggaaccaggatcaacaaaggggaagcatttttatagttcttccgagtctgaagaagaggaggagtcccataagaagtttaacattaaaatcaaacccttgcaaagtaaggatattctgaaaaacgcagccacagtggacgaacttaaggccagcatcggcaacattgctctgtctccaagcccggtgcgaaagtcccccaggcggtctccgggggccattaaaagaaatctgtcttctgaagaggttgccaggcctcgcaggtccactcccacacctgaacttatttccaaaaaaccgccagatgatactactgccctggcaccactgttcggccctccactggaaagcgcattcgacgagcagaagaccgaggtgcttctggatcagccagaaatctggggatctggtcagcctattaacccaagtatggaatcacctaagttgacccggcccttccctaccggtaccccgcctcctctgcctccaaaaaatgtcccggcaaccccgcccaggaccggctcccctctcactatcggaccaggaaatgaccagtccgccacagaagtgaaaatcgagaagttgcccagtataaacgacctggactcaatttttggaccagtcctgtctccgaagagtgtggccgtgaatgctgaggagaagtgggtgcacttcagcgacaccagccccgagcacgtaacccccgaattgactccaagggaaaaggtcgtaagccccccggcaacacccgataaccccgccgattcaccggcccccgggcccctcggcccccccggcccgactggtcctccagggccccctggcccacctcgcaatgtgctgtccccccttaacttggaggaggtccagaaaaaagtggccgagcagacctttatcaaggatgactatctggagacaatatcctcccctaaagattttggactcggccaacgggccacaccacctccaccccctcccccaacataccggaccgtcgtcagctcccctgggcccggctctgggccaggaccgggcacaacctctggcgcttccagtccggcgcggcctgctacccccctcgtcccttgtcggagcaccacgcccccccccccccctccccggcctccctcgcgccccaagcttccgcctggcaaacccggtgtgggtgacgtttcacgccctttttccccccctatccactcctctagtccacctcctatcgccccattggcgcgcgcagagtctactagctccataagcagcaccaacagcctgagcgctgctactacgcccaccgtagagaacgaacagcccagcctggtttggtttgatcgaggcaaattctatctgacattcgaaggttcctcgaggggcccttctcccctgactatgggtgctcaggacacactccccgtcgcagccgctttcacagaaacagtgaacgcgtacttcaaaggcgccgacccaagtaagtgcatcgtcaagataacaggcgagatggtgttgtctttcccagcaggcattactaggcatttcgcaaacaacccgtcacccgccgctctcacattccgggtgatcaatttttcccgcctagagcatgttcttcctaatccacagctcctctgctgcgacaacacacagaacgacgcaaacacaaaggaattctgggttaacatgcctaatcttatgacccatctcaaaaaggtctctgagcaaaaaccccaagcaacttactataacgttgatatgctgaaataccaggtctccgcacagggtattcagtctactccgctcaacctggctgtgaactggcggtgtgagccgtccagcaccgatctccggatagactacaagtacaataccgacgctatgacaactgccgtcgctctaaacaatgtgcagttcctggtccctatcgacggtggagtcaccaaattgcaagccgtccttcctcctgctgtttggaacgcagaacagcagcgcattctctggaagattccggatatttcacagaagagtgaaaacggcggcgttgggtctctgctcgctaggtttcagttatcagagggacctagcaaaccttcccccctggtggtccagtttacgagcgaaggcagcacactaagtggatgcgatatagagctagtgggggctggctataggttcagcctgatcaaaaaacgatttgccgctggaaaatatttagccgacaactag

SEQ ID NO: 134206 - DNA, 2577 bp, synthetic construct
  misc_feature 1..2577: note = Description of Artificial Sequence: Synthetic coding sequence
  source 1..2577: mol_type = other DNA
atggaagggctgaaaaaacgcacgagaaaagctttcggcattcggaagaaggaaaaagataccgattcaacgggctccccggatcgggatggcatacagggcaagaaaaagactcagaaaacgcagcttttactaacctcatgcttctggctccgcgctctgagtctgaccctctcccagaaaaaatctaatggcgcacccaatggcttttacgcggaaattgactgggagcgttacaattcacctgaactggacgaggaaggctattcaattagaccagaagaacccggatctacaaaggggaagcatttctattcatcctcagaatccgaagaagaggaagaatcacacaaaaagtttaacataaagatcaaacccctacagagtaaggatattctaaaaaacgcagccacggtggacgaattgaaagccagtattggcaatattgctctctccccaagccctgtacgcaagaaggaacggcgcgagaaaggtgcaataaagcggaacttgagctccgaggaggtggcgcgccccagaagatccacccccacccctgaactaatatcgaagaaaccacctgacgatacaaccgctctagcaccactgtttggccctcccttggagtctgctttcgacgaacaaaaaacggaggtgctgctcgatcagcccgaaatttggggcagcgggcaaccgatcaatccgagtatggaaagcccaaaactcaccaggccctttcccactgggacaccaccgcctcttccgcctaaaaacgtccctgctacgcccccacgcactggcagcccgctgacaattgggccaggcaatgaccagtccgccaccgaggtaaaaattgaaaagctgcccagcattaacgatttggactctatttttggacctgtgctctcacccaagagcgtagccgtaaacgctgaagaaaagtgggtgcacttctctgatacctctcccgaacatgtaacccccgagctgaccccacgggagaaggtggtgagtcccccggcaaccccagacaatcctgcggactcgcccgcacccggacccctgggcccacctgggcctacaggcccacccggtccacctggtccccctaggaatgtgctttcgcctttaaatctcgaggaggttcagaaaaaagtagctgagcagactttcattaaggatgactacttggagactatatcttccccaaaggacttcggccttggtcagagagccacaccaccacctccacctccacccacatatcggactgttgtttccagtcctggacccggtagcggccccgggcctggaaccacatctgatggaaagactgaagcccagaggtaccaagtaatttgtcccagccttcaggccggtgggaacgaactggacagttacagtggagcctctagtcccgctcgtccagctacacccctcgtgccatgcaggtcaactacccctccacctcctccaccacggcctccctccagacctaaattgccaccaggaaagcctggtgtgggagacgtctctaggcctttctcaccgcccatacactctagctcgccccctccaattgcccccctggcgcgtgccgagagcacctcttcaatttcgagtaccaactcattaagcgccgctacaaccccgacagtggaaaacgagcaaccaagcctggtctggttcgataggggcaaattctacttgaccttcgaaggttcctctagaggtccgagcccactcactatgggagcacaggatactttgccagtcgcggcagcattcacagaaacggttaatgcctatttcaaaggcgctgaccccagcaagtgcatagttaaaatcactggcgaaatggtattgtcctttccagctggcataacccggcacttcgctaacaatccaagccctgcagcgttgacctttcgcgttatcaatttctcccgcttggagcatgttctgccaaaccctcaactgttgtgttgtgacaatacccagaacgatgctaataccaaagaattttgggtgaacatgcccaatctcatgactcatttgaagaaagtgtctgagcagaagccgcaggctacctactataacgtggacatgctcaaataccaggtgtcagctcaggggattcaatctactccgctgaacctggccgtgaattggagatgtgagcctagctcaactgatctcaggatagattacaaatataatactgatgccatgactacagccgtggccttgaataatgttcagtttctggtgcccattgacggtggggtgacgaagttgcaggccgtcctgccccctgcggtttggaatgcagaacagcagcgtatcttatggaagatacccgatatatctcagaagtccgaaaatggtggcgtggggagcctgctggctaggtttcagctgtcagaaggtcctagcaaaccgtcacccttggtggtgcagttcacctcagaagggagtacactttccgggtgcgacattgagctggttggcgcaggctatagattttccttgataaaaaagaggttcgccgccggaaagtacttggccgacaattag

SEQ ID NO: 134207 - DNA, 1896 bp, synthetic construct
  misc_feature 1..1896: note = Description of Artificial Sequence: Synthetic coding sequence
  source 1..1896: mol_type = other DNA
atgatggaaggcttgaaaaagagaactaggaaggcttttggcattagaaagaaggaaaaggatacggactcaaccggatcccccgatagagacggtataaaaaagagcaatggagctcctaacggcttttatgcggaaatcgactgggaacgatataattcccccgaacttgacgaggaggggtattccattcgccccgaggaacctgggagcactaaggggaagcatttctactcctcgtcagagagcgaagaagaagaggagtcccacaaaaagttcaatatcaaaattaaacctctgcagtccaaggatatactgaaaaacgcagctaccgtggatgagttgaaggccagtatcggcaacattgcacttagtcccagccccgtgggcgcaattaagcgtaacctcagttctgaagaggtggcaagaccacgaagatctaccccaacaccagagctcatttccaagaaaccaccagacgataccacggcactggctccactctttgggcctccgctcgaatcagcatttgacgagcagaagactgaagttctccttgaccagcccgaaatttggggttctggtcagcccatcaatccaagtatggaaagcccgaaactgacacgcccgtttcccaccggaaccccccctcccttaccaccaaagaatgtgcccgccacccctcctcgcactggctctcctctaacgattgggcctggggcctccagtcctgctcgacccgccacgccactcgtgccatgcagatccaccacacccccgccccccccaccaagacctccctcgagaccaaagctgccaccaggcaagccaggcgttggtgatgtgtcacggccattctcgcctcctatacatagctctagcccgcctcctatcgctcccctagcgagagctgagtccacaagtagcatctcctctacgaattccctttcagccgccacaacgccaaccgtcgtgagcgaagatgacgtcttttacgacaagctgccatccttcgagagacgatgtgagactcccgcagggagcagccgcgggccatctccgcttacgatgggtgcccaagacacactacctgtggctgctgcctttacggaaaccgtgaatgcttattttaagggagcagatccaagcaaatgcatagtgaagattaccggtgagatggtcctgtccttccctgctggaatcacgaggcactttgccaataacccttctcctgcagccttaacattccgagtgattaacttctccagattggagcatgttctccctaaccctcagctcctctgctgtgataatacgcaaaatgatgcaaacacaaaagagttctgggttaacatgccaaacctgatgacacacctgaaaaaagtgagtgagcagaaaccccaagccacatattacaacgtcgatatgctgaaatatcaggtgtcggcacagggcatccagagcacacccttgaacctggctgtgaactggcgctgcgaaccgagttctactgatcttaggatcgactataagtacaataccgatgctatgaccaccgccgtggccctcaacaacgtccagttcctggtcccgatcgacggaggtgttacaaaactgcaggccgtgctaccccccgccgtgtggaacgcagagcagcagagaattctgtggaagatcccagacatctcccagaaaagcgagaacggtggcgtgggaagcttgctcgctcgatttcagctgtccgagggaccttccaagccctctccgctcgtcgtgcagtttacgagcgagggaagtacgcttagcgggtgcgacatcgaactcgttggggcagggtacagattttccctgatcaagaagagattcgccgcggggaagtatttggccgataattag

SEQ ID NO: 134208 - DNA, 2496 bp, synthetic construct
  misc_feature 1..2496: note = Description of Artificial Sequence: Synthetic coding sequence
  source 1..2496: mol_type = other DNA
atggaggggctgaagaaacggacaaggaaggcattcggcatcagaaaaaaggaaaaagacactgacagcacagggtctccagacagagatgggatccaagggaagaaaaaaactcagaagactcaactcttactcacaagctgcttttggctgagagcactgtccttaactttgagccagaaaaaaagcaacggcgcacctaatggcttctacgcggaaattgactgggaaagatacaattctccggaactggatgaggagggatatagcatcaggccggaggagcctggcagcaccaagggcaagcatttctactcatcgagtgagtctgaagaggaggaggaaagccacaagaagttcaacattaagataaaacctttgcagagcaaggatattctgaaaaatgccgccactgttgatgagctgaaagcatcgataggcaatattgcactgagcccaagtccggtgaggaagaaagagagacgtgagaagggtgctattaagcgcaacctatcaagcgaggaagtcgcccggccacgtcgcagcacaccaacaccagaactgattagcaagaaaccaccagacgatacgactgcacttgcccctctctttggacccccactggaaagtgcatttgacgaacaaaagaccgaggtgctgctcgatcaacctgagatctggggcagcgggcaaccgatcaatccctccatggaatcaccgaagctgacccgtccattccccacggggacacctcctcctctgccacccaagaacgtaccggccaccccacctcggaccggctccccacttaccatcggtcccggaaacgaccagagcgcaacggaggtgaagattgagaagctcccatctatcaacgacttggattctatattcgggccagttttgagcccaaagtcggttgccgttaatgcagaagagaagtgggtgcatttttcggatacctcacccgaacatgtgacgcctgagttaacacctcgggagaaagtcgtctcaccccctgccacacccgacaacccagccgacagtcccgcgcctggcccactaggacccccaggaccaacaggcccccccgggccgcctgggccacccaggaacgtgctgtcccccttaaatttggaagaggtacagaagaaggttgctgagcagacctttataaaggatgattacttggagactatcagcagtcccaaagattttggactaggacaacgggccactccaccccctcctcccccccctacatacagaactgtggtgtctagcccaggtccaggcagtggcccgggtcctggaacaacttcgggcgcttccagcccagcccgaccagctacccctctggtaccttgcagatctacgacaccaccccccccaccacccagaccccctagtagacccaagctgccacccgggaagccgggggttggtgacgtgtccagaccctttagcccaccgatccatagttctagcccgcctcccatagctcctttggcacgggccgaaagtacctctagtatctccagcactaactcactttccgccgcgactaccccaaccgtggagaatgagcagccttccctggtgtggttcgacaggggtaagttctacctgacatttgaaggttccagccgcggcccttcacccctgaccatgggagcgcaggatactctccccgtcgctgccgcgtttacggagaccgtgaatgcctatttcaagggtgcagacccaagcaaatgcatagtgaaaattacgggtgagatggtgctgtcgtttcccgccgggattacccggcattttgctaacaacccatctcccgccgcgctcacctttagagtaattaattttagccggctggagcatgtgcttcccaacccacagttgctgtgctgtgataatacccagaacgacgcaaacacaaaggagttctgggtgaacatgccgaacctgatgacccacttgaagaaggtgtcagaacaaaagccccaggctacttactataatgtcgacatgcttaagtatcaagtgtcagcgcagggcatccagagtactccgctgaacctagccgtaaattggagatgcgagccttcgtcaactgatcttcgaatagactacaagtataacaccgacgctatgacgaccgccgtcgccctgaataacgtgcaattcttagtacccattgacgggggcgtgaccaaactgcaggccgtgctccctcccgccgtatggaatgccgagcagcagaggatcctttggaagattcccgatatcagccagaagtcggagaatgggggtgtagggtcacttttggcacggtttcagttaagcgagggcccaagcaagcccagtccactcgtcgtgcagtttacaagtgaaggatctacgcttagcggatgcgatattgaacttgtgggggcagggtacagattcagtctgataaaaaaaaggttcgcggctggaaagtatttagccgataattag

SEQ ID NO: 134209 - DNA, 783 bp, synthetic construct
  misc_feature 1..783: note = Description of Artificial Sequence: Synthetic coding sequence
  source 1..783: mol_type = other DNA
atgatggagggattaaaaaaacggactaggaaagccttcggaatcaggaaaaaggaaaaggacactgatagtacggggtctcctgatagggatggaattcaaccaagtcctcatgaacctccctacaacagtaaagccgagtgcgcaagagaaggagggaagaaggtgtccaaaaagtctaatggggcaccaaacggattctacgctgagatcgattgggagaggtacaatagcccagagctggacgaggaaggctattccatcaggcccgaagaacccgggagtactaaggggaaacacttctacagctccagcgaaagcgaggaagaggaagagagccataagaagttcaatattaagattaaaccccttcagagtaaggatatccttaaaaatgcagcgaccgtggacgaacttaaagcttctatcggtaatatagccctgagtcccagtccggtgggtgctatcaagcgtaatctgagctccgaggaggttgcgcgcccgagaagatctacaccgaccccagaattgataagtaagaaaccccccgatgacaccactgccctggcgcccctcttcggcccccctttagagtccgcttttgatgagcagaaaacagaagtccttttggaccagccagagatttggggatctggacagcctatcaatccttcaatggaaagccccaagttaacccggccgtttccgacggggacccctccacccctcccccccaaaaacgtacctgctacaccacctagaaccgggtcccctcttacttag

SEQ ID NO: 134210 - DNA, 1002 bp, synthetic construct
  misc_feature 1..1002: note = Description of Artificial Sequence: Synthetic coding sequence
  source 1..1002: mol_type = other DNA
atgacatgctccgtgacccacatcgtgagttttagcctcccctttctgaatccctcccaccccgcatctaccccgggccacaccgaaaacgagcaacccagtctcgtgtggttcgaccgaggtaaattctatctgacatttgagggttctagcagaggccctagccccctgactatgggtgcacaggacacgcttcccgttgcagcagctttcacagagaccgtgaacgcttattttaagggtgccgaccctagtaagtgcattgttaaaattacaggagagatggttctgtcattccccgcaggtattacccggcactttgctaacaacccgtctcctgccgccctcactttccgtgtgataaatttctcgcgtctagaacatgtgctgcctaacccacagctcctgtgctgtgacaacacccagaatgacgccaacaccaaagaattctgggtaaatatgcccaacctgatgacccatcttaagaaagtgagcgaacagaagcctcaggcgacgtactataacgtcgatatgctcaagtaccaggtgtcagctcagggcatccagtctaccccactaaatctcgctgtgaactggcgatgcgagccgtcctctaccgacctgcgaatcgattacaaatacaacactgacgccatgactaccgccgtagccctgaacaacgttcaatttttagtgcccattgatggcggagttacaaagctgcaggccgtactgccacccgccgtttggaacgccgaacagcagcggattctatggaagataccagacatcagtcagaaaagcgagaatggtggtgtaggaagccttctggcccgttttcagctcagcgagggtcctagtaaaccctctcctctggtggtccaattcacttcagaagggtctaccctgtcaggatgcgatattgaactcgtcggagctgggtatagattctccttgatcaagaagagattcgccgctggcaaatatctggcagataactag

SEQ ID NO: 134211 - DNA, 1107 bp, synthetic construct
  misc_feature 1..1107: note = Description of Artificial Sequence: Synthetic coding sequence
  source 1..1107: mol_type = other DNA
atgtctgtggcaggtcttaagaagcaattttataaagcatcccagctggtgtcagagaaggtgggaggagccgagggcacaaagctggacgacgacttcaaggagatggaaaaaaaagtggacgtgaccagcaaagcagtaactgaagtcttagctaggaccatcgagtacctgcagcccaaccctgcatccagggcaaaacttacaatgctgaacaccgtaagcaagatcagagggcaagtcaaaaatcctggctacccccaatcagaaggcctgcttggggaatgtatgatacggcacggaaaggagttgggcggcgaatccaactttggtgacgcgctcctcgatgcaggcgagagcatgaaacgcttggctgaggtgaaggattcccttgatatagaggtcaaacaaaacttcatcgaccctctccagaacctttgcgaaaaggatttaaaagagatacagcaccatttaaagaaacttgaaggcaggcgtcttgactttgactataaaaagaagagacagggaaagattcctgatgaggagctccgacaggccctggagaagtttgaagaaagcaaggaagtagcagaaacatccatgcacaacttactagaaaccgatattgagcaggtctctcagctgagtgccctagtggatgctcaactcgattatcatcgccaagctgtgcaaattcttgacgaattggctgagaagctgaagcgaaggatgagagaggccagctctcggcctaaaagggaatataagccgaaaccacgagagccgttcgacctcggggaacccgagcagtccaatgggggcttcccctgcacgactgcaccaaagatagcagcgtcttcttcctttaggtcctccgacaagcctatccggacgccgagtagatcaatgcctccattagatcagccttcttgtaaggccctctatgatttcgaaccagagaacgatggtgagctggggttccacgaaggggatgtcataaccttgacgaatcagatcgacgagaactggtatgagggaatgcttgatggacagagcggatttttccccctgagctacgtggaggtgcttgttcctcttccacaatag

SEQ ID NO: 134212 - DNA, 963 bp, synthetic construct
  misc_feature 1..963: note = Description of Artificial Sequence: Synthetic coding sequence
  source 1..963: mol_type = other DNA
atgagcgtcgccggcctcaaaaagcaattctacaaggccagtcagctggtgagtgaaaaagtcggcggggccgagggaacaaagctggatgacgatttcaaagaaatggagaaaaaagtggatgtgacttctaaagccgtgactgaagtgctggcgagaactatcgagtacttgcagccgaatccaggtgatgccctcctggatgccggagagtctatgaagaggttggccgaggttaaggactcattagatatcgaagttaaacagaacttcatcgacccactccagaatttatgtgagaaggatctgaaggagatccagcaccacctcaaaaaacttgagggacgacgtctagattttgactacaaaaagaaacgacagggcaaaatccctgatgaagagctaaggcaggcactcgagaagttcgaagagtcaaaagaagtagctgaaaccagcatgcacaacttactggagaccgatatcgaacaagtgtcccagctctctgcacttgtggacgcgcagctggactaccacaggcaggctgtgcaaatcctcgatgagctggccgaaaagcttaaaagacggatgcgcgaggcctcatcacgcccaaaacgggagtacaagcctaaacctcgtgaacccttcgatttaggcgagccggaacagtctaatggcggcttcccctgcacaacagcccccaaaatagcagcatctagcagctttcgtagctccgataagccaatcaggactccctcacgttcaatgcccccactagatcaacctagctgcaaggccctctacgatttcgagcccgaaaacgatggggagctgggctttcatgaaggcgacgtgatcacactgactaaccagatagacgagaactggtatgaaggaatgctggacgggcagtcgggcttcttcccactgagttatgtggaagtgctggtgcccttaccacagtag

SEQ ID NO: 134213 - DNA, 915 bp, synthetic construct
  misc_feature 1..915: note = Description of Artificial Sequence: Synthetic coding sequence
  source 1..915: mol_type = other DNA
atgtccgttgcaggactcaaaaagcagttttacaaggccagtcagctcgtctccgagaaagtggggggagctgagggaacaaagctcgatgacgatttcaaggagatggaaaagaaggtcgatgtgacatcgaaagccgtcacagaggtgctggcacgcaccatcgaatacctgcaaccaaaccccgcatcccgggctaaattgaccatgctgaacaccgtaagtaagatccgcggccaaaatttgtgtgagaaagatctgaaggagatccagcaccatctcaaaaagctggaggggcggcggctggattttgattacaagaagaagcggcaaggcaaaattccagatgaggaacttagacaggcactcgagaagttcgaagaatctaaggaagtggcagagaccagcatgcataaccttttggaaaccgacatagaacaggtatcccagctgagtgccttggtagacgcacagttggattatcaccgccaggctgtgcagatcctggacgagctggctgaaaagcttaagaggcgcatgagggaggcatctagtcggccaaaacgagagtacaagcccaaaccccgggagccctttgaccttggggagcccgagcagtccaacggcggatttccctgcacaacagccccaaagatagctgccagctcgagcttccgatcttccgataagccaattcgcacaccgtcaaggagtatgccacctctggatcagccctcttgtaaggccctgtatgattttgagcctgagaacgatggcgaattggggttccacgaaggagatgtgattacactcaccaaccagatcgatgagaactggtatgagggtatgctggacggccagagcggcttttttcccctgtcttatgtcgaagtgctagtcccactgccccagtag

SEQ ID NO: 134214 - DNA, 1059 bp, synthetic construct
  misc_feature 1..1059: note = Description of Artificial Sequence: Synthetic coding sequence
  source 1..1059: mol_type = other DNA
atgtccgtggctgggctcaaaaaacagttccacaaagcaacccaaaaagtttcggaaaaggtgggcggagcggaaggaacaaagttggacgacgatttcaaagagatggaacgtaaagtggatgtgacctcccgggcggtaatggaaattatgactaaaactattgagtatctgcaacccaaccccgcttccagagccaagctcagcatgataaatacaatgtcgaagattagaggacaggagaaagggccgggttacccccaggccgaggccttacttgccgaggccatgctgaaatttggaagagagctgggagacgactgcaactttgggcctgcccttggggaggtgggagaggccatgagagagttaagcgaagtcaaagacagtctagacattgaagtcaagcagaacttcatcgatcctctccagaatctccatgacaaggaccttcgtgagattcagcatcacctgaaaaagctggaggggaggcggctggatttcgactataaaaagaagaggcaggggaagattcccgatgaggaactccggcaagctttggagaaattcgatgagagcaaagagattgccgagagctcaatgtttaatttattggagatggacatcgaacaggtgtcccagcttagcgccctcgtgcaagcgcaactggaataccacaagcaagctgtgcagatcctccagcaagttacagtccggctggaagagcggatcagacaggcctcctcccagcctcgtagagagtatcaaccgaaaccccggatgagcctggaatttccaaccggcgactccactcagccaaacggcggtctaagtcacacaggcacccctaaacccagcggtgtgcagatggaccaaccctgttgtagggctctctatgatttcgagcctgagaacgagggcgagctcggttttaaagaaggcgacatcattactctgaccaatcagatagacgagaattggtacgaggggatgctccacgggcactccgggtttttcccgatcaactacgtcgaaattctggtcgcactcccccattag

SEQ ID NO: 134215 - DNA, 678 bp, synthetic construct
  misc_feature 1..678: note = Description of Artificial Sequence: Synthetic coding sequence
  source 1..678: mol_type = other DNA
atgagcgtggcgggtctgaagaagcagttccacaaagccacccaaaaggtcagcgagaaagttgggggcgcagagggaacaaagctggacgacgactttaaggaaatggaaaggaaggtcgatgtgaccagtcgggcagtaatggagattatgacaaagacgattgaataccttcagcctaaccccgggtccctcgaggcggaggccctcctagcagaagccatgctcaaatttggccgcgaactcggagatgattgcaatttcggccccgccctgggggaagtgggggaagctatgagggaattgagcgaagtgaaagatagcctggatatcgaggtaaaacagaacttcatcgatcccctgcagaatctccacgataaagatctgagggaaatacagcatcatcttaaaaagctggaggggcgccgcttagacttcgattataaaaaaaaacggcagggaaagattcccgatgaggaactcagacaggctttagaaaagttcgatgaaagcaaagaaattgctgagagtagcatgtttaatctgttggagatggatatcgagcaagtatctcagctgagtgccctagtacaagcccagctcgaataccataaacaggccgtgcaaatcttgcagcaggttaccgtgcgtttggaggagcgcatcaggcaggcctag

SEQ ID NO: 134216 - DNA, 918 bp, synthetic construct
  misc_feature 1..918: note = Description of Artificial Sequence: Synthetic coding sequence
  source 1..918: mol_type = other DNA
atggagatcatgacgaagactattgagtatttacagcccaaccccgcatctcgtgccaaattatctatgattaacacaatgagcaagattcgcgggcaggagaagggtcccggctacccacaggcagaggccttactggccgaagccatgcttaaattcggccgcgaactgggggacgattgcaacttcgggcctgctctgggcgaagtcggagaggctatgcgtgagctgagcgaggtgaaagacagccttgacattgaggttaaacagaatttcatcgatcccctccaaaacctccatgacaaagatcttcgggaaattcagcaccacctgaagaaattggaaggccggcggcttgatttcgactataagaagaaaagacagggtaagattcccgacgaagagctccggcaggctctggaaaagttcgacgaaagcaaagagatcgctgaatcaagcatgttcaatctgttagagatggacattgagcaggtctctcaacttagtgccctggttcaggcgcagctggaataccacaaacaagccgtgcagattctgcagcaggttacagttcgtctcgaagaacgtatccgacaggcttcctcacagcctagacgggaatatcagcccaaaccacgcatgtctctagagtttcctacgggcgatagtacacagcccaatggaggactgagccatacgggcacaccgaagccctcaggagtgcagatggaccagccatgttgtagagccttgtatgacttcgagcccgaaaacgagggagagctggggttcaaggaaggcgacattatcacgctgactaaccagatagacgagaattggtatgagggaatgctacatggacacagcggtttctttcccatcaactatgtggaaatcctcgtggcactgcctcactag

SEQ ID NO: 134217 - DNA, 546 bp, synthetic construct
  misc_feature 1..546: note = Description of Artificial Sequence: Synthetic coding sequence
  source 1..546: mol_type = other DNA
atgagcgtggcgggcctgaagaaacagtttcacaaagccacccaaaaagtttcagaaaaggttggcggtgcagagggaaccaagctagatgatgacttcaaggaaatggagatcgagcaggtgagccagctctcagctctggtacaagctcagttggaatatcacaagcaggccgtgcagatccttcaacaggttaccgtacggcttgaagaacgaattcgtcaggcctcctcacagcctcgtcgtgagtatcagcccaagccccgcatgtctctggaatttcctactggagattctacacagcctaacgggggcttaagccacacaggcaccccgaagcccagcggtgtgcagatggaccaaccttgctgtagagcactttatgatttcgagcctgagaacgagggagagctcgggtttaaggagggagatatcataacacttaccaaccaaatcgacgagaactggtatgagggtatgttacacggccatagtggcttctttccaattaactatgtggagatactggtcgctttgccacactag

SEQ ID NO: 134218 - DNA, 1068 bp, synthetic construct
  misc_feature 1..1068: note = Description of Artificial Sequence: Synthetic coding sequence
  source 1..1068: mol_type = other DNA
atggacggtattttcgccggaattatctgcaaccaggcgaatcgctgtctgacttggacatctcagcagctgttcagcgagaaaataagtggggcagagggaaccaagctggacgacgagtttttagatatggagcggaagatagatgtgaccaacaaagtagtggctgagatcctctctaaaactaccgagtatcttcaacctaatcctgcctacagagccaagctcggcatgctcaatacagttagtaaaattcgaggtcaggttaagacaaccgggtatcctcagacagagggactgctcggggattgcatgctgaagtacggcaaggaacttggagaggatagcacctttgggaacgcactgatcgaagttggggagagcatgaaactgatggcagaggtgaaggatagcttagatataaacgtcaagcagaccttcatagatccccttcagctgttgcaggataaggacctaaaagagattgggcaccacctgaaaaagctcgaaggcagaagactggactatgactacaaaaaaaagcgagtcggcaagatccccgatgaagaggtgcgtcaggcggtcgagaagttcgaggaatccaaagaattggccgagcgctcaatgttcaacttcctcgagaatgacgtggaacaagtgagccagcttgccgtcttcatcgaggccgccctagattaccacagacagtcaacagagattttacaggagctgcagagcaaactgcaaatgcggatttctgccgccagcagcgtgcctagaagggagtataagcctaggcccgtgaaaaggagttcgagtgaacttaatggcgtttcaacaacctctgttgtgaagacaaccggttctaacattcctatggaccagccgtgttgtcgaggcttgtacgacttcgagccagaaaaccagggcgagctggggttcaaggaaggggacattatcacgctgactaaccagatcgacgagaactggtacgagggcatgatccacggggaaagcgggttttttccaataaattacgttgaggtgatcgtgcctctgccacagtag

SEQ ID NO: 134219 - DNA, 1044 bp, synthetic construct
  misc_feature 1..1044: note = Description of Artificial Sequence: Synthetic coding sequence
  source 1..1044: mol_type = other DNA
atgtcagtggccggcctgaagaagcaattccataaggcctcgcagctgttctctgagaaaatctccggcgctgaaggtaccaagctggatgatgagttcctcgatatggaacgaaaaatcgatgtcaccaataaagttgtggcagaaatactctcaaagaccactgaatacctgcagccaaacccggcttacagagctaagttgggcatgcttaatacagtgagtaagatcagagggcaggtcaaaacgaccggataccctcagaccgagggccttttgggcgattgtatgctgaaatacggcaaggagctaggcgaggactctacctttggcaatgcacttatcgaagtgggggagagcatgaaactgatggctgaggtcaaagattccctggacattaatgtaaagcagaccttcatcgacccactgcaactgctgcaagacaaggaccttaaggaaattggtcaccacttaaagaaactggaggggcgtcgtctagactacgactacaagaaaaaacgagtaggaaagatcccagatgaagaggtacgtcaggctgtggaaaagtttgaggaatcaaaggagttggccgaaagatccatgtttaacttcctcgaaaacgacgtagagcaggtctcccagctggccgtattcatcgaggctgccctggactatcatagacagtcaaccgaaatactgcaggagttgcagagtaagctgcaaatgcggatatccgccgctagctccgtgcctagaagagaatacaaacctcgcccagtgaagagatcctcttccgaattgaatggggtgtcaacgacctctgtggtaaagactactggttccaatatacccatggatcaaccatgttgtcgcggtctgtacgacttcgaacccgagaatcagggagaactcggtttcaaggagggggacataatcacgttaactaatcagatcgacgagaattggtatgagggaatgattcacggcgagtcaggatttttcccaatcaattatgtcgaggttatcgttccactgccacaatag

SEQ ID NO: 134220 - DNA, 1068 bp, synthetic construct
  misc_feature 1..1068: note = Description of Artificial Sequence: Synthetic coding sequence
  source 1..1068: mol_type = other DNA
atggacggcatctttgcagggatcatctgcaatcaggcaaacagatgtcttacctggacttcccagcagttgttttctgagaaaattagcggtgctgagggcaccaaattagacgacgagttcttagatatggaaagaaagattgacgtcaccaacaaggtcgtcgcggagattctgtcaaagacaacagagtatctgcagccgaatccagcataccgggctaagcttgggatgttgaacacagtctcgaaaatccgagggcaggtgaagactactggctaccctcaaaccgagggtttgcttggagactgcatgctgaagtatggtaaagagcttggtgaggattccacatttggcaacgccctgattgaagtgggggagagtatgaagcttatggctgaggtcaaagactcactggatatcaatgttaagcagacttttattgatcctctgcagctattgcaggacaaagacttgaaggaaataggccatcacctaaagaagttggaggggcggcggttggactatgactacaaaaagaaacgcgtgggaaagatcccagatgaggaggtcaggcaggccgtcgaaaagttcgaggaaagcaaggagctcgccgaaagatccatgttcaactttctggagaatgatgtcgaacaggtaagccagctggctgtgtttatcgaagcagcactggactaccatcgtcagtccactgagatcttacaggagctacagtccaagctgcagatgcgaatcagtgccgcttcctcagtacctagaagggaatacaagcctcgcccggtcaagagaagttcgtccgaactgaacggggttagcacaacatctgtggtgaaaactacaggaagtaacatcccgatggaccagccctgttgcaggggcctttatgattttgagcccgaaaaccagggcgaactgggcttcaaagagggtgatattatcactctcaccaaccagatagacgaaaactggtatgaggggatgattcacggcgagtctggattcttccccattaattacgtcgaagtcatcgttcccctgcctcagtag

SEQ ID NO: 134221 - DNA, 867 bp, synthetic construct
  misc_feature 1..867: note = Description of Artificial Sequence: Synthetic coding sequence
  source 1..867: mol_type = other DNA
atgagcgtggccggactgaagaaacagttccacaaggcctctcagctgttcagtgaaaaaatcagcggggctgagggcaccaagctggatgatgagttcctcgatatggagcgtaaaatcgacgtgaccaacaaagttgtggcggaaatcttatccaagactaccgaatacctccaacctaaccccgcctatagggcaaaactgggaatgttgaacactgtgagcaagattaggggtcaggtgaaaacaacgggctacccgcagaccgaggggttgctcggagactgcatgttgaagtatggcaaggagctcggagaggattcaacattcggaaacgcactgatcgaggtaggagagtccatgaaactgatggcagaggtgaaagatagcctcgacatcaacgtgaagcagactttcattgacccactccagctgctacaagacaaggatctgaaggagattggccaccacctaaaaaagcttgaaggcagacgactggactatgattataagaaaaaaagggttgggaagattccagacgaggaagtgcgccaagcagtcgagaaatttgaagagtccaaagaactggccgagagatccatgttcaattttttggagaatgacgtggaacaagtatcccagctcgctgtattcatcgaagctgcccttgactatcaccggcagtcaaccgaaattctgcaggaactgcagagcaagctccagatgcggatctctgccgctagctccgtacccaggagggaatataaacctcgaccagtcaagagaagcagctccgagttaaatggcgtctcaactacatccgttgtcaagaccactgcttatagcaggttggaacctgctgattag

SEQ ID NO: 134222 - DNA, 1662 bp, synthetic construct
  misc_feature 1..1662: note = Description of Artificial Sequence: Synthetic coding sequence
  source 1..1662: mol_type = other DNA
atggtggaagccatagttgaatttgactaccaggcacaacatgacgacgaactgacgatctctgtgggggaaatcattacgaacatccgaaaggaagacggaggttggtgggagggtcagattaatggtcgccgaggcctctttccggataacttcgttcgcgaaattaaaaaggaaatgaagaaggatccccttaccaacaaggcacccgaaaagcccctacatgaggtacctagcggcaattctctgttgagctctgagacaatcctgcggacgaataagcgtggcgagcgtcgtcgcagacggtgccaggtggcattttcctacctcccgcagaacgatgacgagctggaacttaaagtgggcgacatcattgaagtggtgggcgaggtcgaagagggatggtgggagggcgtcctcaacggaaagaccggaatgtttccttccaacttcattaaagagttgtccggggagagtgatgaactgggtatcagtcaggatgagcagctgagcaaatctagacctgaaggcttaccccccgctagtcttctccccttccccgctcatggcgcgaagggaaagactacctttgagggaaccattctgtaccgggctgctcctggcaaaacggaagggcatcgaaggtactactccctcagagagactacaggtagcgaatctgacggaggggacagttcatccaccaagagcgagggggcaaatgggacagtcgccactgccgccatccaacctaagaaggtgaagggcgttggcttcggggacatctttaaggacaaacctattaaactgagacccagatctattgaggtcgaaaatgatttcctgcccgtggaaaagacaattggcaagaagcttccggcaactacagctacccccgactctagcaagaccgagatggactcccgtacaaagtcgaaggattactgcaaggtcatctttccgtatgaggcgcaaaatgatgatgaacttactataaaagaaggagacatcgtgacacttatcaacaaggactgcattgatgtaggatggtgggaaggagagctcaacggccgacggggagtatttccggataactttgtgaagctgctgcctccggattttgagaaggaagggaaccggccgaaaaaaccaccccctcccagtgcccctgtcatcaagcagggggcaggcactacagagagaaagcacgaaatcaagaaaatcccccctgaaagacctgaaatgctccccaatcgcaccgaagaaaaggagcgccccgaacgcgagccgaaacttgatctgcagaaaccgagtgtgccggccatcccgcccaagaagcctcgccctccgaaaaccaattctttgtcccgtcccggggcactgcctccgcgccggcctgaaagaccagttgggcctctcactcacactcgatactgttgcgccttgacttcgggggcaggggtgggctggttatggaaagaacacagaagagggactgactgccaccggccctgggaggagggaaggggagagggtggagcacaagcctcacttctgcaccccccggccaagctgagcgaggacaccggacatttttgcccatgcagctgtacccaagccggcgtctctgtcagattgagaggtgcggtatgggtcagctag

SEQ ID NO: 134223 - DNA, 1887 bp, synthetic construct
  misc_feature 1..1887: note = Description of Artificial Sequence: Synthetic coding sequence
  source 1..1887: mol_type = other DNA
atggaagtaagtgcggcgaaagctccaagtgctgctgacctgtcggagattgaaattaaaaaagaaatgaagaaggatcccctgacgaacaaagctccagaaaaaccactgcacgaggtgccctctggtaattcactcctgtcctccgaaaccattctccgcaccaataagcgaggggaacgacgtagacggcggtgccaggttgccttctcttacctgccccagaacgacgacgaactggaacttaaggttggtgatatcatagaagtggtgggggaggtggaagaaggctggtgggagggagttctgaacggcaagactggtatgtttccaagtaatttcatcaaggagctgagcggcgagtccgatgaactgggaatctcccaagacgaacagctttccaagagctcactacgggaaactactggttctgagtcagatggcggcgacagcagcagcaccaaaagtgaaggagccaacggtacggtggccaccgccgctatccagccgaagaaagtcaaaggtgtggggttcggagacatctttaaagataaaccaattaagttgcggccaagaagcattgaggttgagaacgacttcctcccagttgaaaagacaatagggaaaaagcttccagcaacaacggctactcctgactcctccaagactgaaatggactcacggacaaaaagtaaggattattgcaaggtgatatttccttacgaggcccagaacgatgatgagctcacaataaaggagggcgacatcgtaacacttattaacaaggattgtatcgatgtgggttggtgggagggggaactcaatggacgcaggggggtgttccccgataatttcgtaaaactgctgcccccagacttcgagaaggaaggtaataggcctaaaaaaccaccacctccaagtgcgccggttataaaacagggggccggcaccactgaacgaaagcatgaaatcaagaagatccctcctgaaaggcctgaaatgttgccaaatcgaaccgaagagaaggagaggccagaacgagagcccaaattggacctgcagaagccttctgtccccgctattcccccaaaaaagcccagaccccctaaaacaaactctctaagccggcctggtgctctgcctccaaggaggccggagagacccgtaggcccgctcacccatacacgtggggattctccaaaaatcgacctcgctgggtccagtctgtctggaatcctcgacaaggacctgtctgatcgaagtaacgacattgacctggaggggttcgacagtgtggtctcgtctacagagaaactgtcccaccccactacatcaagacctaaggctaccggacggcgaccacctagccagtcactgacctcaagctctctgagctcccctgatatctttgacagtccaagccccgaagaagacaaggaggagcatatctccctcgcacataggggcgtcgacgcctcaaagaagacgagcaaaacagtcactatctcacaggtctccgataacaaagcatctttgcctcctaaacctggaactatggccgccggaggcggaggaccagcaccactgtcttcggccgcaccatctccactgtccagttccctgggtacagccggccaccgcgcaaattcacctagcctttttggtaccgagggaaagccgaaaatggagccagcagcctcttctcaagctgcagtggaagagctgcgcacacaggtcagagaactgaggagtatcatcgaaacgatgaaggatcaacaaaagagagagatcaagcagctgctctcagaactggacgaggaaaaaaaaatcaggcttagactacagatggaggtgaacgacattaaaaaggctctgcagtcaaagtag

SEQ ID NO: 134224 - DNA, 1953 bp, synthetic construct
  misc_feature 1..1953: note = Description of Artificial Sequence: Synthetic coding sequence
  source 1..1953: mol_type = other DNA
atgaaaaaagatcctctgactaataaagcaccggagaagcccctgcatgaggtcccttcaggcaatagcctgctctctagcgagaccattctgagaacaaataagaggggcgaacggaggcgcagaagatgccaggttgccttttcttatctgccccagaacgatgacgagctggagctgaaagtgggcgatatcattgaagtggtgggcgaggttgaggagggatggtgggaaggcgtcctgaacggtaagacaggaatgtttccgagcaattttattaaggagctcagcggcgagtctgatgagttgggaatttcccaggatgagcagctgagcaaaagcaggcccgagggtctcccacctgcttccttactgcccttcccggcacatggagccaaaggcaagaccacatttgagggaactattctatacagagccgccccgggcaaaacagaaggacaccgcaggtactatagtctgagagagactacaggctctgagtccgatggaggcgatagcagctcaaccaagtccgagggggccaatggcacggttgctaccgctgcaatacagcccaagaaagtgaagggcgttggcttcggtgacatatttaaagacaaacctatcaagctccggccacgcagcattgaggtggaaaatgatttcctaccagtcgagaagacaatcgggaagaagctgcccgccacaacggcgactccagatagctctaaaacagagatggacagcagaacgaaaagtaaggactattgcaaggtgattttcccttatgaggcccagaatgatgatgaacttacaattaaagaaggagatatcgtcaccctgatcaacaaggattgtatagacgtgggatggtgggaaggcgagctgaatggtcgaagaggcgtgttccccgataactttgtgaagctgcttcccccagattttgaaaaggaggggaaccggcccaaaaagcctccgcctccttcagcccccgtgattaaacaaggggccggaaccactgagcggaagcatgaaatcaaaaaaatcccacccgagcgtccagaaatgctcccaaaccggaccgaagagaaagaacggcctgagcgagagcctaaacttgatcttcagaagcccagcgtacccgccatccctcctaaaaaaccccggccgcccaaaaccaactccctatctaggcctggagcattaccaccaagacggccggaacgcccggtgggtcccctgacacacacacggggagacagccccaagatcgatcttgctggttctagcctttctggaatattagacaaagatctctctgatcggtccaatgatatcgatctggaaggattcgacagcgtggtgagctccacggaaaagctctctcatccgacgacttctagaccaaaagcgaccggtcgtaggccacctagccagtctctcaccagcagctctctgtcaagccccgatattttcgattctccatcccccgaggaggataaggaggaacatatttcactagcccaccgaggagtggacgcaagcaagaagacgtcaaagaccgtcaccattagccaggttagcgacaataaagccagcctacccccgaaacccggcactatggcggctggcggcggcgggcccgccccactgagctcggccgcaccatcgcccctatctagctctctgggaacagccggccatcgggcaaacagcccatctttgttcggaaccgaggggaagcccaagatggagcccgcggctagctcccaagccgccgtggaggaactgagaacgcaggttcgggaactgagaagcatcatcgagaccatgaaggatcaacaaaagagggagatcaagcagcttctcagcgaactggacgaggaaaagaaaatccgccttagactgcagatggaggtgaacgatattaaaaaggccttacagtccaaatag

SEQ ID NO: 134225 - DNA, 1284 bp, synthetic construct
  misc_feature 1..1284: note = Description of Artificial Sequence: Synthetic coding sequence
  source 1..1284: mol_type = other DNA
atgggcgaggagacaattggcaaaaagcttcctgccaccaccgccacacccgactcctcaaaaactgagatggattcacggaccaaatctaaggattactgtaaggtaatctttccttacgaggcccagaacgatgatgagctgacgattaaggaaggggacatcgtaacgctgatcaataaggactgcatagacgtgggctggtgggagggagagctgaacggcaggcgcggtgtatttcccgacaattttgtgaagctcctacctcccgatttcgagaaggaaggaaatcgaccaaagaaaccacccccccctagcgcacctgtaatcaaacaaggagccggcacgacagagcgaaagcacgaaatcaagaaaatcccacccgagcgtcctgagatgctgccaaatcgaactgaagagaaagagagaccagagcgtgaacccaagctggatctgcagaagcccagcgtccctgccatccccccaaagaagccgaggcctcctaagaccaactcgctgagccgtcccggagcgctgcctccacgccgacctgaaagacctgtgggccccctcacccatacgcgaggcgactcgccgaaaattgacctcgcaggctcgtctctatctggtattcttgacaaggacctgtccgaccggagtaatgatattgacctggaaggttttgattccgtggtgtcttcgacagaaaaactgtctcaccccactacctccaggccaaaagcaaccggcaggcgtccgccatctcagtccctaacatctagttcgctgagcagccccgatatcttcgacagccctagtcctgaagaagataaagaagaacacattagcttggcccaccggggggtcgatgcatccaagaaaacatcaaagaccgtcaccatttctcaagttagtgataacaaagcctctctgccccccaagccagggaccatggctgctggtggcggcgggcccgctcctctaagcagtgccgctccttcgccactgtcctcgagcctggggacagccgggcaccgcgcaaacagcccaagtctcttcgggacagaggggaaacccaaaatggaacctgcggccagttcccaggctgcagttgaggaactgcgaacacaggtgcgtgaattacgctctatcattgagacgatgaaggatcaacagaaacgagagataaaacaactgctgagcgaactggatgaagagaagaaaatccgcctgagactgcagatggaggtgaacgacattaaaaaggccctccagagcaagtag

SEQ ID NO: 134226 - DNA, 1938 bp, synthetic construct
  misc_feature 1..1938: note = Description of Artificial Sequence: Synthetic coding sequence
  source 1..1938: mol_type = other DNA
ctgacaaacaaggccccggagaaaccgctgcacgaggtgccgtctggcaactcccttcttagcagtgaaaccattctgagaacgaataaacggggcgagcgtcggcgtaggagatgtcaggtcgctttttcctacttgccccagaatgatgatgagctagagctgaaagtgggcgacatcattgaagtcgtgggcgaagtcgaggagggttggtgggagggagtgctaaacgggaagacaggcatgttcccgtcaaacttcattaaagagctaagtggcgagtctgacgagcttggcatcagccaggacgagcaactttcaaagtcacggccagagggtctcccccccgcttctcttctgccctttccagcccacggtgccaaggggaagaccacattcgaaggcactatcttatatcgcgccgccccaggaaaaaccgagggtcatagacggtattactccctccgtgaaaccaccggatctgaatccgatggaggggattctagtagcacaaagagcgaaggcgccaatggcactgtcgcaacagctgccattcagcccaagaaagtgaagggcgttggcttcggggatatattcaaggataaaccaatcaagctgcgccccaggtcaatcgaggtcgaaaacgacttcttgcctgttgaaaagaccatcgggaagaagctgcctgcaacgacagccactccggattccagtaaaacagaaatggattcacgtacaaagtccaaggattattgtaaggtgatctttccatacgaggcgcagaacgacgatgaactgaccattaaggagggagatattgtaaccttgattaataaggattgcattgacgtggggtggtgggagggcgagctcaacggccgcagaggcgtattcccagacaactttgtgaagctgctgccacccgattttgaaaaggagggaaataggcccaaaaaacccccgcccccgagcgcacccgtaatcaagcagggcgcaggcactactgagcgcaaacacgaaatcaaaaagataccacccgaacgacccgaaatgctcccgaatagaaccgaggaaaaggagaggcctgaacgggaaccaaagctggatctgcagaaaccttcagtccccgccattccacctaaaaagccccggccccccaaaacgaattccctttcccgcccaggagccttaccaccaagacggccagaacgccccgtgggccctcttacccacacccgaggcgattcacctaagatcgacctggctggtagtagtctgtcaggcattttggataaagacctgagcgatcgctccaatgacatcgatctagagggtttcgacagcgtggtgtcttcgactgagaagctctctcacccaacaacatcaaggcccaaagccaccggtcgaaggcccccttcccagtctcttaccagttccagcttgtcgtcgccagatatttttgactctccatcaccagaggaagataaggaggagcatattagtctcgcccatagaggtgttgacgcatctaaaaaaactagtaagaccgtcactatttctcaggtgtccgacaataaggcttccctgcctccaaagcccggcactatggccgcaggaggggggggcccggctccactgagttctgcagctccctcaccactatcttctagcctgggcacagccggtcaccgggcaaactcgcccagcttgttcgggaccgaagggaagcctaagatggaacctgctgcatcatcccaagccgcagtggaggagttgagaacccaagtgcgcgaactgcgaagcatcatcgagactatgaaagaccagcagaagagggagattaaacagctgttgtcagagctcgacgaggaaaagaagattcgtttgcggttgcaaatggaagtgaatgacattaaaaaagcactacagagcaagtag

SEQ ID NO: 134227 - DNA, 450 bp, synthetic construct
  misc_feature 1..450: note = Description of Artificial Sequence: Synthetic coding sequence
  source 1..450: mol_type = other DNA
ttcgagacatccgaacgtcgtagacgcagatgccaagtggccttttcttatttaccacagaacgatgatgagctcgaactgaaagtgggagatataatcgaggtggtcggggaggtagaagagggttggtgggagggtgtcctgaatggcaagaccggcatgtttccgagcaacttcatcaaggagctgagcggcgaatcggatgagctcggaataagtcaggacgaacagctgtcaaagtcatcccttagggagaccacaggaagtgagtctgatggcggagactcctcatctactaagtctgagggcgctaacggcaccgtagccactgccgcaattcagcccaaaaaagtcaaaggcgttggattcggggacatcttcaaggacaaaccaattaaactccgccctcgctctattgaggtggagaatgattttttacccgttgaatag

SEQ ID NO: 134228 - DNA, 1998 bp, synthetic construct
  misc_feature 1..1998: note = Description of Artificial Sequence: Synthetic coding sequence
  source 1..1998: mol_type = other DNA
atggtagaggcaatagtcgaattcgactaccaagctcagcacgacgatgaattgactatttcagtcggagagattattaccaacataagaaaggaagacggcggatggtgggaaggccagattaatggaaggaggggcctttttcctgataattttgtgagggagatcaaaaaagaaatgaaaaaagacccccttactaataaggcaccggaaaaaccattacatgaggtgccctctggtaactctttattgtctagcgagactatcctgcgcacaaacaaacgaggggagaggaggagacgccgttgccaggtggcttttagttatctgccccaaaatgatgacgagctggaactgaaggtgggggacatcattgaagttgtgggagaagtggaagaaggatggtgggaaggcgtcttaaatgggaagacaggcatgttcccctctaatttcataaaggagctaagcggcgaaagcgacgaactgggcatttcccaggatgagcaactgagtaaatcctccttaagggagacgactggctctgaatccgatggaggggactcctccagcaccaagagtgagggggccaacggtacggtcgcaactgcagccattcagccaaagaaggtcaaaggggtgggttttggcgatatctttaaggacaagcccatcaagttaagaccaagaagcattgaggtcgagaatgatttcctccctgttgagaaaaccattggcaagaagctcccagcaactaccgctacccccgactcctccaagaccgaaatggactcccgcacaaagtccaaggactattgcaaagtaatattcccctacgaggctcagaatgacgacgagctgactataaaagagggcgatatcgtaaccctgattaataaggactgtatcgacgtcgggtggtgggaaggcgagctaaatggaagacggggcgtgttccctgacaattttgtgaagctgctgccacccgattttgagaaggaagggaatcgacctaaaaaaccaccacccccctctgctcccgtaattaaacagggcgctggcacaaccgagcgcaaacacgagataaagaagattccccccgagaggcccgagatgctacctaatcgaaccgaagagaaagaacgacctgagcgcgagcccaagcttgatctccagaagccctcagtgcctgcaattccccctaaaaagcctagacctcccaaaacgaatagtctgtctagacccggagcactgccacctagaaggcctgaacgtccagtcgggccgcttacccacacacgtggcgacagtcctaagatcgaccttgccggtagctccctgagtggcatactggacaaagatctctcagatcggtccaacgacatcgacctagagggattcgacagcgtcgtcagcagcaccgagaagctttcccaccctaccactagtagacccaaggctaccggccgacgccctccctcccagagtcttacatccagcagtttgtctagcccagacattttcgacagtcccagccctgaggaggacaaagaagagcatatctctttggcccaccgtggggtagatgcatcaaagaaaacttcaaaaacagtcactatcagtcaagtcagcgacaacaaggctagtctgccacccaagccgggaaccatggctgctggcggaggcggacccgctcccttatcttcagccgcccctagccccctgagttcctcactgggcacggccggccatcgtgccaattccccttccctcttcggaactgagggcaagccaaaaatggaacccgccgccagttcacaggctgcagtagaggagctgcggacgcaggttcgcgagttaagatccatcatcgaaaccatgaaagaccagcagaagcgcgaaataaagcagctgctgagcgaactcgacgaagagaaaaagattcgtctgcgtctccagatggaggtgaacgatatcaaaaaagccttacagtccaagtag

SEQ ID NO: 134229 - DNA, 450 bp, synthetic construct
  misc_feature 1..450: note = Description of Artificial Sequence: Synthetic coding sequence
  source 1..450: mol_type = other DNA
atggagcggtcagagaggagaaggagaaggtgccaagtagcctttagctatcttcctcagaacgacgatgagctggagctaaaagtgggggatatcatagaggtagtgggcgaggtcgaggaggggtggtgggaaggagttctgaacggtaagacaggcatgtttccatccaatttcataaaggaactgtccggggagtcggatgagcttggaatatcccaggacgagcagctctctaagtcgtctctaagggagactaccggcagcgaaagcgatggcggggactcttcatccaccaaatctgaaggggctaacgggacggtggccaccgccgccatccaacctaagaaggttaaaggagttggttttggggatattttcaaggacaaaccaattaagctgcggcctaggagcatagaagtcgaaaacgactttcttccagtggaatag

SEQ ID NO: 134230 - DNA, 627 bp, synthetic construct
  misc_feature 1..627: note = Description of Artificial Sequence: Synthetic coding sequence
  source 1..627: mol_type = other DNA
atggagataaaaaaggaaatgaaaaaagatcctttgactaataaggctcctgagaagcccttacacgaagtgccgtcaggcaatagccttctgagctccgaaacaattctgagaacgaacaagagaggtgagaggaggcggcggagatgtcaggtggccttttcgtacctaccccagaatgacgatgagctcgagctgaaagtgggggacatcatcgaggtggtgggcgaggtcgaggagggttggtgggaaggtgtgctcaatgggaagacagggatgtttcctagtaacttcataaaagagttgtccggcgagtccgacgagctgggcattagtcaagatgagcaactttccaagtccagtcttagggagactactggttccgagagcgacggcggtgacagctcatcaactaaatcagagggcgctaatgggactgtagctactgctgccattcagccgaaaaaagttaagggcgtgggtttcggggatatcttcaaggacaaaccgattaaactacgcccgcggtccattgaggttgagaacgacttcctccccgtggagaagaccatcggcaagaagttgccggctaccaccgcgaccccagactcatctaaaaccgaatag

SEQ ID NO: 134231 - DNA, 1215 bp, synthetic construct
  misc_feature 1..1215: note = Description of Artificial Sequence: Synthetic coding sequence
  source 1..1215: mol_type = other DNA
atggatagtcgcacgaagtccaaggattactgcaaagtgatcttcccatatgaagcccagaacgacgatgaattaactataaaagagggcgacatagttaccctgatcaacaaggattgtattgatgtgggatggtgggagggtgaacttaatggacggcgtggggttttccctgataactttgtgaaattgctgccgcctgacttcgagaaagaaggaaacagacccaagaagcctcctccaccgtcagccccagtcataaagcaaggggccggcacgactgagcgcaagcatgaaatcaaaaagatccccccagaacgcccggagatgctgcctaaccggacggaggagaaggaacgcccagaacgggagcccaagctggatcttcagaaacccagtgttccagccatcccacccaagaagccacgacccccaaaaaccaatagcctctcccgtcccggggccttgcctccccgccggccagagaggcctgtggggcctcttacccatacacgaggggacagtccaaagatagacctggccggttcgtcactctccggcattctggataaagatttgtcagataggagtaacgatatcgatctggaaggtttcgatagtgtggtttcgtcgaccgaaaagctgagtcatcctacgacctctcggcccaaggctacaggacggcgacccccctcacagtcactcacctcatccagtctgtccagccctgacatctttgatagccccagcccagaggaagacaaagaggagcacatctccctagcgcataggggggtggacgccagcaaaaaaacctctaagactgtgaccatctcacaggtcagcgacaacaaagccagtctgccacccaagcctggtacaatggctgcaggcggtgggggcccagctcctctgtcaagcgctgccccgtcacctttgtctagttctcttgggacggctggccaccgggccaattcccccagcctttttggcacagaggggaaacctaaaatggagccagcagccagtagtcaggcagcggtcgaggagctgaggactcaagttagagaactccgcagtatcatcgagaccatgaaggaccagcaaaaaagagagattaaacaactgctgtcagagcttgacgaggagaagaaaatccgtttacgtctgcaaatggaggtgaatgacataaaaaaggcgttgcagagcaagtag

SEQ ID NO: 134232 - DNA, 456 bp, synthetic construct
  misc_feature 1..456: note = Description of Artificial Sequence: Synthetic coding sequence
  source 1..456: mol_type = other DNA
atgaactgggcccctgcaacctgctgggccctcctgctggccgctgccttcctgtgcgactcaggggccgcaaaaggtggccgcggtggggcccgaggctcagctcggggcggtgtcagagggggagctcggggagcaagccgggtgcgtgtcaggccagcacagagatacggggcccctggcagcagtctgcgggtggccgccgctggggcggctgccggtgcggcagcaggtgccgccgccgggctcgccgcgggcagcgggtggcgaagagctgccggtcccggcgagcgaggcctcgaggacgaggaagacggcgtccctggcggaaacggcacgggtcccggtatttacagttaccgggcttggacctcaggcgcgggtcctacacgaggccctagactctgtttggtgctaggaggtgcccttggggctttgggactactccgaccctag

SEQ ID NO: 134233 - DNA, 456 bp, synthetic construct
  misc_feature 1..456: note = Description of Artificial Sequence: Synthetic coding sequence
  source 1..456: mol_type = other DNA
atgaactgggctccagccacatgctgggctttgctattggcggccgcttttttatgcgatagcggtgcagccaagggaggacgcggaggggctcggggctccgccaggggcggtgtgcggggaggggcccggggcgcttctagggtcagagttagacctgcacaacggtatggtgcccctggttccagcctgcgagtagcagcagccggcgctgccgctggggcagctgcgggggcggcagctggcctggcagccggttctgggtggcgcagagccgccgggccaggcgaaagaggtctcgaagatgaggaggatggggttcccgggggtaacggaaccggcccaggaatctactcctatagagcatggacgtccggcgctgggccgactagaggccctcgcctatgcctcgtattgggtggcgctttaggcgcgctgggcctgctgcggccttag

SEQ ID NO: 134234 - DNA, 981 bp, synthetic construct
  misc_feature 1..981: note = Description of Artificial Sequence: Synthetic coding sequence
  source 1..981: mol_type = other DNA
atggcaccacctgcgggtggagctgcagcggccgctagcgatctgggctcagccgcggtgctgctagctgtgcacgccgcggtgaggccgctaggcgccggccctgatgccgaggcacagctgaggcgtctccagctctccgccgatcccgaacgcccagggaggttccgactggagctgcttggcgcaggccctggtgccgtgaatttggagtggcctttagaaagcgtcagctacacaataagggggcccacccaacatgaattgcagcctcctcctggaggaccggggacactatctctgcacttcttgaatccccaggaggctcaacggtgggccgtgcttgtccgcggagctaccgtagaaggtcagaacggctccaaatccaactcccctcccgccttaggacccgaagcttgtcccgtgtcactgccaagcccccccgaggcttccactctgaagggcccaccccctgaagccgacctgccgcggagcccaggtaacctgacggagagagaagagttggccggtagccttgccagggccatcgccggcggtgacgagaagggggccgcgcaagtagctgctgtgctcgcacagcacagagtggcactgtccgtgcagctacaggaagcttgtttccccccaggaccaatccgcctgcaggtgacgcttgaggacgccgccagcgctgccagtgcggcgtcctccgcccatgtggctctccaggtgcatccccactgcaccgtggctgccttgcaggaacaggtatttagcgagctcggattccccccggccgtacagcgctgggtcatcggtaggtgtttgtgtgtgccagaaagatcactggccagctatggggttaggcaggatggagatccagcttttctgtaccttctctccgccccaagggaggccccggcccaacttgtgctcagcttcctgcacctgcaccaatgtcccagaccgccttggctgtag

SEQ ID NO: 134235 - DNA, 1164 bp, synthetic construct
  misc_feature 1..1164: note = Description of Artificial Sequence: Synthetic coding sequence
  source 1..1164: mol_type = other DNA
atggccccgcccgcaggaggtgctgctgcggctgccagtgatctaggtagcgccgcagtgcttctggctgtccacgcagccgttcgccctctgggggccggccccgacgcggaagcccaactgaggcggctgcagttgtccgcggaccccgagcggccgggcaggttccgtcttgagctgctgggagccggacccggggccgtgaacctggagtggccgctggagagcgtttcttacacaattcgaggcccaacccaacacgaactccaacctccaccagggggcccgggaacccttagcttgcattttctgaacccccaggaggcccaacggtgggcagttctggttcggggtgccactgtggaggggcagaacggttctaagtctaacagcccacccgccctgggccctgaggcttgccccgtgtccctccccagtccccccgaggcctctaccctaaagggccccccccccgaggccgaccttccaaggagcccagggaacttgaccgagagggaagaactcgcaggctcactggctagggcaatagctggtggcgacgaaaagggcgccgcgcaagtagctgcagtgctggcccaacatcgcgttgcactctccgttcagctgcaggaggcctgttttcccccggggcctataaggctacaagtgaccctcgaggacgcggcctctgcggctagcgctgcatccagcgctcatgtcgccctccaggtgcacccacattgcaccgttgctgcactgcaggagcaagtcttcagtgaattgggttttccgccggccgtgcagcggtgggtgatcggtcggtgtctttgcgtacctgaacgctccctggccagctatggagttcggcaggatggcgaccccgcatttctgtacctgctcagtgcccctagagaagcccctgcaacaggcccctcccctcagcacccccaaaagatggatggcgaactcggaagacttttcccaccctcattggggctgccccctggtccacagcccgcggccagcagcctgcccagccccttacagccctcttggtcctgtccctcgtgcactttcatcaatgcccccgaccgaccgggttgcgagatgtgcagcacgcagcgcccttgtacatgggatccccttgccgctgccagcacctag

SEQ ID NO: 134236 - DNA, 2019 bp, synthetic construct
  misc_feature 1..2019: note = Description of Artificial Sequence: Synthetic coding sequence
  source 1..2019: mol_type = other DNA
atggcagacgggtccctgacaggcggtggtctggaagccgctgcaatggcacccgagagaatgggctgggcagtggagcaggaactcgcttctttagaaaaagggctgtttcaggacgaagacagctgctcagattgttcttatcgagacaaacctggcagcagcctgcagtctttcatgccagagggcaagacattcttcccggaaatctttcagaccaatcagctcctgttttacgagcgctttagagcctatcaggattatatcctggctgactgcaaggccagcgaggttcaagaatttacagccgagttcttagagaaagtcctagaacccagcggatggagagctgtgtggcatacaaacgtgttcaaagtccttgttgagattacagacgtggacttcgctgctctgaaggccgtcgttagactcgcggagccatacctctgcgacagtcaggtaagcacgtttaccatggagtgcatgaaggaattgctggacttaaaagagcatcgattaccgctgcaagagctgtgggtcgtgtttgacgatagtggggtgtttgaccaaacggcactggctatcgaacacgtgcggttcttttatcagaacatatggaggtcctgggacgaggaagaggaggacgaatacgattattttgtgcggtgcgtggaaccacgtctgagacttcattacgacattctggaggacagggtcccttctggtctgatcgttgactaccataaccttcttagtcaatgcgaggaatcctatcgcaagttcctgaacctgagatccagccttagcaattgtaactcagactctgaacaagagaatatctctatggtggagggtctaaaattgtatagtgagatggagcaattgaaacagaagctcaagctcatcgagaaccctctgctccgctacgtgtttggctatcagaagaactctaatatacaggctaagggtgtgcgaagctccggtcagaaaatcacacacgttgtctctagtaccatgatggctggtctgctgcggagccttcttaccgacagactgtgccaggagcccggtgaggaggaaagggaaattcagtttcattctgaccccttgagcgcgattaacgcctgtttcgaaggggataccgtgattgtgtgccccgggcattacgtggtccacggcacattcagtatcgccgacagtatcgaactggaaggttacggcctgcccgatgacatagttatagagaagaggggaaagggagacacgttcgtggattgtaccggagccgatataaagatctccggaattaagtttgtacagcatgacgcggttgagggaattctgatcgttcacagaggcaagacaaccctggagaactgtgtgttgcagtgcgagactacaggcgtaacagtgcgcacatcagccgagtttctgatgaagaactcagatctgtatggcgctaaaggcgcaggtatcgagatatacccaggaagccagtgcacactctctgataacggtatacaccactgcaaagagggcatccttatcaaggacttcctggatgaacactacgacatcccaaaaatatcaatggtaaacaacatcatccataacaacgaaggctacggagtggtattggtcaagccaacaatctttagcgatcttcaggagaatgcagaagatggaacagaggaaaataaagccctcaaaattcagactagtggcgaacccgacgttgctgaacgggtagatttggaagaactgattgaatgcgccacaggcaagatggagctgtgcgcccgtaccgaccccagcgagcaggttgaggggaattgtgaaattgtgaatgaacttattgctgctagcactcagaaaggccaaattaaaaagaagaggctgtcggaactgggaatcactcaggccgacgacaacctgatgtcacaagagatgtttgtgggaatcgttggcaaccaatttaagtggaacggaaaaggatcattcgggacgttcctgttctag

SEQ ID NO: 134237 - DNA, 723 bp, synthetic construct
  misc_feature 1..723: note = Description of Artificial Sequence: Synthetic coding sequence
  source 1..723: mol_type = other DNA
atgaccgctcccgtgcccgcgccacgaatcctcctcccgctcctcctgctgcttctgctgactccacccccaggggcccgtggcgaggtctgcatggcctcgagaggcttgtccttgttcccggaatcttgtcccgatttctgttgtgggacctgcgacgatcagtactgctgttctgacgtgctaaaaaaattcgtgtggagcgaggagcgctgtgccgtgcctgaggcatccgttcccgccagtgtcgagccagtggagcagctggggagtgcattacgattccggcccggatacaatgatccgatgagtgggttcggggctactttggctgtaggtctgacaatcttcgtcttatccgtggtcacgattatcatctgcttcacctgcagctgttgttgcctgtataagacttgccgacggccccgccccgtcgtcaccacaaccacctccaccaccgtggtacacgctccatacccccaaccaccatcagtccccccctcctaccccggaccatcttaccaggggtaccatacaatgcccccccaaccagggatgcctgctgcaccatatccaatgcagtatccccctccctaccctgcccagcccatggggcctcctgcatatcacgagacactggcaggcggcgctgccgctccttaccccgctagccagcccccctacaacccagcatacatggatgcccccaaggcagcactctag

SEQ ID NO: 134238 - DNA, 339 bp, synthetic construct
  misc_feature 1..339: note = Description of Artificial Sequence: Synthetic coding sequence
  source 1..339: mol_type = other DNA
atggcgagccggggtctctctctctttccggaaagctgtccagacttttgctgcggcacctgcgatgatcagtattgctgctcagatgtgctgaaaaaattcgtctggagcgaggagcgttgtgcagtcccagaggcatcagtccctgcttccgtggagcccgtagagcagctaggatccgctctgaggtttagaccaggatataacgatccaatgtccgggtttggtgctaccctggccgtgggtttgaccatcttcgtcctctccgttgtgacaatcattatctgcttcacctgctcctgctgctgcctgtacaaaacgtgtaggcggccaaggtag

SEQ ID NO: 134239 - DNA, 414 bp, synthetic construct
  misc_feature 1..414: note = Description of Artificial Sequence: Synthetic coding sequence
  source 1..414: mol_type = other DNA
atgggatttggggccaccctggctgtagggctgacgatattcgttctgagcgtggtgactattattatctgtttcacatgtagctgctgctgcctgtacaaaacatgccgcagacccaggcctgtggtgacaaccaccacgagtaccacagtggttcacgctccttacccgcagccaccgtccgtacctccttcctacccaggacctagctatcaggggtatcacaccatgcctccccaacccgggatgcctgccgccccctaccccatgcagtacccccccccatacccagctcaacctatgggaccacctgcttaccatgagacactcgcgggcggagcagccgctccgtaccccgccagtcaacccccctataatcccgcgtacatggatgctccaaaggcagctctctag

SEQ ID NO: 134240 - DNA, 630 bp, synthetic construct
  misc_feature 1..630: note = Description of Artificial Sequence: Synthetic coding sequence
  source 1..630: mol_type = other DNA
atggcctcacgcgggctgtctttgtttcctgagtcttgcccagacttttgttgcggaacctgcgacgatcagtactgctgctccgatgtattgaagaaattcgtctggtcggaggagcgctgcgccgtcccggaagcctctgttcccgccagtgtggagccagtcgagcagctgggaagtgcattgagattccgccctggatacaatgatcccatgagtggcttcggtgctaccctggctgtgggtctgactatcttcgtgctgagcgtggtgaccattattatttgtttcacgtgttcctgttgttgcctgtacaagacctgtaggagacctaggcccgtcgtcactacgaccacctccaccacggtggtgcacgcaccttacccacagcctccttcggtgcccccatcttaccccggccctagctatcaaggctaccatactatgcctccccagcctggtatgcccgctgcgccctatccaatgcagtatccgcccccatacccggctcagccaatgggcccacccgcataccatgaaacactcgcgggaggtgccgcagccccataccctgccagccaacctccttacaacccggcctacatggacgcacccaaggctgccctgtag

SEQ ID NO: 134241 - DNA, 630 bp, synthetic construct
  misc_feature 1..630: note = Description of Artificial Sequence: Synthetic coding sequence
  source 1..630: mol_type = other DNA
atggcctcacgaggcctgtccctcttccctgagtcctgtccagacttttgctgcggtacctgcgatgaccagtattgctgctctgacgtactgaagaagttcgtctggagtgaagagcgctgtgctgtcccagaggcaagcgttccggcgagcgtggaacctgtggagcagctggggtcagcgctgcgttttagacctggatacaacgacccaatgtctgggttcggcgctacactcgccgtcggcctcactattttcgttctgagtgtggtgacaatcattatctgctttacgtgtagctgttgttgcctgtataagacttgccgtcgccccagacccgtcgtgactacaactacttccactacagttgtgcatgcaccctacccacagcctccaagcgtgcccccctcatatccgggaccatcttaccagggatatcacactatgccaccacagcctggaatgccagctgccccttatcccatgcagtaccctccaccatatccagcccaacctatgggaccacccgcttaccacgaaaccttggcgggtggtgcagctgccccgtatccggcatcccagccaccttacaatcccgcctatatggacgccccaaaagctgccctttag

SEQ ID NO: 134242 - DNA, 513 bp, synthetic construct
  misc_feature 1..513: note = Description of Artificial Sequence: Synthetic coding sequence
  source 1..513: mol_type = other DNA
atgcctccacagccaggctgccagcaacaccctacacagtgctctactcatcatcttacacagccctcaccctgggctcatcggcccactaccaggccctggcttgaagagcaaccccggcccacgccgcccgctagcctgcttaccacaagaccaacctggatgccgcgagggggccccctttcgatcccatggccgctctggctgccactgggttacgtcgtgtgtgtcagagagtggtgtgctggagccgtgccctatgcgccgtgtgtgctgtgcgtttcctgcctctacatgtggctgccactcatgttgaccagatgggggaccatccttgcccgggtgggctgggaccaaacacttttttcttcttcaccagaaatcatgctgcccaagatatcttctcagacccagcgaatgggatggtggggagccccctgcgaggtcgccccagaaagatggggacctttacagggtacaagtggcgtgcttctgcagcttaccctcggctag

SEQ ID NO: 134243 - DNA, 666 bp, synthetic construct
  misc_feature 1..666: note = Description of Artificial Sequence: Synthetic coding sequence
  source 1..666: mol_type = other DNA
atgcgccgggttttgagacttttgttgggttgcttcctcaccgagctgtgcgctcgagtgtgccgcgctcaggagcgcgcgggccatggacaattggctcagctaggaggagtgctgctcttggccggaggtaatcggagcggagcggcgtctggcgaggcttctgagggggctgaggcttcagatgcaccccccactcgtgcccccacacctgatttttgtcgcggttacttcgacgttatgggccaatgggacccaccattcaactgttcttcaggcgatttcattttctgttgcgggacctgtggatttcgcttctgctgcacgttcaaaaaaaggcggcttaatcaatcaacatgtaccaactatgacactccgctatggctaaacacgggtaagccacctgcgcggaaagacgatccacttcatgatcccactaaagataaaaccaacctgatcgtgtacatcatttgcggcgtggttgccgtgatggtacttgtgggtattttcaccaaactcggacttgaaaaggctcatcgccctcagcgggagcatatgtcaaggctctacgacaacttattgtttatggaagctcaaatttcttttcaggaggacgaacctgcccccggcgagtggtcagtgggcttgcagacatggacggtgtag

SEQ ID NO: 134244 - DNA, 1275 bp, synthetic construct
  misc_feature 1..1275: note = Description of Artificial Sequence: Synthetic coding sequence
  source 1..1275: mol_type = other DNA
atgcggcgagtgctgaggctcctactcgggtgctttctgacagaactttgcgctcgggtctgcagagcacaggaaagggccggccacggtcaattagcgcagctgggtggggtgttattgttagcaggagggaatcggtcaggagcagccagcggtgaggcatcagagggagccgaggcgagtgatgcccctcccactcgggcccccacacccgatttctgtcgcggctatttcgacgtaatgggacagtgggaccctcctttcaactgcagcagcggagacttcatcttctgctgcgggacctgcggattcaggttttgttgtaccttcaaaaagaggaggctcaaccaaagtacatgcaccaactatgatactccgttgtggctcaatacaggaaaaccaccggcacgtaaggatgaccctctgcacgatcctaccaaggacaagaccaacctcatcgtttatatcatctgcggcgtggtcgccgtgatggtgttagtgggtattttcacaaaactgggactggagaaggcccaccggccccagagagagcatatgagtagggccctcgcggacgtgatgagaccccagggtcactgtaacacagatcatatggaaagagacttgaatatagtcgtgcatgttcaacattatgaaaacatggacacaaggacaccgatcaacaacctccatgccacgcagatgaataacgcagtacctacaagcccccttttacagcagatggggcacccccattcttatcccaacctgggacaaatcagtaatccatatgagcagcagccacctggcaaggaattaaacaagtatgcgtcgctgaaggctgtgggcagctctgatggcgactgggctgtgtctaccctgaagagtccgaaggccgacaaagtgaacgacgacttttatactaagcggcggcacctggccgaattggctgcaaagggtaatcttcccctccatcccgtgcgtgtagaagatgagccccgggctttctctcctgagcacgggcccgccaagcagaatggccagaagtccagaactaacaaaatgccccctcatccactggcatatacctcaactacgaacttcaagggctgggatccaaatgagcagtcgctgcggaggcaggcttactccaataaaggcaaattgggaacagctgaaaccggttcttctgacccgctggggacccgcccccagcactatcctccccctcagccctatttcattacaaattccaagaccgaggtgactgtctag

SEQ ID NO: 134245 - DNA, 789 bp, synthetic construct
  misc_feature 1..789: note = Description of Artificial Sequence: Synthetic coding sequence
  source 1..789: mol_type = other DNA
atgtgcggccctcgccggctcgctgctccaggaagtagcctcggttcattcggacgggcatcccgaggtggacggaggggaagcagcggcggcagggcggccgagcctggcctgggagacactatgcgccgggttcttcggctgctactgggatgctttctcactgagctctgtgctcgtgtgtgtagggcccaggagagggccggccatggacagctggctcaactcgggggtgtcctgctgcttgcgggtggcaacagatctggcgccgcgtctggcgaagcctctgagggcgctgaggcgtcagatgctcctccaacaagagctccaacccccgatttctgtcgtggatatttcgatgtcatggggcagtgggacccccctttcaactgtagcagcggggacttcatcttctgttgtggcacctgcggcttccgtttctgctgtacctttaaaaagcgccgtctgaaccagtctacatgcactaactatgacacccctctttggctgaataccggaaaacccccggcccgcaaggatgaccctttgcatgatcccactaaggacaagacaaatctgatcgtgtatatcatctgtggagtggtggctgtcatggtcctggtggggatcttcacgaagctggggcttgagaaagcgcaccgcccccaacgcgaacacatgtcaagactctacgacaaccttctttttatggaagcccagattagtttccaagaagacgagccagcccctggcgaatggagcgtgggtttgcagacctggacagtgtag

SEQ ID NO: 134246 - DNA, 1398 bp, synthetic construct
  misc_feature 1..1398: note = Description of Artificial Sequence: Synthetic coding sequence
  source 1..1398: mol_type = other DNA
atgtgcggccctcggcgtttggccgcgcccggaagtagtctgggctcgtttgggcgagccagtagggggggccgccgcggctcctccgggggccgggcagcagagcccggcctaggtgatacaatgcgtcgagtgctccggctgctattggggtgtttcctgactgaactgtgtgcccgagtttgtcgggcacaggaacgcgccgggcatggacaattggcccaactggggggcgtactgttgctggcaggcggaaatcggagcggcgctgcatccggggaagccagtgaaggcgcagaggcctccgatgcgcctccaaccagggctcctacacccgatttttgtcgggggtatttcgatgtgatggggcaatgggaccctccatttaactgcagcagtggagattttattttttgttgcggcacctgtggtttcagattttgttgtacatttaaaaagcgacggcttaaccagagcacttgcacaaactatgacacgcctctctggctgaatacaggcaagccgcctgcaagaaaagatgaccccctgcatgacccaactaaagacaagactaacctgatagtctacattatctgcggagttgtggccgttatggttctcgtggggatctttactaaacttgggctggagaaagcacataggccccagcgggagcacatgtcacgcgccttagccgatgtcatgcgccctcagggccattgtaatactgatcacatggaacgagatttgaacatcgtcgtccatgtccaacattacgagaacatggacaccaggactcctatcaataacctgcacgccactcagatgaacaatgccgtgccgaccagcccccttttgcaacagatgggacatccacactcctatccaaatctgggtcagattagcaatccctacgaacagcagccacctggaaaggagctcaataagtatgcttcactcaaagccgtgggctctagcgatggggactgggcagtctcgaccttgaaaagtccaaaagccgacaaggtgaacgacgatttctacacaaagagaaggcacttagctgaactggcagctaaaggcaacctccctctacatcctgtaagggtggaagacgagcctagggcattttcccctgaacacggacctgcaaaacaaaacggtcagaaaagccgcaccaataaaatgcctccccatccattggcttacaccagcacaaccaactttaaaggatgggatcccaatgagcaaagtctgcgtagacaagcctactccaacaagggcaagttagggacagccgaaacgggctccagtgacccactcggcacgcgaccacagcactaccccccaccccagccctatttcatcacgaattccaaaactgaagttaccgtttag

SEQ ID NO: 134247 - DNA, 678 bp, synthetic construct
  misc_feature 1..678: note = Description of Artificial Sequence: Synthetic coding sequence
  source 1..678: mol_type = other DNA
atggaggaactcaccgcatttgtgagcaagtcgttcgaccagaagtccaaggacggaaatggcggcggaggtggtggaggaggtaagaaggatagcattacataccgggaggtgttagaatcaggcctcgcaaggagtagagagctggggactagcgacagctccctccaggacataacagagggtggtggccattgtccagttcacttatttaaagaccacgtggacaacgataaggagaagctcaaggagtttggtaccgccagggttgcggaggggatttacgagtgtaaggaaaagagggaggacgtgaaatctgaggatgaggatggtcagacaaaattgaaacagcgtaggagcagaacaaactttactctggagcagctcaacgaactggaacggctgttcgacgaaacccactatcctgacgcattcatgagagaagagctgagccaaaggctcggcctgtcagaggcgcgagtgcaggtttggtttcagaaccggcgcgcgaagtgtagaaaacaggagaatcaaatgcacaagggggtcatactcgggactgctaatcatttggatgcttgccgggtggccccatacgtgaacatgggtgctctccgaatgccattccagcagatggagttttgtagctgccgaccaggctggagcattatggcatag

SEQ ID NO: 134248 - DNA, 678 bp, synthetic construct
  misc_feature 1..678: note = Description of Artificial Sequence: Synthetic coding sequence
  source 1..678: mol_type = other DNA
atggaggagttgaccgcctttgtttcaaagtcctttgatcagaagtctaaggacggaaacggcgggggcggtggcggcgggggaaagaaagactctataacctatcgcgaggtcctggaaagcggactagcccgcagcagagagctcggaacttccgattcctccctccaagacatcacagagggtgggggccactgcccagtccatcttttcaaagatcatgtagataacgataaggagaagctaaaggaattcggcaccgctcgcgttgccgaggggatctacgagtgtaaagaaaagcgcgaagacgtgaagtctgaagacgaggacggccagacgaagcttaagcaacggcggagtcgaacaaacttcacccttgaacagttaaacgagcttgaacgactgtttgatgagacacactatcctgacgctttcatgcgtgaggagttgagccaacgcttgggtctgagcgaggcgagggttcaggtatggtttcaaaaccgacgtgccaaatgccggaagcaggaaaaccagatgcataagggcgtaatcctgggaacagcgaaccacctcgacgcttgcagagtcgcaccatatgtcaatatgggtgcgctgcgaatgcccttccagcagatggagttttgctcctgcaggcccggatggtctataatggcctag

SEQ ID NO: 134249 - DNA, 879 bp, synthetic construct
  misc_feature 1..879: note = Description of Artificial Sequence: Synthetic coding sequence
  source 1..879: mol_type = other DNA
atggaggagttaacagcattcgtgtcaaagtcctttgaccagaaatccaaggatggcaacgggggcggcgggggcgggggaggcaagaaagattccatcacatatcgcgaagttctggagtcaggcctggccaggagccgcgagcttggcacctctgacagttccctgcaggatataacggaggggggcggccattgtccagtgcacctcttcaaggaccacgtggacaatgacaaggagaaactgaaggagtttggaactgcccgcgtggctgagggcatttatgaatgtaaagagaaaagagaggatgtaaagtcagaggacgaagacggccaaactaagctgaagcagaggcgctcccggacaaatttcaccttagagcagcttaacgagctagagcgactttttgatgaaactcattatcctgatgcctttatgcgagaagagctctcacagaggctcggcctgtccgaagctcgtgtccaggtgtggttccagaacagacgcgcgaagtgtcgtaaacaggaaaaccagatgcacaaaggagtgatattagggaccgctaatcacctggacgcctgtagagtggccccttacgtgaatatgggcgctctccggatgccgttccaacaggtacaggcgcaactccagcttgagggagttgctcacgcacaccctcaccttcacccccacctggccgctcacgctccatacctgatgttcccaccgccgccctttggcctacctatagcctccctagctgagtcagccagtgccgccgccgtcgtagccgcagcggcaaagagcaattccaagaactcttctattgcagacctgcgcctcaaggcccggaagcacgcggaggccttaggattatag

SEQ ID NO: 134250 - DNA, 879 bp, synthetic construct
  misc_feature 1..879: note = Description of Artificial Sequence: Synthetic coding sequence
  source 1..879: mol_type = other DNA
atggaagagctaacagctttcgttagtaagtcgttcgaccagaaaagtaaggacggtaatggaggtgggggcggtggtggagggaaaaaggactcaataacatatcgcgaggtgctggaatccggcctcgcgcgaagcagggagctgggaacatccgattcctcactgcaagatatcactgaaggaggcgggcactgtcctgtccacttgttcaaagaccacgtggataatgataaggagaagctcaaagagtttggcactgcacgtgtagcggagggcatttacgaatgtaaagaaaagcgggaagacgtcaagtctgaggatgaggacgggcagactaagttgaagcaacggcgttcccgaaccaacttcactttggagcaactgaatgagttagagagactgttcgacgagacccactatcctgacgcctttatgcgggaggagcttagtcagaggctgggactgagcgaggctagagtgcaggtttggttccagaatcggcgggcaaaatgcagaaaacaggaaaatcaaatgcacaagggggtaatactcgggacagctaatcacctcgacgcttgtcgcgtggcaccttacgtgaacatgggtgcattgagaatgccgttccagcaggtgcaggctcagttacaactggaaggtgtggctcacgcccacccccacctgcacccacacctggccgctcatgcaccttatctgatgtttcctccgcctccctttggacttcctatcgcatccttggccgaatccgcctccgccgcagccgtggtggccgccgcagccaagtcaaactcaaagaactcttctatcgctgacctgaggctgaaggctcggaagcatgcagaggcactaggtctttag

SEQ ID NO: 134251 - DNA, 573 bp, synthetic construct
  misc_feature 1..573: note = Description of Artificial Sequence: Synthetic coding sequence
  source 1..573: mol_type = other DNA
atggaagatgagggccagaccaagatcaagcagagacggtccagaactaacttcactctagagcagcttaatgaattggaacggctctttgacgaaacccactatcccgacgcttttatgcgggaggagctttctcagcgcctagggctgtccgaggcacgcgtgcaagtgtggtttcagaatcggcgcgccaagtgtaggaagcaggaaaaccagctgcacaagggagttttgatcggcgctgcatcccagttcgaagcctgtagggtggcaccttacgtgaacgttggcgccctgcggatgccctttcaacaggtgcaggcacagctgcagctggatagtgccgttgcccacgcccatcatcatcttcatccacatttggctgctcacgccccttacatgatgtttcctgcccccccgttcggactgcccctggcaactctggctgccgattctgcttcagctgccagcgtcgttgctgctgccgccgcagccaagactacatccaagaatagttccatcgcagatctacggctgaaggcaaaaaaacacgctgcggcattggggctgtag

SEQ ID NO: 134252 - DNA, 996 bp, synthetic construct
  misc_feature 1..996: note = Description of Artificial Sequence: Synthetic coding sequence
  source 1..996: mol_type = other DNA
atggaggaattgaccgcattcgtgtcaaaatcctttgaccaaaaagttaaagagaagaaggaggccatcacttaccgtgaagtgctggagagcggccccctgcgaggcgcgaaggaaccaactggatgtaccgaagccggacgcgacgatcgcagtagcccagcggtgagagccgcgggcggcggcggcgggggaggcggcggcggcggcggtgggggggggggaggaggggtgggcggagggggagcaggcggtggtgcgggcggagggaggtcccctgttcgcgaactggatatgggtgcagcggagcggagcagggagcccggctctccacgcctgacggaggtcagcccggagctgaaggacagaaaggaggacgctaagggaatggaagatgaagggcagaccaagatcaaacaacgcagatcccgaaccaattttaccctcgaacagctgaacgagctggaaaggctattcgacgagacccattatcccgatgcctttatgcgcgaggagctgtcccagcggctcggccttagtgaggccagagtacaggtctggtttcagaatcggcgggcaaagtgccgtaaacaggagaaccaacttcataagggagtactcatcggcgctgcctcacaattcgaggcctgccgcgtggccccgtatgtgaacgtgggcgcactccgcatgccctttcagcaggattctcattgcaatgtgacgcccttaagctttcaggtacaagcgcagctgcagctggacagcgcagtggcacacgctcaccaccatttacacccacacctggcagctcacgcaccttatatgatgttccccgcaccgcccttcggactgcccctggcaactttggccgccgattcggcctcagctgcctccgtagtagcagctgcggcggcagctaaaacaacatccaagaattcctcaatcgcagacctgcgcctcaaggcaaagaaacatgcagcagcgcttgggctgtag

SEQ ID NO: 134253 - DNA, 1068 bp, synthetic construct
  misc_feature 1..1068: note = Description of Artificial Sequence: Synthetic coding sequence
  source 1..1068: mol_type = other DNA
atggaagaactaaccgcttttgtatcaaagagcttcgatcagaaggtcaaggaaaagaaggaggcaattacttatcgggaagtgttggaatccgggcccttgaggggagccaaagagcctacgggatgtacggaggcagggcgagacgaccgatcaagccctgccgtcagggcggccggtggcggtggcggtgggggtggcggtggtggtggcgggggcggcggcgggggggttggcggcgggggggctggagggggggcgggcggggggcgttcgccggtgcgggagttggatatgggggccgcagaaaggagccgggagcctggatctccaaggttgacagaaggtagacgaaagccaacaaaggccgaggtgcaagctaccctgctgctgccaggtgaagcgttcaggttcctcgtttctcctgaactcaaggacagaaaagaggatgcgaagggaatggaggacgaggggcagaccaaaatcaagcaacgcagaagccgcactaactttacgcttgagcagcttaacgaattggaaaggctgttcgatgaaacccactatccagacgccttcatgagagaagagctcagccaaagactgggtctttctgaggctagagtgcaggtgtggttccagaatcgaagagccaagtgccgcaaacaggagaatcagctgcacaagggcgtgttgatcggagctgcgagccagtttgaagcctgtagggtggcaccgtatgtaaacgttggcgcacttcgcatgccctttcagcaggactctcactgcaatgtaacccccctgagttttcaggtccaggcacagctgcagctagattctgctgtggcccatgcccaccaccacctgcatccccatttagcggcccatgcgccttatatgatgttcccagcgcccccgttcggcctgcctttggcaacactggccgccgacagcgcgtccgcagcctcagttgtggctgcagcagccgccgccaaaaccacgtctaagaattcatctatagctgatctacgcctgaaggctaagaagcatgctgctgcgctggggttatag

SEQ ID NO: 134254 - DNA, 573 bp, synthetic construct
  misc_feature 1..573: note = Description of Artificial Sequence: Synthetic coding sequence
  source 1..573: mol_type = other DNA
atggaggacgaaggccagactaaaattaagcagcgacgctcacgtactaacttcaccctggagcaactaaatgagctggagagactgtttgatgaaactcattatccagatgcttttatgcgagaggaactatctcagcgcttggggctcagcgaagctcgagtgcaggtgtggttccaaaacagacgagccaagtgtagaaagcaggaaaaccagctgcataaaggtgtgttgatcggcgcagccagtcagttcgaggcctgtcgcgtggccccttacgtgaacgtcggtgctctgcggatgcccttccaacaagttcaggctcagctgcagctcgactctgccgtggcacatgcccaccatcatcttcaccctcatctggctgctcatgcaccatacatgatgtttcctgctcccccattcggactgcccctcgccaccctggcggccgactccgccagcgcagcatctgtagtagcagctgctgcagccgctaaaaccacctcaaagaacagctcaattgccgatctgaggctgaaggccaaaaagcacgccgccgctctcgggctttag

SEQ ID NO: 134255 - DNA, 573 bp, synthetic construct
  misc_feature 1..573: note = Description of Artificial Sequence: Synthetic coding sequence
  source 1..573: mol_type = other DNA
atggaggatgaaggtcagactaagattaaacagagaagaagccgcaccaacttcactctggagcagttgaatgaactcgaacgcctcttcgatgagactcattaccctgatgccttcatgagagaggaactgtcacagcgcctagggctgtctgaggcgagggtgcaggtttggttccaaaacagacgcgcaaagtgtagaaagcaggaaaatcagcttcacaaaggagtgctcatcggcgctgcctcccagtttgaggcatgcagggtggctccttatgtcaacgtgggtgccctcaggatgccattccagcaggttcaggctcagctccaactggatagtgccgttgcacacgctcaccatcacctgcatccccatctcgcagctcatgctccctacatgatgtttcccgctcctccctttggtctacctctcgctacccttgctgccgattccgcctcggctgcatccgtggttgctgccgctgccgctgctaagactaccagtaagaacagctccattgccgacctcaggctgaaagcaaagaagcatgccgcagcacttggcctatag

SEQ ID NO: 134256 - DNA, 1734 bp, synthetic construct
  misc_feature 1..1734: note = Description of Artificial Sequence: Synthetic coding sequence
  source 1..1734: mol_type = other DNA
atgcttactcccgcattcgacttaagtcaagatcccgatttcctgacgatcgcgatccgtgttccgtatgccagggtcagtgagttcgatgtttacttcgagggctctgacttcaagttttatgcaaagccctatttcctgaggttaacactccctggtcgcatcgtggaaaatgggtctgaacagggttcttatgacgcagataaaggaatctttaccattagactgcctaaggagacacctggtcaacattttgagggtctcaacatgctaacggcacttttagcgccaaggaagtccagaaccgcaaagcccctggtagaggagattggagcttccgaaattccggaggaggtcgtggacgatgaggagtttgattgggaaatcgagcagactccctgcgaggaagtcagcgaatccgccctgaaccctcagtgccactacgggttcggcaaccttcgctctggtgtgctccaacgccttcaggatgaattatctgatgttatcgatatcaaagatcccgatttcacccctgctgccgaaagacgccagaagcggctcgcggctgaactagccaaatttgaccccgatcattatttggcagacttcttcgaggacgaagctattgagcaaatcctcaaatacaacccctggtggaccgataaatactcgaagatgatggccttcctagaaaaaagtcaggagcaggaaaaccatgccaccctcgtgagctttagcgaggaagagaaataccagttgcggaaattcgtgaataaatcttacctgctagacaagagagcttgtcgacaggtctgttatagcctgatcgatattctgctggcttattgttacgaaacccgcgtcacggagggggagaagaacgttgagtctgcctggaatatacggaagttatcaccgacgctctgctggtttgagacctggactaacgtacacgatatcatggtatcttttgggcgaagggtgctttgctaccccctctaccgacactttaagttggtgatgaaagcttacagagacaccatcaaaatcctccagctcggtaagtcagccgtccttaagtgtttgttggacatccacaagatctttcaagagaacgaccccgcttatatactgaacgatctatacatctcggattattgcgtctggatccaaaaagttaagtctaaaaagttggcagcactggcggaagccctgaaagaggtgagtctgacaaaggcccagcttggactagagctggaggagctggaggcagctgccctgcttgttcaggaagaggagactgcgcttaaagccgcgcatagcgtctcgggccagcagacactgtgtagcagtagcgaggcatcagactcggaagactcagactcttccgtgtcgtccggtaacgaggactccggtagtgactctgagcaggatgagctgaaagacagtccctccgagacggtcagttctcttcaaggaccgttcttagaagagtccagtgccttcctcatagtggacggaggtgttcgccggaatactgcgatccaggaaagcgacgcgtcgcaggggaagcctttagctagttcctggcccctaggcgtgtcaggacccctgattgaagaactaggagagcaattaaaaacaaccgtgcaggtgagtgagccaaagggcacaaccgcggttaatagatcaaatatccaagagagagatggatgtcagactcctaataactag

SEQ ID NO: 134257 - DNA, 4851 bp, synthetic construct
  misc_feature 1..4851: note = Description of Artificial Sequence: Synthetic coding sequence
  source 1..4851: mol_type = other DNA
atggagggggcggaacctagggcacggcctgagagactcgctgaagccgaaaccagggccgcagacggcggccgtctggtggaagtgcagctgagcggaggcgcaccctggggctttacactgaaaggaggtagagagcacggtgaaccgctcgtgataacaaagatcgaggagggaagcaaggcagcagcggtggacaaacttttagcgggggatgaaatcgtgggaatcaatgacatcggtctatcaggttttagacaggaagctatatgtttggtcaaaggaagccataagactctgaagttagtagtgaagagaaggtcagaacttgggtggcggccccactcttggcatgctaccaagtttagcgattcccaccctgagcttgctgcctctcctttcacatcaacctccggctgcccctcctggtctggacgacatcacgcatcgtcatcatcccatgacctcagcagctcttgggaacaaactaacctgcaacgcactttggaccacttttcctctttgggatccgtcgacagcttggaccatccttccagcaggctgagcgtcgcaaaatccaatagctccatagatcatctgggttcacactccaaacgtgattccgcatacggaagtttttctaccagctcaagcacacccgaccacaccctgtcaaaggccgacacaagttccgccgagaatatcttatacactgtggggttatgggaggcaccacggcaagggggcagacaagctcaggctgcaggcgacccacaggggtcagaagaaaagctttcctgcttcccacctcgggtaccgggtgactcgggaaagggcccacgtccagagtacaacgctgagcctaaacttgctgcaccgggacgcagcaacttcggccccgtctggtacgtgcccgataagaaaaaagctccttccagtccaccccccccgcctcccccgctgagatctgacagcttcgccgctaccaagtcccacgaaaaggcccaaggcccggtgttcagcgaagctgcagctgctcagcattttactgcactagcccaagcgcagccacgaggagaccgacgtccagaactcacagataggccttggcgcagtgcgcatcctgggagcctagggaaagggtcaggaggccctggatgcccacaggaggcgcatgctgacggatcgtggcctcccagcaaagacggtgcttcctcgcggctgcaggcttcattgtccagctctgacgtgagattccctcaatctccacacagcgggaggcatccccccctgtattctgatcactcaccactgtgtgcggactctctggggcaggaacccggcgcagcttccttccaaaacgatagtccccctcaggtaagagggctgagctcctgcgatcagaaactggggtctggatggcaggggccgcggccatgtgtccagggggatctgcaggccgcacagctgtgggcaggttgttggccctccgacacagcgttaggtgccctggaaagtctgccccctcctacggtcggccagtctcctaggcatcacctccctcaaccggaagggccccccgacgctcgcgagacgggccgatgctatcccctggacaaaggtgcagagggctgtagcgctggagcccaggagccacccagagcgagcagggctgagaaagcctctcagcgactggccgcgagtattacttgggccgatggtgaaagtagccgaatctgcccgcaggagacgcccttactgcattccctcacccaagagggcaagagacgccccgaatcatctccagaagattccgcaacacgtccccccccttttgatgcccacgtgggaaaaccaacgcgacggagcgatagattcgcaaccaccctccgaaacgaaattcagatgcatcgtgcaaagctacagaagtctcgttctactgttgctttaacggccgctggtgaggccgaagacggcacagggcgctggcgcgccgggctgggaggaggtacccaagaagggccccttgccggcacatataaggatcacctcaaggaagcccaagcacgcgtacttcgggccaccagcttcaagcgtcgagacctggatcctaaccctggagatctgtatcctgagagcctggaacacaggatgggtgaccccgatactgtgcctcatttttgggaagcaggtcttgcgcaaccacccagcagtactagtggtggtccacacccccccaggattggggggaggcgccgctttacagccgaacagaaactcaaatcctacagcgaaccagaaaagatgaacgaggttggtctgacccgtggctattctcctcatcaacaccccagaacaagtgaagatacggtcgggactttcgctgaccgctggaaatttttcgaagagacttcaaagccggtccctcaacggccagcccagaagcaggccctgcatggcattccacgagacaagcctgagaggcccaggaccgctggccgcacgtgtgagggaacggaaccttggagccggaccacttctcttggtgatagcctcaatgcccactcagcggctgagaaggctgggacaagcgatttgccacgccggctgggtacatttgctgagtatcaggcctcgtggaaggaacaacgaaaacccctggaggccaggtcttctggacggtgtcactcagcagatgatattctggatgtcagcttggacccacaggagcggcctcagcacgtacacggccgatcaagaagtagtcctagtacagaccactataagcaagaagcaagcgtggaactgcgtagacaggctggagaccccggggagccaagagaagagcttcccagtgcggtgagagccgaggaagggcagtccaccccacggcaggccgacgctcaatgccgcgaggggtctcctgggtcccagcagcatcctccaagccaaaaagcccctaaccctccaaccttctcagagctgtctcactgcaggggggctcccgagctgccgcgggaggggcgcgggagggcggggaccctgcctagggactacagatattctgaggaaagcactcctgccgacctgggccccagagcacagagcccggggagccctctgcatgcgcgcgggcaggactcctggccagtctcaagtgcactcttatctaagagaccggcccctcagcggccgcctcccccaaagcgggagccacggagatacagagccacagatggcgcccctgctgacgcccctgtgggagtgctagggcgtcctttccctaccccctcacctgccagtctcgacgtttacgtagctcgtctgtcgctaagccacagccctagcgtcttttccagtgctcagccgcaagacactcccaaggctactgtatgtgagcgcggcagtcagcacgttagcggtgacgccagccggcccttgcctgaggctctgcttcctcctaagcagcagcatctgaggctgcagaccgctaccatggaaaccagccggtcccccagccctcagttcgctcctcagaaactcactgataagccaccattactgattcaagacgaggatagtactcggatagaacgtgtgatggataacaacaccactgttaagatggtccccattaagattgtccacagtgaatctcaaccagaaaaagaatccagacaaagcttagcatgccccgcagaacccccagcactgccacacgggctggaaaaggaccagataaaaacgctaagtacctcagaacagttctactcgaggttttgtctgtacacccgccagggcgctgaacctgaggcgccccacagagctcaacccgcggaaccccaacctttgggcactcaggtccccccagagaaagaccgttgcacatccccccccggactgagttacatgaaggccaaagagaagactgttgaggacttaaagtccgaggagcttgccagagagattgtcggtaaagacaaatcactcgcagacattttggacccaagcgtcaagattaaaacaacgatggacctcatggaaggaatcttccctaaagacgagcatttgctggaggaagcccaacagagacggaagctgctgccaaagatcccttctcccaggagtacagaggaacggaaggaagagccaagtgtgccggctgcggtaagcctcgccaccaattcaacttactactccacttctgcgcctaaagcagaacttctcattaaaatgaaagatttgcaggaacagcaggagcatgaggaggatagcgggagcgatttggatcacgatcttagcgtgaagaaacaggagctaatagagtccatttcgcgaaagctgcaggtcctgagagaggcccgggagtccctcctagaggatgtgcaagccaataccgtgcttggggcagaggtggaagcgattgttaaaggcgtttgcaagccctccgagttcgataagtttcggatgtttatcggcgacctcgataaggtcgtgaacctgctgctgagcctcagtggtaggctcgcacgggtggagaacgctcttaacaacctggatgacggggcatcccctggcgacaggcaatcactccttgaaaagcaacgagtgctgatccagcagcacgaggacgctaaggaactgaaagaaaatctggacagaagggagagaatcgttttcgacattctggccaattacctgtcagaggaatctcttgccgactatgaacacttcgttaaaatgaagtctgccctgatcattgaacaaagagaactagaggacaaaattcacttaggggaagaacagctgaagtgcttactggatagtctccagcctgagagaggcaagtag

SEQ ID NO: 134258 - DNA, 1356 bp, synthetic construct
  misc_feature 1..1356: note = Description of Artificial Sequence: Synthetic coding sequence
  source 1..1356: mol_type = other DNA
atggagacctctaggagtcccagtcctcagtttgccccgcaaaagctcaccgataaacctcccttgctgatccaggatgaggacagtacgagaatcgaaagggtgatggataataatacaacagtgaagatggtgcccatcaaaatcgtgcattccgaatcacaaccagagaaggaaagccggcaaagccttgcttgccccgcagagccccccgccctgcctcacggcctcgagaaggatcaaattaagactctcagtacttcagaacaattctatagtcggttttgtctgtatacacgtcagggggcagaaccagaagctccacatcgggcccaacctgccgagccccaaccgctaggcacccaggtccctcccgaaaaagaccgatgtacatctccacctggactgtcctacatgaaggcaaaggagaagacagtggaggacttgaagagcgaggagctcgcccgggagatcgtaggtaaagataagtctctcgccgacattctcgacccgagcgtcaagattaaaacaactatggatctgatggagggaatcttccctaaagatgaacacttgttggaggaagcccagcaacggagaaagctgctcccaaagatcccatctccccgttccacagaggagcgcaaggaggaaccatctgttcccgctgccgtgtctcttgccactaacagcacctactacagcacatctgcgccaaaagccgaactcctgatcaaaatgaaagatctgcaagagcaacaggagcacgaggaagatagcggctcagatctcgatcacgatttgtcagtgaaaaagcaggagctgatcgagagtatttcccggaagctacaagtactccgcgaagcgcgcgagagcttgcttgaagatgtccaggcgaatacagtattgggcgccgaggttgaagcgatcgtgaaaggagtctgtaaaccatccgaattcgataagtttcggatgtttatcggcgatctagacaaggtggtgaatctgctgctatcactgtccggcagactcgccagggttgaaaatgccctgaataacctagatgacggcgcctcccctggcgacagacagagcctgctggagaagcagagggtgctgatacagcagcatgaagacgccaaggaactgaaagagaacctggaccgcagggagcgaatcgtgttcgacatccttgctaattacctgtcagaggaaagcctggccgactacgagcactttgtcaagatgaagagtgccctaataatcgagcagagggaacttgaagataaaattcaccttggagaggaacaattgaaatgccttctcgattccctccagcccgagagaggcaagtag

SEQ ID NO: 134259 - DNA, 1128 bp, synthetic construct
  misc_feature 1..1128: note = Description of Artificial Sequence: Synthetic coding sequence
  source 1..1128: mol_type = other DNA
atggagacctctcggagtccatcgccccagtttgctccgcagaagctgacggataagcccccactgctcatccaggacgaggacagtacacgtatcgaaagggtgatggacaataacaccaccgtgaagatggtccccattaaaatagtccatagcgagtcccagcctgaaaaggaatcccggcagagcctggcgtgccccgcagaaccgccagctctgccccatggattggaaaaggaccagattaagacgctttcaacgtccgaacagttctacagcaggttttgtctgtacacccggcagggagccgaacctgaggcacctcatagggcacagcccgcggaaccccagcccctgggaacacaggtgccccccgaaaaggatcgatgcacctctcctcccggtctgtcatatatgaaagccaaagaaaaaactgttgaggatctgaaatctgaggagctcgctcgggagatcgttgggaaagacaagtctttggccgacatcctggacccaagtgttaagataaagacgaccatggatctgatggagggcatcttcccgaaggacgagcatctgctggaagaggcacagcagaggaggaagctgcttcctaagattccaagccccagatcaacagaagagcggaaggaggagccaagtgtccctgcagccgtgagcctggccacaaattctacgtactattccacttccgccccgaaggcagagttgctgattaagatgaaagatttgcaagagcagcaggagcacgaagaggactccggcagcgatttagaccatgacctgtccgtgaagaaacaggagctgatcgagtctatcagcaggaaactgcaggtgctgcgcgaggctcgagagtcattactcgaggatgtgcaagccaatacggtcctgggtgccgaagtggaggccatcgttaagggcgtctgcaagccttctgagtttgataagtttcgaatgttcattggagatctggataaggttgtcaacctgctattatctctatcagggaggttagctagagtagaaaatgcactcaacaatttagatgatggcgcctcaccgggggatcgtcagtcccttttggaaaaacagcgagtcctcatacagtag

SEQ ID NO: 134260 - DNA, 1203 bp, synthetic construct
  misc_feature 1..1203: note = Description of Artificial Sequence: Synthetic coding sequence
  source 1..1203: mol_type = other DNA
atggaaacctcacggtcaccaagcccccagtttgcaccccagaaactgaccgacaagccacctttgctcattcaggatgaagactctactagaattgagcgggtgatggacaacaacacgaccgtaaaaatggtacctatcaagatcgtacatagcgaatcgcaaccagagaaggaaagccggcaaagcctggcttgtcctgccgagcctcccgccctgccacatggcttggagaaagaccagattaaaaccctgtctaccagcgaacagttttactcccggttctgcctctatacccgacagggtgccgagcctgaagcccctcacagagcgcaaccagcggagccgcagccacttggaacacaggtccctcccgagaaggaccggtgtacaagtccccctggcttgagctatatgaaggccaaagagaaaacagtggaagaccttaagtctgaagaactagccagagagatcgtaggaaaggacaaatctctcgcagatatcctcgacccgtctgttaaaatcaaaacaaccatggatctaatggagggaattttcccaaaggacgagcacctattggaagaggctcagcagaggcgcaagcttctccctaaaataccatccccaagatcaaccgaggagaggaaggaggaaccctcagtaccagcagctgtgtcgctggcgaccaattcaacctactatagtacaagcgcccctaaggctgagctgctgatcaaaatgaaggacctacaggagcagcaggaacacgaggaagactctggaagcgatctggaccacgacctctcggtgaaaaagcaggaactcatcgaatccataagtaggaagttgcaggtcttacgggaggccagagagagcctgttggaggacgtgcaagcaaacacagtcctcggggctgaagtggaagcaatcgtaaagggagtttgtaagccaagcgagttcgataaatttcgcatgttcattggcgacctggacaaggtagtcaatctgctgttatccctctcggggcgcctggctcgcgtggaaaatgctctcaacaacctggacgatggggcgtcgcccggtgatagacaaagtcttctggaaaaacagagggtacttattcagcagatgtgcgtcgatttcatgctggacacctaccattcccccatcaatagaagttcgtgccttacagtcaccaagtag

SEQ ID NO: 134261 - DNA, 777 bp, synthetic construct
  misc_feature 1..777: note = Description of Artificial Sequence: Synthetic coding sequence
  source 1..777: mol_type = other DNA
atgagggaacgagcccctcccccaccaccccctagccaagagactcctgtttatagcatggacgacttccctcctccgcctcctcatacagtctgcgaagcacagttagacagtgaggacccagaaggcccccgtccatctttcaataagctctcgaaggtgactatcgcccgcgaacggcacatgccgggcgcggcgcatgtcgtgggaagtcagacactggctagcaggctgcagacatcaattaaaggtagcgaagctgaaagcaccccaccaagctttatgagtgtacacgcccagctggctgggtcgttgggtgggcagcccgcaccaattcaaacgcaatctctgtctcatgatcctgtcagcggcacccagggcctggaaaagaaggtcagccccgacccccagaaaagttctgaagacattcgcaccgaggcgttggcgaaagaaatcgttcaccaggacaaatctctcgccgacatcctcgatcccgatagccgcctcaaaacaactatggatctgatggaggggctgtttcctcgggacgtaaacctcctcaaagaaaactccgtaaaaaggaaggccatacaacgaaccgtgtcttcatcggggtgcgagggcaagcgtaatgaggataaggaggccgtatcaatgctcgtcaattgtccacaaatctcctttcctagactgggcccatggctatgccctcagaccagcagagtctccccttttctgctcggtgccgtcctttcagttgtcttttcacagcactag

SEQ ID NO: 134262 - DNA, 5991 bp, synthetic construct
  misc_feature 1..5991: note = Description of Artificial Sequence: Synthetic coding sequence
  source 1..5991: mol_type = other DNA
atgatgcggaccacggaggattttcacaagccttctgccacgctgaacagcaacacagccaccaaaggccgctacatctatctggaagcctttctggagggaggggccccatggggcttcaccctgaaaggggggcttgagcacggggaacccctgatcatcagcaaggtggaggagggggggaaagccgacactctttctagtaaactgcaggccggggacgaagtcgtccacatcaacgaggtgaccctgtcatctagtcgaaaggaggctgttagcttggtcaaaggatcatataaaactctgcgactggtggttcgccgggacgtttgtaccgatcccggccacgccgataccggcgcttccaactttgtctctcccgagcacttaacttcaggcccccagcatagaaaggcggcgtggtctggaggtgtcaagctccgcctgaaacatcgcaggtcagagccagcaggccgcccccatagctggcacaccactaaaagtggagagaaacagcccgacgccagtatgatgcaaatatcccagggaatgataggacccccttggcaccagagttaccacagtagctccagcaccagcgatttgtccaattacgaccacgcgtatctccgcagatcacccgaccagtgctcttcgcagggctcaatggagtctttggagccctcaggggcctaccctccatgtcacctgtctccggcaaagagtactggatccatcgatcagttatcccattttcataacaaaagagacagcgcatactcatctttcagtacaagctcctcaattctggaataccctcacccagggatctccggaagggagcggtcaggaagcatggataatactagtgcccgaggtggactgcttgagggcatgaggcaggccgatattagatacgtcaaaacagtgtacgacaccagaaggggcgttagtgccgaatacgaagtgaactcatctgctctgcttttacaaggacgtgaggccagagcttctgcgaatggacaaggatacgataaatggtcgaacatcccacgcggcaagggagtccctcccccctcttggagtcagcaatgtccttcgtcgctggaaacggcaacagacaatctgccacctaaggtgggcgcacctcttccgcctgcgcggtcagacagttacgccgcctttaggcacagggaaagacccagtagctggtcatcactggaccagaagcggctgtgcaggccccaggcaaactcactgggatctcttaaaagcccctttatagaggaacagctgcataccgtgctagagaaatcgcccgaaaatagtcctccagtgaaaccgaagcataattatactcagaaggctcagcccggccaacccctactgcccacctcaatctaccccgttccttcccttgaacctcactttgcacaagtaccgcagccaagtgtcagctccaacggaatgttataccccgccctggctaaggagagtggatatatcgcaccacagggagcatgcaacaagatggccacaattgatgagaatggcaaccaaaacgggagcgggcgccccggatttgcattctgccagcccctagaacacgatttgctgagtcccgtggaaaagaagcccgaggctactgcgaagtatgtccccagtaaggtacacttctgttcagtacccgaaaacgaggaggacgcttcactgaagcgccatctcacaccgccacagggtaatagccctcactccaacgaacgtaagagcacccatagcaacaagccttctagccacccacacagcctgaaatgtcctcaggctcaagcctggcaggccggggaggacaaacgatcttccaggcttagtgagccgtgggagggggactttcaagaagaccataacgcaaatttgtggaggcgcctggaacgggaaggcctgggccagtccctttctggaaacttcggcaaaaccaagagcgccttcagctcacttcagaacatcccagagtccctcagaaggcattcatcccttgagctgggcagaggaactcaagaggggtacccaggtggcagaccaacttgcgctgtaaacacaaaggccgaagaccctggcagaaaagctgccccagatctggggtcacacttggatcggcaggtgagctaccctcggcccgaaggacgtactggggccagcgcttcatttaactcaaccgacccgtctccagaagagcctcctgccccttcacacccccacacttcaagtttgggtaggcgtggaccaggtccaggtagcgcttccgcattgcagggtttccagtacggcaagcctcattgtagtgttttagagaaggtgagtaaattcgagcagagggagcagggctcccagcgacctagcgtgggaggatccggcttcggtcacaattacaggcctcaccggacagtatctacgtccagcacttccggcaatgatttcgaggaaactaaggcccacatccgtttctccgagagtgcagagccactgggcaatggcgagcagcatttcaagaatggggagctgaaactggaggaagcgagtcgccagccatgtgggcagcagttaagcggaggcgcctctgactctggccggggcccccagcggccggacgcgcgcctgctccggtcccaaagcaccttccagttgtcttcagagcctgagcgcgagccagagtggcgggatcgccccggatccccagagagtccattactagatgcacccttttccagagcctacagaaacagcatcaaagacgcccaatcaagagtgctgggggcaaccagctttcgccgacgtgaccttgaacttggagcacccgtagccagtaggtcgtggagaccacggcctagctctgctcatgtgggcttacgaagccctgaggccagcgcgtctgcttccccacacacgccccgggagaggcatagtgtaacccctgccgaaggagatctagctaggccagttccacctgctgccagacgaggcgccagaaggcgtctcacacctgagcagaagaaaagaagctacagcgagcctgagaaaatgaacgaggtcggtatcgttgaagaagccgaacctgctccgctgggtcctcagcggaacggaatgcgcttcccagagtcgtccgtggcagacagacgtcgtctgttcgaacgcgacggcaaggcttgcagcaccctcagtttatcgggacccgaactcaaacagtttcaacagagtgccctcgccgattatattcagaggaagacaggaaagcgccccacttccgccgctggctgctctctacaggaacctggtcccttgcgagagcgggcccagtctgcatatcttcagcccggacccgccgctctggaggggagcggtttagcttccgcctcatcactgtcctcactgagagaacccagtctgcaaccgcgccgtgaagccaccttactgcccgcaacagttgccgaaacacagcaggcaccgcgggaccgctcctctagttttgccggaggaaggcggctcggagagcggagaagaggcgacctactctccggagccaacggtggaactagggggacacagaggggagacgagaccccaagggaacccagtagttggggcgctcgcgctgggaagagcatgtcagctgaggatctcctagaacgcagtgacgtgcttgctggtcctgttcacgtgcgtagcagaagttctcctgctactgctgataaacgtcaggacgtgttgctgggacaggacagtggcttcggattagtgaaggatccctgctatcttgcaggtccaggttcccgtagcctgagttgcagcgagagaggacaggaggagatgcttcctctctttcaccacctcacaccgcggtggggtgggtcagggtgcaaggcgattggggactcgagcgtaccatcagaatgtccgggtactctcgatcaccagcgacaggctagtaggaccccctgcccaaggccccccctggctggcactcagggactggtgaccgacacacgcgccgcaccgctcaccccaatcgggaccccccttccgagcgcaatcccttccgggtactgcagtcaggatggacaaactggccgccagcctctacctccttatacaccagcgatgatgcatcggagcaatggccataccctgacccaacctcctggccctcgaggatgtgaaggggatggccctgagcacggcgttgaggagggaacgcgtaaaagggttagtctgccacaatggcctcccccatctcgagctaagtgggcccatgctgcaagggaggattccctgcccgaagagtccagcgccccggacttcgccaatcttaaacattatcagaaacagcagagcctgccgagcctgtgttctacaagcgaccctgatacacccctgggtgctccctccactccaggaagaatctccttgcgcatatcagaatccgtgcttagagactcaccacctcctcatgaggattacgaggatgaagtgtttgtgcgcgaccctcacccaaaggcgaccagctcgcctactttcgagcctttacccccccccccaccgcctccaccctcacaggagacgcctgtctactccatggatgactttcctcccccccctccccacacagtctgtgaggcccaattggattctgaagacccagaaggacctagaccttcctttaacaaattgagcaaagttactatagcaagggaacgccacatgccaggagctgcacacgtagtcggctcccagaccctggcctccagattgcagacctctattaagggctcagaggcagaatcaactccaccctcctttatgtcagtgcacgctcaactcgccggctctctgggaggacagcccgcaccaattcaaacccagtcattgagccatgaccctgtctccggaacccaagggttggaaaaaaaggtaagtcctgatccccaaaaatcaagtgaggacattcgtaccgaagcccttgccaaggaaattgtgcaccaggacaagtcattagccgacattttggaccctgattccaggcttaagactacaatggatttgatggagggactgttcccacgcgatgtcaacctgctgaaggagaactccgtgaaaaggaaggctatccagaggactgtaagctccagtggatgcgagggcaagcgcaacgaggacaaagaagctgtttccatgctcgtcaactgtccagcttactatagcgtgtccgcgcccaaggctgagttgctcaacaaaatcaaagagatgcccgccgaagtgaatgaggaggaagagcaggctgacgtcaatgaaaagaaagccgagcttattggtagtctgactcacaagcttgaaacactccaggaggccaagggatcattgcttacagacatcaaactcaacaacgctctcggggaagaagtcgaggcattgatctcggagctgtgtaagcccaacgaatttgataagtaccgtatgtttatcggcgacctggacaaggtggtgaacctgctgcttagcctgtccggccgtctagcccgagtcgaaaatgtgctttctggactcggtgaggatgcatccaacgaggaaagaagctccctgtatgagaaaagaaagattctggccggccagcatgaagacgctcgcgagctgaaagaaaatttagaccgccgcgaacgggtggtcctggggatcctggccaattatctgtccgaggagcagttacaggactaccagcatttcgtgaagatgaagagcacactcctaatcgagcagagaaagttagatgataaaatcaagttaggtcaggagcaagtaaaatgcttgttagagtctctgccctccgatttcatccccaaggccggtgccctggccttgcccccaaacctcacttccgagccaattcctgcggggggatgcactttcagcgggatttttcctacactaacctcacctttatag

SEQ ID NO: 134263 - DNA, 561 bp, synthetic construct
  misc_feature 1..561: note = Description of Artificial Sequence: Synthetic coding sequence
  source 1..561: mol_type = other DNA
atggcattctacagtactactgaatatgatatccagcttgcgcgcggcctgctgtctggcatgttcttgtttgccacaaggcgctccgagccagccgggcggcctcattcttggcacacaacaaaatctggtgaaaaacagccggatgcctccatgatgcagatcagccaggggatgatcggccctccatggcatcaaagctatcactcctccagctccacctctgatctgagcaattatgaccacgcttatttacgccggagccctgatcagtgcagcagccaaggaagcatggaaagtctggaacctagcggagcctatcccccttgccacctctccccggcaaaatctaccggatccatcgatcagttatcccactttcacaacaagagagactctgcctactcgtcgttcagcacttccagctccattctggagtatccccatcctggaaaacgcgtcaagactcgtgacctccctggctctcagagccctgggagggccatctcaaggaagacgacgatgccaacctccggtggcggctggagagagaaagcctag

SEQ ID NO: 134264 - DNA, 4482 bp, synthetic construct
  misc_feature 1..4482: note = Description of Artificial Sequence: Synthetic coding sequence
  source 1..4482: mol_type = other DNA
atggaaaaccggcctggaagctttcagtacgtgccggtgcaactgcagggcggtgctccatggggatttacactgaaaggcggtctggagcactgtgagccactcacggttagcaagatcgaggatgggggaaaggctgcgcttagtcaaaagatgaggactggcgacgaactcgtcaatatcaacggaacccctctgtatggatcaagacaagaggccctgatcttgatcaaaggttctttccgtatcctcaaactaatcgtcaggaggcgcaacgccccggtgtcacgaccccatagttggcatgtggctaagctcctcgagggctgccctgaggcggccaccaccatgcattttccctccgaagctttttcactgtcttggcattcagggtgtaacacgagcgacgtgtgtgttcagtggtgcccactgtcacgccattgctcgactgagaagtcatccagtattggctcaatggagtcactagagcagcctggacaagctacttacgaatcccaccttttgcctatcgaccagaacatgtaccctaatcagcgggatagtgcttacagctctttttccgcgagttctaacgcttctgattgcgctttgagcctccgtcccgaggagcctgcaagcacagattgtatcatgcagggcccagggcccacaaaagcacctagcggacggcctaatgtcgccgaaacctcaggaggtagcagacggaccaatgggggccaccttacaccctcaagtcagatgtcctcccgtccccaggaaggctatcagagcggcccggcaaaggccgtccgcggcccacctcagccccctgtaagacgcgactccttgcaagcctcacgggcccagcttctcaacggcgagcaacgtagagccagcgagccggtggttcccctgccccagaaagaaaagctctctttggaaccggtgttacccgcaaggaaccctaatcggttctgctgcctgtctggacatgatcaagttactagtgagggacatcagaattgtgaattttcccagccgcccgaatctagccaacaagggtccgagcacctactcatgcaggcttccaccaaggctgtgggatcccccaaggcatgcgaccgcgcttcatcggttgacagcaatccccttaatgaagcctccgcagaactcgctaaagccagcttcggcaggccaccacacctaatcggccctactggacatagacattctgctcctgaacagttactggccagccatctccagcatgtccacctggatacacgcggatctaaagggatggaactgccccccgttcaagatggccatcagtggactctgagccctctgcactcttctcacaagggaaagaagagtccgtgcccccccaccggaggaacgcatgatcagtcatccaaggagaggaagacaagacaggtggacgacaggagccttgtgctaggtcaccagagtcagagctcacctcctcacggagaggctgacggacaccccagcgagaagggctttcttgacccgaaccggacctcgcgcgctgcgagcgagctggcaaaccagcagccatccgcttctgggagtttggttcagcaggccaccgactgctcaagcaccacaaaagctgcatcgggcacagaggcaggagaggagggggatagcgagccaaaggaatgcagccgtatgggaggacgccgtagcggaggtaccaggggaagaagtatacaaaatcgccggaaaagcgagaggttcgcaacaaatctacggaacgagatacagcggcggaaggcccagctgcagaaatctaaggggcccctgtcccagctctgtgataccaaggagccagtggaggagacacaagaaccgcccgaatctccccctctaacggcaagcaatacttctttgctttcatcatgtaagaagcctccttctccccgcgataagctattcaacaaatctatgatgctcagagcaaggtcatcagaatgtctctcacaggcccctgaatcccacgaatccaggaccggcttagagggcaggatttcacctgggcagagacctggccagtcttctctgggcctgaacacttggtggaaggccccggaccccagctcatctgatcccgaaaaggcacatgcacattgtggagtgagggggggccactggagatggtctcccgagcacaattcacaacccctcgtggccgcagcgatggaggggccatcaaatccaggtgacaacaaagaactgaaggcgtccaccgcccaggctggagaggatgcaattcttcttccattcgctgatcggagaaaattcttcgaggaaagctccaagtctctgagtacttcacacctccccggactgacaacccacagcaataaaaccttcacccagagacccaaacctatcgatcagaattttcagccaatgtcaagcagctgccgggagctccgtcggcaccccatggatcaaagctaccatagcgccgaccaaccttaccatgccactgaccaaagctaccatagcatgtcccctcttcagagcgagacaccaacctactctgaatgtttcgcttctaagggacttgagaattctatgtgctgtaagccattacattgcggggactttgactaccatagaacttgtagttatagctgcagcgtccaaggcgcactcgtgcatgacccatgcatctactgttctggggagatttgccctgcccttctcaaaaggaacatgatgcctaattgttacaattgtcggtgccaccatcatcagtgcattagatgctctgtttgctatcacaacccgcagcattctgcactggaagactcatctctggctccgggcaacacttggaagccaagaaaactgaccgttcaggaatttccaggggacaagtggaaccctataacagggaatcgcaagacctcccagtctggcagggaaatggctcacagcaagacgtctttctcttgggctacaccattccacccctgtcttgaaaatccagcacttgatctatctagttacagggcaatctcatcattggatctgctaggcgacttcaagcatgctctgaaaaagtccgaagagactagcgtttacgaggaagggagcagcctggcctcaatgcctcacccattgaggtctcgtgctttttctgaatctcacattagcttggccccccagagcactcgcgcatggggccaacataggagggaactcttcagcaagggagacgaaacacagtctgacctgctcggcgctaggaaaaaagcattcccacccccgcggcctcccccacccaactgggagaagtatcgcttgtttcgtgctgcacagcagcaaaaacagcagcagcaacagcaaaagcagcaggaggaggaggaggaagaagaagaggaagaagaagaagaagaagaggaggaagaggaggaagcggaagaagaagaagaggagctaccgccccagtatttctccagcgagacatctggttcctgcgccctgaaccccgaagaggtgctagagcagccccagccactaagcttcggacatctcgaaggttcacgccaagggagtcagtccgtgccggcagagcaggaatctttcgcactgcatagctcagacttcctaccccccatcagagggcacctcggatcacagccagaacaggctcagcctccctgttattatggcattggtggtctgtggcgaacaagcggccaggaagcaaccgagtcagctaaacaggagtttcagcacttctcccctccctcaggcgcccccggtatccctacaagctattctgcgtattacaacattagcgtggcaaaggctgaactgctgaacaaactgaaggaccaacctgagatggctgagatcggtttgggggaggaggaggtggatcacgagctggctcagaaaaagattcagctcattgagtccatcagccgcaagctttccgttctgcgcgaagctcagcgcggactcctggaagacattaatgcgaatagtgctctgggagaagaggtcgaggccaacctgaaggcagtttgcaaaagcaatgaattcgagaagtatcatctattcgtgggcgaccttgataaggttgtaaatctcctgctgtccctgtccggtaggctggctagggttgaaaacgctctcaatagcatagattcggaagctaaccaggagaaactggttctgatcgagaagaaacaacagcttacaggacagctggccgacgccaaggagctgaaagagcacgtggacagacgggagaaactggtctttggaatggtgagcagataccttccccaggaccagctccaggattatcagcacttcgttaagatgaagtctgctctgataatcgaacagagggagctggaagagaaaatcaagctcggcgaagagcagctcaagtgtctgcgcgagtccctgttactgggcccttctaacttttag

SEQ ID NO: 134265 - DNA, 4482 bp, synthetic construct
  misc_feature 1..4482: note = Description of Artificial Sequence: Synthetic coding sequence
  source 1..4482: mol_type = other DNA
atggaaaaccggcccgggtctttccagtacgttccggttcagctccagggaggcgcaccatggggattcacgctgaaaggaggccttgagcactgtgaacccttgaccgtttcaaagattgaggatggaggtaaagccgctttatcgcagaagatgcggaccggcgacgagttggtgaacatcaacggcaccccgctgtacggcagtcgtcaagaagccctgatcctgatcaaggggtccttccgaatccttaaattgatagtcagaaggagaaacgcccccgtgagccgaccacattcgtggcatgtagctaaactgctggagggttgcccagaggctgccacgactatgcatttccctagcgaagctttttctctctcttggcacagcggttgtaacaccagtgacgtctgtgtacagtggtgcccgctgagcagacattgttcaaccgagaagagctcgtccatcgggtccatggagagcctcgagcagcctgggcaagcgacgtatgagagtcacctgctgcctattgaccaaaacatgtatcctaaccagcgcgactccgcatactcatctttcagcgcatcctctaatgcaagcgactgtgctctctcactgaggccagaggaaccagcaagcactgattgtatcatgcagggtcctgggcctaccaaagcgccgagcggtcgacctaacgtggctgagaccagcggagggtccaggaggactaacggagggcacttaacaccgtcaagccagatgtctagccgcccgcaagagggctaccagtctggccctgcaaaggccgtgaggggtccaccccagccccctgtccgcagggacagtctccaggcatctcgtgcgcagctactgaacggagaacaacgcagggcttctgaaccggtggtgcccctgccgcagaaagagaaactctccctcgagccagtgttgccggctcggaatccaaacagattttgttgtctcagtggacatgatcaggtgacctctgaaggtcaccagaattgtgagttttcccagcctcccgagtcttctcaacagggctccgagcatctgctgatgcaggcctccaccaaagcagtgggcagccctaaggcttgtgatagggccagctcggtggattctaatccgctgaacgaggcctcggcggagctggcaaaggccagcttcggacgccccccccatcttattgggccaaccggccaccggcactcagcaccagaacagcttcttgcgagccatctacagcacgtacaccttgacactagaggtagcaagggcatggagctgccccctgtgcaggatggacaccagtggactctttccccactccattcgtctcacaagggcaaaaaaagtccctgtcccccaacaggtggaacgcatgatcagtctagtaaggaaagaaagaccaggcaggtcgacgaccgatcgctggttctcggtcatcagtcccaaagtagcccaccgcacggggaggctgatgggcatcccagtgagaaaggatttctggatccgaatcgaacatctagggctgcctcagagcttgctaaccagcaaccctcggccagcggctcactggtgcagcaggccacagactgctcttctactactaaggctgcctctggcaccgaggctggagaggaaggcgattcagagcccaaggagtgtagtcgaatggggggccggcgaagcgggggaacacgcggcaggagtattcagaatcgtcgcaaatccgagcgcttcgccactaatcttcgcaatgagatccagcggcggaaagcccagctccagaagtctaagggaccattatctcagctttgtgacacaaaggaaccggttgaggaaactcaggagccgcccgagtcgcctccactgactgccagcaacacatctctgttgtcctcttgtaagaaaccaccctctcccagagacaagttatttaacaagagtatgatgctgcgcgccagaagttcagaatgcctttctcaggcccctgagtcccacgagagtcgaacagggctggagggccgcattagtcccgggcagaggcctgggcagtctagtctggggctgaacacgtggtggaaagccccggacccgagctcctcggaccccgagaaagcacacgcacactgtggcgtgcggggaggacattggcgctggagtccggagcataattcacagcccctcgtcgccgcggcaatggaggggccatctaatccgggggacaataaagagctcaaagcgagcactgctcaggctggtgaagatgccatcctcctgccgtttgccgataggcgtaaattctttgaagagagcagcaagtctctgtcgacgagccatctacctggactcaccactcactctaacaaaaccttcacccaacggcccaagccaattgaccagaactttcagccaatgagttcaagttgccgcgagctccgtagacacccaatggaccagagctaccactctgctgatcaaccctaccacgctactgaccagtcataccactctatgtcacccctacagtcagaaactcctacgtattccgagtgctttgcctcaaaaggccttgagaacagtatgtgttgcaaaccgttgcactgcggcgactttgactaccacagaacgtgttcatactcatgtagcgtgcagggggcacttgttcacgatccttgcatctactgttccggagagatttgccctgcattgctcaagaggaatatgatgccaaattgctacaattgtaggtgtcaccatcaccaatgtataagatgttccgtgtgctatcacaatccccagcacagtgcgctggaggatagctcactcgcccctggaaatacctggaaaccgaggaagctcaccgttcaagagttccccggagataagtggaacccgattactgggaacaggaagacgagtcagagcgggagggagatggcacactcgaaaacatccttttcatgggccacccctttccacccatgtctggaaaatcctgctttggacctttcctcctatcgtgctatctcgtccctggacctgctgggcgatttcaaacacgccctgaaaaaatccgaggaaacttccgtttacgaggaggggagttccttggctagcatgcctcatccgctgagaagtcgtgccttcagtgaatcccacataagcttggccccccagtccacccgtgcctggggacagcacagaagagaactgttctcaaagggggacgagacgcaatctgacctgctcggagccagaaaaaaggcgtttccccccccccggcctccccctcctaactgggaaaaatatcggctgttccgggccgctcaacaacaaaaacaacagcagcaacagcagaagcagcaggaggaggaggaggaggaagaggaggaggaggaggaggaagaagaagaggaagaggaagaagcagaggaggaggaagaggaactaccacctcagtacttttcgagcgaaactagcggatcgtgtgctcttaacccagaagaggtgctcgagcagccacagccactgtctttcggacatcttgaagggtcacgacagggctcccagtccgttcccgcagagcaggagagctttgctctgcattcatccgatttcttaccaccaattcgcggacatttgggctctcagccagagcaggctcaaccgccttgctattatggcatcgggggattgtggcgcacatcaggccaagaagctaccgaatcagccaagcaggagttccagcatttctcccccccatctggggcccccgggatccccacctcctatagcgcttattataacatcagcgtggccaaggcggaacttctcaataagctcaaggatcaacccgagatggcagagattggacttggagaggaggaggtcgaccacgagctggcacagaagaagatccagctgatagaatctatcagccggaaactcagcgtgctgcgtgaagctcagcgcggtttgctggaggacatcaatgccaattcggccttaggcgaagaggtcgaagctaatctcaaagcagtctgtaagagcaacgagtttgaaaaataccacttgtttgtgggcgacctcgacaaggtggtcaatctgctgctgagcctcagtggccgactggctagagtcgaaaacgctctaaattccatagattccgaggccaatcaagaaaagctggtactcattgagaaaaaacagcagctgactgggcagctggcagatgccaaagagctgaaggagcacgttgataggagggaaaagctggtctttggtatggtctcacgctatctaccccaggatcaactacaggattatcagcattttgtgaagatgaaaagtgctctaattatcgagcagcgggagctggaggaaaaaattaagctgggtgaggagcagctcaagtgtctgagagagtcccttctgctgggccccagcaacttttag

SEQ ID NO: 134266 - DNA, 4134 bp, synthetic construct
  misc_feature 1..4134: note = Description of Artificial Sequence: Synthetic coding sequence
  source 1..4134: mol_type = other DNA
atgcactttcctagcgaagcctttagtcttagctggcactccgggtgcaatacttccgatgtgtgtgtccagtggtgccccttatctcgccactgttctaccgagaagagcagtagcattgggtccatggaatccctcgagcagcctggtcaagccacctatgaatcccacttactcccgatcgaccaaaacatgtaccctaatcaaagggatagcgcctacagtagtttctccgctagtagcaatgccagtgattgcgctctgtcccttagacccgaagaacctgctagtaccgattgcattatgcagggccccgggccaacaaaagctccaagtggacggccaaacgttgcggaaacttctggaggcagtagaaggacaaatggtggccacctcactccaagttcacagatgtcctcacggccacaagagggctaccaatccggccccgccaaggcagtaaggggacctccccagccgcctgtccgacgagacagcctacaggcatcgagggcccagctgctgaacggtgagcagagacgcgcttccgagccggttgtgcctttaccacaaaaggagaagctttccctggagcctgtgctgccagccaggaatcctaataggttttgttgcctgtcaggccacgatcaagtaacaagtgaaggccatcagaattgcgaattttcccagccgcccgaatcaagccagcaaggcagcgagcacttgctgatgcaggcctctaccaaagcagtgggcagcccgaaagcctgcgaccgggcgtcctctgtggattccaaccctctgaatgaagctagcgcggaactggccaaggcttcctttggccggccaccccacttgattggccccaccggtcacagacatagtgcacccgagcaattgctcgcgagccacctgcagcatgtacatctggacacccgcggctcaaaggggatggagctaccccccgtccaagacggtcaccaatggacgttgtcccctttacactcttcccataaggggaaaaaatctccgtgccccccaactggggggacccacgaccagagctctaaagagagaaaaactcggcaggtcgatgacagaagcctggtgctcggccatcagagtcaaagctcccctccccacggagaggctgatggacatccatctgagaaggggtttctggatccgaatcgaactagcagggcagccagcgagttagctaatcagcaaccctcagcttctgggtccctggtccaacaggccacggactgttcatccaccaccaaagccgccagcggcacagaggctggcgaggagggcgacagcgaacctaaggaatgcagccgcatgggaggaagaagaagcggcggtaccagaggtcgttctatacagaacagacggaaatccgagcgtttcgccacaaatctacgcaatgagattcagcgccgaaaggctcagttacaaaaatctaagggccctctcagccagctttgtgatacaaaagagcctgtcgaggagacccaagagcctccagaatcccccccactcaccgcaagcaatacttctctgctttcgagctgtaagaagcctccatctccaagagacaaactcttcaataagagcatgatgctgcgtgcacgttcatctgaatgcctgtcccaggcacctgaatcacatgagtctcgcacaggcctggaaggccgaattagcccagggcagcgccccggacagtcatcgctcggactgaatacttggtggaaagctcctgacccttcatccagcgacccagagaaggctcacgcgcattgcggagtgcgcggaggccactggcggtggagtccagagcataacagccagcccctcgtggcggctgcgatggaaggtccatccaaccccggtgataataaggaattgaaagccagtacagcacaggccggcgaggatgccattctcctacccttcgccgatcgccggaaattttttgaggagtcttccaagtctctgtctacctctcatctgcccggcctcactacccacagcaacaagaccttcacacagagacctaagcccatcgaccagaacttccagccaatgtcgtccagctgccgtgagctgcgccgtcaccccatggatcagtcctaccacagtgctgaccagccataccatgccacggaccagtcttaccattcgatgagccctctgcaatccgaaaccccgacttacagcgagtgctttgccagtaaggggctggaaaacagtatgtgttgtaaacccctgcattgcggcgatttcgattaccatcggacgtgctcctacagctgttctgttcagggcgccctcgtccacgacccttgcatctattgctccggagagatctgtccggctctgctgaagcgcaatatgatgccgaactgttacaactgccggtgccaccaccaccaatgcattcggtgctctgtttgttatcacaacccccagcacagcgctctagaagattcctcactcgcccccgggaatacatggaaaccacgtaaattgactgttcaggagttccctggtgataaatggaaccctatcactggaaaccgtaaaactagtcaatccggacgtgagatggcacactccaagacgtccttctcctgggccaccccttttcatccctgcctggaaaatcccgccttggacctgtcaagctatagagcaatatccagcctcgacctattaggggactttaagcatgcgctaaaaaagtccgaagaaacctctgtttacgaagagggctcaagcctggcaagtatgccccacccactgagaagcagggccttttctgagtctcacatctcccttgccccgcagagtacgcgggcctgggggcagcacagacgagagctcttcagcaagggagatgagacccagtcagatctgttgggtgcgcggaaaaaagctttccctcctccccggcctcccccccccaattgggaaaaataccggctgttccgagccgcacagcaacagaagcagcaacagcagcaacagaagcagcaggaagaagaagaggaggaggaggaggaggaggaagaggaagaggaagaggaggaagaggaggctgaagaggaagaagaggagctgccccctcaatacttcagctcagaaacttctggttcttgtgccctaaatcctgaggaagtcctggagcaaccccagcctcttagtttcgggcatcttgagggctctaggcagggtagccagtcagtgcccgcggagcaggaaagctttgcactacattcctcagatttcttgccaccaatccgcggtcatctgggctcacagccagagcaggcccaaccaccttgctattatgggataggaggcctgtggagaacgtccgggcaggaagccaccgaatcagcaaaacaggaatttcagcactttagtccaccatcaggagccccagggatccccacctcctacagcgcctattacaacatctctgttgccaaggccgagctcttgaacaaactgaaagaccagcccgagatggcagaaatcggtttaggcgaagaggaggtggatcacgaactcgcccagaagaagatccagctgatcgaaagtatcagcaggaagctctccgtgctgcgggaggctcagcggggactgcttgaggatatcaatgctaattcagcgctcggagaggaggtagaagcaaacttaaaagctgtatgcaagtcaaacgagttcgagaaataccacctgttcgtgggcgatctggataaggtggtgaatctcctgctgagcctatctgggaggttggcaagagtggagaatgccctgaattctattgattctgaagctaaccaggaaaagctggtgttaatcgagaagaagcaacagctgaccggtcagctcgccgatgctaaggaacttaaggagcatgtcgaccggcgggaaaagcttgttttcggcatggtttctcggtacttaccacaagatcagttacaggattaccagcacttcgttaagatgaaaagcgccctcatcatcgaacaacgtgagctcgaggaaaagattaagcttggcgaggagcagctgaagtgtctcagagagagccttctattgggtccctccaacttctag

SEQ ID NO: 134267 - DNA, 1686 bp, synthetic construct
  misc_feature 1..1686: note = Description of Artificial Sequence: Synthetic coding sequence
  source 1..1686: mol_type = other DNA
atggcgaaggagaggtgcctaaaaaaatcctttcaggactccttggaggatataaaaaaaagaatgaaagaaaaacggaacaagaacctggcagaaataggtaagagaaggtctttcatcgccgcaccatgccagattatcaccaacactagcactctgctgaaaaactatcaggacaataacaagatgctcgtgttagctcttgaaaacgaaaagtcaaaggtgaaagaggcccaggatattatccttcagctgcgcaaggaatgttattacctgacctgtcagctgtatgctctgaagggaaaattgacctcacagcagacagttgaaccagcgcaaaatcaggagatatgttcgagcggaatggatcccaactctgacgactcctctaggaacctcttcgtcaaagacttaccccagatcccactggaagaaacagagctgccagggcagggggaatctttccagattgaggaccagatccccactatacctcaagacacactaggcgtggacttcgactctggggaggcaaagtctacagacaacgtgctgcctaggaccgtgtccgtgcgctccagcttgaagaaacactgcaattcgatctgtcagttcgatagcctggacgacttcgagacaagccacctcgccggaaaaagctttgagtttgagcgggtaggatttctagaccccctagtgaacatgcatattcccgaaaacgtccaacataacgcctgccagtggagtaaagatcaggtgaatttgagccccaagctgattcagccaggcacgttcacaaaaacaaaggaggacattcttgagagtaagtctgaacagaccaaatccaaacagagagacacccaggagcggaaaagggaggagaaaagaaaggcgaatagaagaaaatcaaaacgtatgagcaaatataaagaaaataagagtgaaaataaaaagaccgtcccccagaagaaaatgcacaagagcgttagcagtaatgatgcctataactttaacctcgaggagggcgtgcacctcacccccttcaggcagaaggtgagcaacgactccaatcgcgaggaaaacaatgaaagtgaggtgagcctctgcgagtccagtggcagcggggatgactccgacgacctgtacctgccaacatgtaaatacatccagaacccgacatccaatagtgaccgtcctgtaaccaggcccctagccaaacgagcactcaagtacaccgacgagaaggagactgaaggcagtaaacccacaaaaaccccgacaaccacacccccagagacacagcagtcgccacatttatctctcaaagatattacgaacgtgagcctgtaccccgttgtaaagatacggcgactgtccctatccccaaaaaaaaacaaggccagccccgccgtcgcattgcctaagaggcgttgcacagcgtctgtgaactacaaagagcctaccttggcctctaagttgcggagaggggatcccttcactgacctgtgcttcctgaatagtccaatcttcaaacaaaaaaaggatctgaggcggtcgaaaaaaagagctctcgaggtatcccccgccaaagaggctatattcatactgtactatgtaagagagttcgtctcacggttccctgactgccgaaagtgtaaactggaaacgcatatttgcctgcgatag

SEQ ID NO: 134268 - DNA, 879 bp, synthetic construct
  misc_feature 1..879: note = Description of Artificial Sequence: Synthetic coding sequence
  source 1..879: mol_type = other DNA
atggctaaggagagatgtttaaaaaagtctttccaggactctctggaggacattaaaaagaggatgaaagagaaaagaaacaaaaatctggccgagattggtaagcgaaggagctttatagccgctccatgccaaatcataaccaacacatctacacttttgaagaactaccaggacaataacaagatgctggtactggctctggaaaacgagaagagtaaagtcaaggaagcccaagatataattctacagcttcgaaaagagtgttactacctcacctgtcagctgtatgcactgaagggcaagttgacttcccaacagaccgtggagccagcccagaaccaggaaatatgttcttccgggatggaccccaactccgatgattcatccagaaacctgttcgtgaaagacctgccgcaaattcccctcgaagaaaccgagttgcctggacagggcgaatccttccagattgaggccaccccccccgaaacccagcagtctccacaccttagcctcaaagacatcaccaacgtcagtttgtacccagtcgtgaagatcaggaggctctccctgtcccctaagaagaacaaggcaagccccgcagtggcactccccaagcgccgctgcacagcctctgtaaactacaaggagcccacccttgcttcaaagctcagacgcggcgatcccttcaccgacctgtgctttctgaactcacctatcttcaagcaaaagaaagatctgcgccgctcaaagaaacgcgctctcgaagtgtctccagctaaagaagccattttcatcctttattacgtacgggaatttgtatcccgtttccctgactgcagaaagtgcaagctggagactcatatttgtctgagatag

SEQ ID NO: 134269 - DNA, 648 bp, synthetic construct
  misc_feature 1..648: note = Description of Artificial Sequence: Synthetic coding sequence
  source 1..648: mol_type = other DNA
atggcaaaggagagatgcctgaagaaaagttttcaggacagtctggaagatatcaagaagcgaatgaaggaaaaacgcaataaaaatctagcagaaattgggaagcgcaggagctttatcgctgccccatgccagatcattacgaacacatccacgctgctgaagaactatcaggacaacaataagatgctagtgctggccttggagaatgagaaatcgaaggtcaaggaggcccaagacatcatcctgcagctcagaaaagaatgttattacttgacctgtcagctttacgccttgaaggggaagctgacgagtcaacaaactgtggaaccggctcaaaaccaagaaatctgttcttcaggcatggacccaaactccgatgactcttctcgcaatctgttcgttaaagaccttccacagattccactcgaggagactgagcttccagggcaaggggaatcattccaaatcgaggatcagatcccaacaattccccaggacacactcggggtggattttgacagtggcgccctggaggtgtctcctgctaaggaggctatatttattctctactacgtgcgcgagtttgtaagccggttccccgattgcagaaagtgcaagctggagacacacatttgtctcagatag

SEQ ID NO: 134270 - DNA, 1584 bp, synthetic construct
  misc_feature 1..1584: note = Description of Artificial Sequence: Synthetic coding sequence
  source 1..1584: mol_type = other DNA
atggcaaaagagaggtgtctgaagaaatccttccaggattccctggaggatataaagaaaaggatgaaagagaagaggaataaaaatctggcagagatcggaaagcggcggagctttatagccgctccatgtcaaataataactaacacttcgacactgttgaaaaactatcaggataacaataaaatgctggttctcgctctggagaatgaaaagtcaaaagtcaaggaggctcaggatatcattttgcagctgcgtaaggagtgctactaccttacatgccagctttatgccctgaaaggaaagctaacatcccaacagaccgtagaacccgctcagaatcaagaaatctgtagctcgggtatggatcccaacagcgacgactccagcaggaatctgttcgtcaaagacctgccacagatccctctggaggagacagaactgccagggcagggcgagtcattccagatcgaagaccagatccctacaatcccacaggatacactcggagttgacttcgatagtggtgaggctaagtcaactgataatgtcttgcctcgaactgtttcagtgagatcctccctgaaaaaacattgtaattcaatttgtcagttcgattcattggacgatttcgaaacttcccatttggcaggaaaaagcttcgagtttgagcgggtggggtttttagatccacttgttaacatgcatattccagagaatgttcaacacaatgcttgccaatggtccaaggaccaggtgaacttgagccccaagctcatccaacccggaacatttacaaaaactaaggaagacatccttgagtcaaagtcggagcagacaaaatccaaacaacgggacacccaggaaaggaaacgcgaggagaaaagaaaggccaaccgaaggaagagcaagcgaatgtctaaatacaaggaaaataaatctgaaaacaagaagaccgtcccccagaagaaaatgcacaagagtgtgtcctccaacgatgcatataactttaacttagaggaaggtgtacacctcactcccttccggcaaaaagtgtccaatgacagtaaccgggaggagaacaacgaaagcgaggtctctctgtgcgagagctccggttctggcgatgattctgatgacctgtacctcccaacgtgtaagtacatccaaaatcctaccagcaactccgacagacctgtcacgcgccccctggccaagcgcgccctgaaatacacagatgagaaggagaccgaggggagcaagccaaccaagactccaactaccaccccccctgagacccagcagtcaccacatctgtctttgaaggatatcactaacgtgagcctttacccagtggttaaaattaggagactatcactctctcccaagaagaataaggcctcacccgcagtcgccttgccgaaacgtcgctgcactgccagtgtgaactataaggaacccacccttgcctcaaagctgagaagaggtgaccctttcaccgatctttgttttctgaactcaccgatttttaaacaaaaaaaagaccttcgtcgttccaagaaaagcatgaagcagatacagtag

SEQ ID NO: 134271 - DNA, 1584 bp, synthetic construct
  misc_feature 1..1584: note = Description of Artificial Sequence: Synthetic coding sequence
  source 1..1584: mol_type = other DNA
atggcgaaggaacgctgtctgaagaagtccttccaggactccctagaagatattaaaaagaggatgaaagaaaagcgcaacaaaaatctggctgaaatcggcaaacggaggtcatttatcgcagccccttgccaaatcattacaaatacctctactctcctgaagaactatcaggacaacaataaaatgctggtgctcgcactggaaaacgaaaaatccaaagtgaaagaggcacaggacattatccttcagctcaggaaagagtgctattacctcacctgtcaactttacgccttaaaagggaagcttacttctcagcagacggtggaacctgcccagaatcaggaaatctgctcttctggtatggacccgaactccgatgatagctcacgtaatcttttcgtgaaagatctgccacagattcccctagaagagaccgaattacctgggcagggggagtcctttcagattgaggaccaaattccaaccatcccacaggataccctcggcgtggactttgattctggggaggcgaaaagcacggacaacgtactacctaggacagtgtctgtacgctcgagtctcaagaagcactgtaactctatatgtcagtttgacagccttgacgactttgaaacttcccacctggctgggaaaagctttgagttcgagcgtgtcgggttcctcgatcccctggtaaacatgcacattcctgagaacgtgcagcataacgcatgtcaatggagtaaagaccaggtgaacctctcccctaaacttattcagcccggtacattcactaaaaccaaggaagatattctagagagtaagagcgagcaaactaagtcaaaacagagagatactcaggagagaaaacgcgaggaaaagaggaaggccaaccgccgcaagtctaagagaatgtctaaatacaaggaaaacaaaagcgagaacaaaaagaccgtgccgcagaagaagatgcataaatcggtgagttcgaatgacgcatacaattttaatctggaggaaggcgttcatcttactccattccgacaaaaagttagcaatgactcaaacagggaggagaacaatgagagcgaagtgtccctgtgcgaatcttcaggttctggcgacgattccgacgacttatatctccccacctgcaagtatatccagaaccccacatcaaatagcgaccgacctgtgacaagacccctagctaagcgagccttgaagtacacagacgaaaaagagaccgaaggttccaaaccaactaagacccccaccacaacccccccagagacccagcaatcccctcatctgtcacttaaggacataactaacgtgagtctgtaccccgtcgtgaaaataagaagactgagcttgtctcccaagaaaaataaagccagccctgctgtggccctccctaagaggcggtgtactgccagcgtgaactataaagaacccactctggccagcaaactcagacggggcgacccattcacagatctctgttttcttaactctccaatatttaaacagaaaaaggacctgcgcagatcaaaaaaatccatgaagcagattcagtag

SEQ ID NO: 134272 - DNA, 828 bp, synthetic construct
  misc_feature 1..828: note = Description of Artificial Sequence: Synthetic coding sequence
  source 1..828: mol_type = other DNA
atggctaaggaacgttgcctcaaaaagagctttcaggattctttagaggacatcaagaagcggatgaaagagaaaagaaataagaatctggcggagattgggaaacgacgatcatttatagccgcgccttgccagatcattactaacacgagcacgctcctcaagaattatcaagataacaataaaatgctcgtgctggcactcgaaaatgagaaatccaaggtaaaagaagctcaggacatcatcttacagcttagaaaagaatgttattatttgacctgtcagctctatgcccttaagggaaagctcaccagccagcagacagtagagcctgcccagaatcaggaaatctgctcgtcaggcatggatcccaactccgacgactcctcacggaacttgttcgtgaaggacttgccgcaaattccactagaagagaccgaactccctggacagggcgagtccttccagatcgaagatcagataccgaccatccctcaggacacactgggcgtagatttcgatagcgctacccctcctgaaacacaacagagccctcacctatctctcaaagacatcacgaacgtatctctctaccctgtcgtcaaaattcgccgcctcagcctttcccccaagaagaacaaggcaagcccagccgtcgccttaccgaagagaaggtgtactgctagtgtcaactataaggaacctactctcgcctccaagttgcgccgaggcgaccccttcaccgacctttgttttcttaactcacccattttcaagcaaaagaaggacttgaggaggtcaaaaaagtctatgaaacagatacagtag

SEQ ID NO: 134273 - DNA, 930 bp, synthetic construct
  misc_feature 1..930: note = Description of Artificial Sequence: Synthetic coding sequence
  source 1..930: mol_type = other DNA
atggccaaagagcggtgtctaaagaagtcattccaggattcattagaggatatcaagaagcgcatgaaagaaaaaaggaataagaatttggcagagataggcaagaggcggagctttattgcagcgccttgccaaattattacaaatacatcaactctcctaaagaattatcaggacaacaacaaaatgctggttctggcactggaaaatgagaagagtaaagtgaaggaagcacaagatataattctgcagctcagaaaagaatgctactatcttacctgtcaactctatgccctgaaaggaaaactgacatcccaacaaacagtagagcccgcacagaaccaggagatctgttcttccggaatggaccccaactccgacgattcttccagaaacttattcgttaaggacttgccccaaatccctctggaagaaaccgaactgccagggcaaggggagtcattccagattgaagatcagatccccaccattcctcaggacactctgggggtcgattttgacagtgctaccccccctgaaactcagcagtcgcctcacctctctctaaaggacattacaaatgtttcactctaccctgtggtcaagattagaagacttagcctgtctccgaagaaaaataaggccagcccagcagtggctttgccaaaaagacgatgtacagcatctgtcaattataaggaaccgacactggcgtctaaacttcgacgcggagatcctttcaccgatctgtgttttttgaattccccaatctttaagcagaaaaaggaccttaggagatctaagaaacgggcacttgaagttagccccgcaaaagaagctatttttatcctctactatgtccgggaattcgtgagccggttccccgactgccgtaagtgtaagcttgagacacacatctgcctgaggtag

SEQ ID NO: 134274 - DNA, 1686 bp, synthetic construct
  misc_feature 1..1686: note = Description of Artificial Sequence: Synthetic coding sequence
  source 1..1686: mol_type = other DNA
atggcgaaagagcgatgtctgaaaaagagctttcaagatagcctggaagatattaagaaacgcatgaaggagaaaagaaacaagaatctcgccgagattgggaagcggaggtctttcatcgctgccccctgtcaaatcattaccaataccagtactctattaaagaactatcaggataacaacaagatgttggtattagcattagagaacgaaaagagcaaagtcaaggaggcccaagacatcattcttcagctgaggaaagagtgctactatcttacctgccaactctatgccctgaagggaaagctaacttctcagcagactgttgaaccagcgcagaatcaggagatttgttcctcaggaatggaccctaatagcgacgactcgtctaggaaccttttcgtcaaggacctgcctcagatcccactagaagagactgagcttccaggtcagggggagtcttttcagatagaagaccagatcccgactataccgcaagataccctgggcgtggacttcgacagcggggaggccaaatctacagacaatgtcctaccccgaaccgtgagtgtgcggagctcactcaagaaacattgcaattctatctgccaatttgactccttggatgacttcgagacatcgcatctagccgggaagtcgttcgagtttgaacgtgttggttttctcgaccctttagtgaacatgcatattcctgagaatgtgcagcacaatgcctgccaatggtcaaaggaccaggtgaacttgtcccccaaattaatacaacccggtacttttaccaagacaaaggaggacatcctcgagagcaaaagcgagcagaccaaatcaaaacaacgtgatacacaggagagaaaaagggaagagaagcgcaaggctaaccgccgcaaatcaaaacggatgtctaaatacaaagaaaacaaatcagagaacaaaaagactgtcccacagaaaaagatgcataagtctgtgagctctaacgacgcctataattttaatctggaagagggagttcacctcactccattccgccagaaggtctctaacgactccaaccgcgaggagaataacgagagcgaggtgtccttgtgcgagagctccggcagcggcgacgacagcgacgacctgtacttacctacttgtaagtatatccagaatcctacaagtaattcagaccgacctgtgacgagaccgttggctaaacgcgccctgaagtataccgatgaaaaagagacagaagggtccaagcctaccaagaccccgaccacgacgcccccagaaactcagcagtccccacacctctcgttaaaggacatcacaaatgtgagtttgtacccagtagtgaagatcaggaggctcagcctttcccctaagaaaaacaaagcgtcccctgccgtggctctgcctaagagaagatgtacagcgtcggtgaattacaaggaaccgacactcgctagtaagctgcgccgaggcgaccccttcaccgatctgtgcttcctgaacagcccaattttcaagcagaagaaggacctaagacgcagtaagaagcgagcgctggaagtctccccagccaaggaggcaatctttatactctactacgtacgtgagttcgtctcccgctttccggattgtagaaagtgcaagctcgagactcatatttgtctgagatag

SEQ ID NO: 134275 - DNA, 930 bp, synthetic construct
  misc_feature 1..930: note = Description of Artificial Sequence: Synthetic coding sequence
  source 1..930: mol_type = other DNA
atggcaaaagaaaggtgtctaaaaaaatcttttcaagactccttggaggatataaagaaaagaatgaaagagaagcggaacaaaaatcttgccgaaataggtaagcggcgaagcttcattgctgcaccttgtcagattatcaccaatacatcgactctgctgaaaaactatcaggataacaacaaaatgctggtcctggcgttggaaaatgaaaagtccaaggtcaaagaagctcaggacattattcttcaactccgcaaggagtgctattatctgacctgtcagctatatgccctcaaaggcaagctgacatctcagcagaccgtggagccggctcaaaatcaggaaatttgcagttcaggcatggatccaaactctgatgacagttccagaaatctgttcgtgaaggacttaccccagatcccgctggaagagacagagttgcccggccagggcgaatccttccagatcgaagaccagatccctaccatcccacaagacacattgggagtagacttcgacagcgccaccccacctgaaacccagcagtcccctcacctctccctcaaggacatcaccaacgtgagcctttatcctgtagttaaaatccgaaggctgtccttgagtcctaagaagaacaaggccagtcccgccgtggcactgccaaagcgccggtgcacggccagtgtcaactacaaggagcctacgcttgcctcaaaactgaggcgcggcgatccttttaccgatctctgttttttaaactctccaatctttaagcagaaaaaagacctgcggcgctccaagaagagagcgctggaggtctcccccgccaaagaggcgatatttatcctatactatgtgcgggaattcgtgtctaggttccctgactgccggaaatgcaagctcgaaactcacatctgcctccggtag

SEQ ID NO: 134276 - DNA, 777 bp, synthetic construct
  misc_feature 1..777: note = Description of Artificial Sequence: Synthetic coding sequence
  source 1..777: mol_type = other DNA
atggcaaaggaacggtgtctcaagaaatctttccaggacagccttgaggatattaaaaaaagaatgaaggaaaagcgtaacaagaacctggccgaaatcggaaagcgccggtcttttatcgcagccccctgtcagatcataacaaatacaagcacgctgttgaagaactaccaggataataacaagatgttggtgctcgctctggaaaacgagaaaagtaaggtaaaggaagcacaggacattattctccagctccgcaaagaatgttattaccttacctgccagctgtacgccctcaagggaaaactcaccagtcaacaaacagttgaacctgcccaaaaccaggagatctgcagtagcgggatggatccaaatagcgacgactcctccaggaacctgttcgttaaagatctgcctcagattcccctcgaagaaaccgagttgcctgggcaaggagagagtttccagattgaggctaccccacctgagactcaacaaagccctcatttatccctgaaagatattacaaacgtctcactttacccagtagtcaagatcaggcgcctgtcactgtccccgaagaaaaacaaggcctcaccagcggtggccctgcctaagcggaggtgtacagccagcgtcaactacaaggaacctacactggcttctaaattaagaagaggcgacccatttacggatctttgctttctgaatagtcccatcttcaagcagaaaaaagacctgcgcaggtccaagaagtcaatgaagcagattcaatag

SEQ ID NO: 134277 - DNA, 828 bp, synthetic construct
  misc_feature 1..828: note = Description of Artificial Sequence: Synthetic coding sequence
  source 1..828: mol_type = other DNA
atggcgaaagagcggtgcctgaaaaaaagctttcaggattctttggaagacattaagaaaagaatgaaagagaaaagaaataagaacctggccgagattggcaagcggcggagctttatcgcggccccatgccagataatcacgaacacaagtacactcttgaaaaactatcaggataataacaagatgctggtactggcgttggagaacgagaaatcaaaggtcaaagaggcacaagacattatccttcagttaaggaaggaatgctactacctcacctgccagctgtatgccctcaagggaaaattaacatcccaacagaccgtcgagccggcacagaaccaggagatctgtagctccggcatggatccaaactccgatgatagcagtcgcaatctattcgtgaaagatctcccccagatcccgctcgaggagaccgaactgccagggcaaggcgagagcttccagatcgaagatcagatacctacaataccccaggataccttaggcgtggactttgactccgctactcccccggagacccaacagtctcctcaccttagcctgaaggatataactaacgtaagcctgtaccctgtggtcaaaattaggcgattgtctctgagtccgaaaaaaaacaaggcaagcccggctgtggcactgccaaaacgacgctgcacagcctccgtaaactataaggagcccacactcgcatcgaagctaagaaggggggacccctttacggacttatgttttctgaatagccctatcttcaagcaaaagaaagatttgcggcgtagtaagaaatcaatgaagcagatccagtag

SEQ ID NO: 134278 - DNA, 777 bp, synthetic construct
  misc_feature 1..777: note = Description of Artificial Sequence: Synthetic coding sequence
  source 1..777: mol_type = other DNA
atggcaaaggagagatgccttaaaaaatcgtttcaggactcactggaggatataaagaagcggatgaaggaaaaaagaaataaaaaccttgcggagattggcaaacgtcgttcttttatcgcagccccctgtcagatcattactaataccagcaccttactgaagaactaccaggataataacaaaatgcttgttctcgccttagagaatgaaaaatcaaaagtaaaagaggcccaagatattatacttcagttgcgtaaagaatgctattatctaacatgccaactgtatgccctgaagggaaagttgactagtcaacagaccgttgagcctgcgcagaatcaggagatctgttccagcgggatggatccgaactcggatgatagctctcgcaacttgttcgtgaaagatctacctcagatacctctagaagaaactgagctccctgggcagggagagtcgttccagatcgaggcaaccccaccagagacccagcagagccctcacctgtccttgaaagacatcactaatgtctctttgtatcctgtggttaagatcagacgcctgagcctgtccccgaaaaagaacaaggcgtccccagctgttgctttacccaaacggcgatgtactgcatcggtgaactacaaggaaccaactctggccagcaaacttaggaggggggacccatttaccgacctgtgtttcctcaattccccaatatttaagcagaaaaaggatctgaggaggagcaaaaagtctatgaagcagattcaatag

SEQ ID NO: 134279 - DNA, 879 bp, synthetic construct
  misc_feature 1..879: note = Description of Artificial Sequence: Synthetic coding sequence
  source 1..879: mol_type = other DNA
atggcgaaagagcggtgtctcaagaaaagttttcaggactctctggaagacatcaaaaaacgcatgaaagagaagcgaaacaaaaatctggctgagatcggcaagagacgctcctttattgcggccccgtgtcaaataattacaaacacctctactcttctgaaaaactaccaggataacaacaaaatgctggttctggccctggaaaatgagaaatcgaaagtcaaagaggcccaagacatcatcctgcaactgcgcaaggaatgctattatttgacatgtcagctgtatgctctgaaaggcaagctgacatcccagcagactgtggagcccgcccagaaccaggagatatgtagctcaggtatggaccctaattcagatgactctagtcgcaatctatttgttaaggatcttccacagattccactcgaagagactgagttgccaggccaaggcgaatctttccagattgaggcaaccccccctgaaactcagcaatctccacatctctctctgaaggatataacaaacgtcagcctctatccagtggtcaaaatccgacgactgtctctgtccccaaagaaaaacaaagcctcccctgcggttgctctccccaaacgacggtgtacggcctcagtcaattataaggaaccaacactggccagtaagctgagacgcggggatcctttcactgacctgtgttttctaaattccccgattttcaaacaaaagaaagacctgcgcagaagtaaaaagcgggccctcgaggtgagccccgccaaggaagccatctttatcctctactatgtgcgcgagtttgttagtaggtttccggattgccgcaaatgtaagctggaaacccatatatgtctacgttag

SEQ ID NO: 134280 - DNA, 3798 bp, synthetic construct
  misc_feature 1..3798: note = Description of Artificial Sequence: Synthetic coding sequence
  source 1..3798: mol_type = other DNA
atggagtgccctgtaatggaaactgggtcactctttactagtgggatcaaacgacacctgaaggacaagcggatcagtaaaacaaccaagcttaacgtgagtctcgcatcaaagattaaaacgaaaattctgaacaatagcagcattttcaagatctcacttaagcacaataaccgagctctcgcccaggcgctgagccgggaaaaggagaactcaaggcggatcacaacggaaaaaatgttgctgcagaaagaagtggagaagctgaatttcgagaacacatttttgagactcaagctaaacaacttgaataagaaactcatcgacattgaggccctaatgaacaacaacctgatcacagctatagagatgagctccctttccgaattccaccaaagtagtttcctgttgagtgctagcaagaagaagaggataagtaagcaatgtaaacttatgagacttccttttgcccgcgttcccctgacatcgaatgacgacgaggatgaagataaagagaagatgcagtgtgacaataatattaagtccaaaacccttccggacatccccagttcaggtagtactactcagcccctcagtacgcaggataattccgaggttctgtttttgaaggagaacaaccaaaacgtctacggactggatgacagtgagcacatctctagtatagtggatgttcccccaagagaaagccatagccatagtgaccaatcctcaaagacttccctcatgagcgaaatgaggaacgcccagtccataggacgacggtgggaaaagccgagtccctccaatgtgacagaacgaaaaaagcgggggtccagctgggagagtaataacctctccgcagatactccgtgtgccaccgtcctcgacaagcaacatatcagttcacccgaactgaactgtaataatgagatcaacggccatacaaatgaaaccaataccgagatgcagcgcaacaagcaggacctgcccgggttgtctagcgagtccgcgcgggagccgaatgccgaatgtatgaaccagatcgaagataatgacgactttcagctccagaagacagtctatgacgcagacatggacctgactgcgtccgaggtgtctaagattgttacggtatccactggaatcaaaaagaaaagcaataagaaaacaaatgagcatgggatgaaaaccttcagaaaggtgaaggactcctcctccgaaaagaagcgggaaaggtctaagaggcagtttaaaaattcttctgatgtggatattggagaaaaaatcgagaatcgcacagagagatcggatgtcctcgacggcaagcggggggcagaagatccgggttttatcttcaacaacgagcagcttgcccagatgaacgagcaactcgcccaggttaatgaactcaaaaagatgacgcttcagacaggttttgagcaaggcgaccgggagaatgtgctctgcaacaagaaagaaaagcggattaccaacgaacaagaggaaacatactctctctctcagtcctccggaaaattccaccaggagtcaaaatttgacaagggacagaattcactcacatgtaacaaatctaaggcaagtaggcaaacttttgttatccataaactggaaaaggacaacctccttcccaaccagaaggataaagtgaccatatatgagaaccttgatgttaccaatgaattccataccgcaaacctgtccaccaaggataacgggaatttatgcgattatggcactcataacatcttagacctaaagaagtacgtaacagacatccaacctagcgaacagaatgagagtaacattaacaagcttagaaaaaaggtgaataggaaaacagaaatcatcagcgggatgaatcacatgtatgaggataacgacaaggacgtggttcatggcctaaagaagggaaattttttctttaaaacccaggaggacaaagagccaatcagcgaaaacatcgaagtgtcaaaggagctccagatccctgcactctctaccagggataacgaaaatcagtgtgactacagaacccagaacgtgctcgggcttcagaaacagattacgaatatgtatcccgtgcaacaaaatgagtcaaaagttaataagaagctgcgccagaaagtgaatcgaaagacagaaatcatcagtgaggtgaatcatctggacaatgataaaagcatcgaatacacggtaaagtcccatagcctgtttttgactcagaaagacaaagagataattcccggaaatttggaggatccctccgagttcgagactcccgccctgagcaccaaagactccggaaatctttacgattctgaaatacagaatgtgctgggggtaaagcatggccatgacatgcagccagcttgtcagaacgacagcaagattgggaaaaagcctaggttaaatgtctgccagaaaagcgaaatcatacctgagactaaccagatctacgaaaacgataacaaaggtgtgcacgatctcgagaaggataacttcttctcactgaccccaaaggacaaagagacaatctctgaaaacttacaggttaccaacgagtttcagacggtagacttgttaattaaagacaatgggaacctgtgcgactacgacacccaaaatatactggagctgaagaagtatgtcacagaccggaagtccgctgagcaaaacgagtcaaagataaataagctgcggaataaggtcaattggaaaaccgaaattatctcagaaatgaatcagatttacgaagacaatgataaggatgcccacgtccaggagagctacacaaaggacctggatttcaaggtcaataaatctaagcagaagttggagtgtcaggatatcattaataaacattatatggaggttaactctaacgagaaagagagctgcgaccagatccttgatagctataaagtggttaagaagagaaaaaaggagagctcttgcaaggctaagaacattctaacaaaagcaaaaaataaacttgcttcccagcttacggagtcctcccagacctctatatccctggaatctgacctcaagcacatcacgtcagaggctgacagcgaccccgggaatcccgttgagctgtgcaaaacccagaaacagagtacgacaaccctgaacaagaaggatttaccatttgtcgaggagatcaaggagggggagtgtcaagttaagaaagttaacaagatgacaagcaagtctaaaaaacgtaagacttcaattgaccctagcccggagagccacgaagtcatggagaggatattagacagtgtgcagggcaaatctactgtcagcgagcaggcggataaggaaaacaaccttgagaacgagaaaatggtcaagaacaaacccgatttttataccaaggccttcagaagcttaagcgagatccacagccccaacattcaagacagtagctttgatagtgtgagggagggactggtgcctttgtcggtctctagcggcaaaaacgttatcataaaagaaaatttcgcacttgaatgctcgcctgctttccaggtttctgatgatgaacatgagaagatgaataaaatgaagttcaaggtcaacaggaggacacagaagtctgggattggcgatagacccctgcaggacttgagtaacacaagcttcgtctccaacaatacagccgagtccgagaataaatcagaagacttgtcaagcgagcgcacatctagacgacgacgctgcaccccattctactttaaagaaccatcactgcgcgacaagatgcgaagatag

SEQ ID NO: 134281 - DNA, 744 bp, synthetic construct
  misc_feature 1..744: note = Description of Artificial Sequence: Synthetic coding sequence
  source 1..744: mol_type = other DNA
atggagtgccctgtcatggagacagggagtctttttacttccgggattaagcgtcacttaaaagataaacgcatctctaagacaacgaagttgaatgtgtccctcgccagtaaaataaaaaccaagatactgaacaacagtagtatttttaagatatccctgaagcataataaccgagcactggcacaggctctgtccagggaaaaggagaactctaggcgcatcactacagagaaaatgctgctgcagaaggaggttgagaagctcaactttgaaaataccttcttgcgtctgaaactgaataacctgaataagaagctgatcgatatcgaagcactcatgaacaacaatctgatcacagccatcgagatgagttcactgagcgagttccatcagagcagctttctgctgtccgcaagtaaaaaaaaaagaataagcaaacagtgcaagctcatgcgcctaccattcgcccgcgttcccctcacctctaatgacgatgaggatgaggacaaggaaaagatgcagtgtgacaacaatatcaagagcaaaacactcccggacataccttcctccgggagcaccacacagcctttgtcaacgcaggataattccgaagtgctgtttcttaaggaaaacaaccagaacgtatatgggctggatgactcagagcacattagctcaatcgtcgatgttccgccacgcggcgaaatcgtcctcaagatccattttgaatacctgtactag

SEQ ID NO: 134282 - DNA, 264 bp, synthetic construct
  misc_feature 1..264: note = Description of Artificial Sequence: Synthetic coding sequence
  source 1..264: mol_type = other DNA
atggagtgtccggtgatggagacgggtagtcttttcacgagtggcattaagcggcatctgaaagacaagagaatttctaagaccaccaagctaaacgtgtctctggcatcaaaaattaagactaagattttgaacaattcttccatattcaagatctcattaaaacacaataatagagctctagctcaggctctgtccagggaaaaagagaacagccgccggatcacaactgaaaagatgttactgcagaaggaggtggagtag

SEQ ID NO: 134283 - DNA, 753 bp, synthetic construct
  misc_feature 1..753: note = Description of Artificial Sequence: Synthetic coding sequence
  source 1..753: mol_type = other DNA
atgagtatctttacacccaccaaccagatcagattgaccaacgtcgcggtggtacgtatgaagcgtgccggcaaacggttcgaaattgcctgctacaagaacaaagtggtggggtggaggtcaggtgtggaaaaggacctagacgaggtgctgcaaacacactccgtattcgtcaacgtcagtaaaggccaggtggccaagaaggaagacctgatctctgcgtttggaacagatgatcagacagaaatttgcaagcagattttgaccaagggcgaggtacaggtgtcagacaaagagcgacacacacagcttgagcagatgtttagggatattgcaacaatcgtggccgacaaatgcgtcaatccagagacaaagcgcccctacacggtgatcctgatcgaacgagcaatgaaagatatccactattccgtcaaaacaaacaaatctacaaagcagcaggccttggaggtgattaagcagctgaaggagaagatgaagatagagcgcgcccatatgaggctgcgctttatcctaccagtgaatgagggaaagaagctcaaggaaaaactcaaacccttgatcaaagtaatcgagtccgaagattatggacagcaactggaaattgtctgcctgattgatccgggatgctttcgggagattgatgagctgatcaagaaggagacaaaagggaagggatctctggaagtgctcaatctgaaggacgtggaagagggtgacgaaaaatttgagtag

SEQ ID NO: 134284 - DNA, 1572 bp, synthetic construct
  misc_feature 1..1572: note = Description of Artificial Sequence: Synthetic coding sequence
  source 1..1572: mol_type = other DNA
atggtagcaccagggctggtactcggtctggtactcccattgattctgtgggccgacagatctgcgggcattggttttcgatttgcatcgtatattaataatgatatggtgctgcaaaaggaaccagctggcgcggtgatttggggctttggaacccctggcgcgacagtaactgtgacattaaggcagggccaggagactatcatgaaaaaggtgaccagtgttaaggcgcacagcgacacctggatggttgtgttggatccaatgaagcctggcggtccatttgaagtgatggcacagcaaacacttgaaaagatcaatttcacactacgggtacatgacgtcctgttcggcgacgtctggctgtgctctggtcaatccaatatgcagatgaccgtgttacagattttcaatgctacgagggagctttctaataccgcagcctatcaaagcgtccgcatactgtccgtaagccctatccaggccgagcaagaacttgaggatttagtagctgtggacttgcaatggagcaaaccaacctccgaaaatctgggccacggctactttaagtatatgagtgcagtatgctggcttttcggacgtcatctgtatgatactctccaatatccaatcggactgatcgcatctagctggggaggtacgccaattgaagcttggagctccggaagaagtctaaaggcctgcggcgtgcccaagcagggttcaattccctatgattcagttacagggccctccaaacactctgtgctttggaatgccatgattcatccgttatgtaatatgaccctgaaaggcgtagtctggtatcagggagagtcaaatatcaactacaataccgatctgtacaattgtacctttcccgccctgattgaagactggagggagacctttcataggggcagccagggacaaacagagagattctttcccttcggactggtgcagctatccagcgatctgagcaaaaagtcatcagatgatggctttcctcagattaggtggcaccagacagccgactttggctatgttcccaaccctaaaatgcccaatactttcatggcagtcgccatggacctttgcgatagggactccccgttcggttcgatccacccaagagacaagcagaccgttgcctatcggcttcacctcggcgctagagcactggcctacggcgagaaaaatctcaccttcgagggtccattgcccgagaagattgagctgctggcccataagggtttgttgaacctgacatactaccagcaaattcaagtgcaaaagaaagataataagatattcgagatctcttgctgcagtgatcacagatgcaaatggctgcctgcctctatgaacactgtcagtacccaaagcctgaccctggcgattgactcctgccacggcacagtagtggctcttagatacgcctggacaacctggccatgtgaatacaaacagtgtccgctgtatcacccgagctctgcactgcctgcccctccctttattgccttcataaccgatcaggggcctggccatcagtcaaatgtggctaagtag

SEQ ID NO: 134285 - DNA, 1467 bp, synthetic construct
  misc_feature 1..1467: note = Description of Artificial Sequence: Synthetic coding sequence
  source 1..1467: mol_type = other DNA
atggtactgcagaaagaacctgcaggtgcagtgatctgggggttcgggacgccaggcgctacagtcaccgtgaccctcagacagggccaggagaccattatgaagaaagtgacctctgtgaaggcccactcagatacctggatggtggtgctggaccccatgaagcccgggggtcctttcgaggtcatggcccagcagactcttgagaagatcaatttcaccctgagggtgcatgatgtgttgtttggcgatgtgtggctgtgctctggacaatcaaacatgcagatgacagtgctgcaaattttcaacgccaccagagaactgagcaacacagcagcgtatcagagcgtgaggattctctcagtgagccctatccaggccgagcaggagctggaagatctagttgctgtcgatctgcagtggtcgaaacccaccagcgaaaacctgggacatgggtactttaaatatatgagcgccgtctgctggttgtttggccggcacctgtacgatactctgcagtatccaattggtctaattgcttccagctggggcgggactcccatcgaggcttggtcttcagggaggagcctaaaggcttgtggagtccctaagcagggttccatcccatacgacagtgtgacagggccctcaaagcattccgttctctggaatgctatgatccatcccctgtgcaacatgaccttgaagggggtggtatggtatcagggcgagtcgaacatcaattataacaccgacctgtacaattgcaccttcccggcgctaatcgaggattggcgcgagacctttcacagagggtcccagggtcagactgaaagattttttccattcggcctagtgcagctgagcagtgatctatccaaaaagtcttccgatgatggcttccctcagattagatggcatcaaaccgccgatttcggctacgtgcccaatcctaaaatgccaaacacctttatggccgtcgccatggatctatgtgatcgggattcacccttcggctctatccacccccgcgataagcagactgtcgcctaccggctgcacctgggtgcacgcgccctggcctacggggaaaaaaatttaacttttgagggccctctcccagaaaagatcgagctgctggcacacaaagggctgttgaacttaacttattaccagcagatccaggtgcaaaagaaggataacaaaattttcgaaatctcttgttgttccgatcaccgctgcaaatggctgcccgcttcgatgaacacagtgtccacacagtccctcaccctggctatcgactcatgtcatggtactgtagtggccctgcggtatgcgtggaccacatggccttgcgagtataagcagtgcccattataccacccttcatccgcacttcctgctcccccattcatcgcttttatcactgatcaggggccgggacatcaatctaatgtggcaaagtag

SEQ ID NO: 134286 - DNA, 2094 bp, synthetic construct
  misc_feature 1..2094: note = Description of Artificial Sequence: Synthetic coding sequence
  source 1..2094: mol_type = other DNA
atgttattaccgctcctcctgagcagtctcctcggcggtagccaggctatggatggcaggttttggatccgcgttcaggaaagtgtcatggttcctgagggactatgcatctctgttccgtgctctttctcttacccacggcaagattggaccgggagtacgcccgcctacggttactggtttaaagccgttacagagacaactaagggcgcacccgttgcaaccaatcatcagagcagagaagtcgagatgtcaacgcgcggcagattccagcttaccggcgatccggccaaaggcaattgctcacttgttattcgagacgctcagatgcaggatgaatctcagtacttcttccgagtggaaaggggatcctatgtgcgttataattttatgaatgatggattcttcctcaaagtgacagctctcactcagaaacccgatgtttacattccggagactctggaaccgggccagcccgttacagtgatctgcgtgtttaattgggccttcgaagaatgccccccaccctcctttagctggaccggcgccgctttgtcttctcagggcaccaagccaactaccagtcatttttccgtgctatcctttacgccccggccacaggaccacaataccgacctgacatgccacgtggacttctctcggaaaggcgtgtcagcacagcgaaccgtaaggctgcgagtggcttatgcccctagagacctcgtaatcagcatatcccgtgataatactccagccctagagccacaaccccagggcaacgtgccctacttggaggcccagaaagggcaatttctccggctcctgtgtgccgctgacagccagccccccgccactctcagctgggtgttacagaatcgagtgctgtcatccagccacccttgggggcctcgtcccttgggcctggagctgcctggggtaaaggcgggagacagtggacggtatacttgcagagctgaaaaccgcctcggaagccagcaacgggctctcgacctaagcgtccagtaccccccagagaacttgcgggttatggtatctcaggctaatagaacggtgttggagaacctcggcaatggcacctcactgccggtgctggagggccaatccctgtgcttggtttgtgtgactcatagctcaccgccggctagattatcatggacacaacggggtcaagtgctctcccccagccagccctctgaccctggagtcctagagctcccgcgcgtccaggtcgagcacgagggcgagtttacttgccacgcccggcaccccctgggtagccagcatgtaagcctgagccttagcgtacattattcgcctaagcttttaggtccgagctgttcttgggaggccgaggggttgcactgttcctgcagctcccaagcctcgcctgcccctagtctgaggtggtggctcggcgaggaactgttggaaggcaacagcagtcaagattcatttgaggtgacaccttcatccgctggtccatgggcgaactcatcgctatctctgcatggtgggctgtccagcggactgcgcttgcggtgcgaagcatggaatgttcacggcgcacagtctggatccattctccagctcccagacaagaaaggactaatttccacggcattctccaatggagcctttctggggattgggatcacggcgctactcttcttgtgcttagctcttattataatgaagatactgccaaaacgtcggacccagaccgaaactccacggccgagattttctagacactcaacgatcctggactacataaatgtcgtgcccacagctggtccactggcccaaaagcgtaatcagaaagctactccaaactctcccagaacccccctccctccaggcgctccttcacccgaatcaaaaaagaaccagaaaaaacaatatcagttgccttccttcccagagccgaagtccagtactcaagccccggaatcacaagaatctcaggaagaactgcactacgccacactgaatttccccggggttcgacccagaccagaggccagaatgccgaaagggacgcaggctgattacgcagaggtgaagttccagtag

SEQ ID NO: 134287 - DNA, 1809 bp, synthetic construct
  misc_feature 1..1809: note = Description of Artificial Sequence: Synthetic coding sequence
  source 1..1809: mol_type = other DNA
atgctgttacccctcctgctgtctagcctccttggcgggtcgcaggctatggatggcagattctggatccgcgtgcaggaatctgtaatggtgcccgaaggcctttgtatctccgtcccgtgcagtttttcttatccgagacaggattggactggctccacacctgcctatgggtactggttcaaagctgttactgaaactacaaaaggagcacccgtggccacaaaccaccaatctcgagaggtggagatgagtacgagaggtcgcttccagttaacaggcgaccccgccaaagggaattgttctttggtcattcgcgatgctcagatgcaagacgaaagtcagtattttttccgggtcgaacgcggctcttacgtgaggtataattttatgaatgatgggtttttcctcaaagtgacagctttgacacaaaaacctgacgtatatattccagagaccctggagccaggacagcccgtcacagtgatttgcgtcttcaattgggctttcgaagagtgtcccccgccctcattcagttggacaggcgctgcacttagctctcagggcactaaacctacaacatcccacttcagtgtcttatcctttactcccaggccacaggatcataacaccgatttgacttgccacgtcgatttctctagaaaaggcgtgtccgcgcaacgaactgtgcgtctgagggtagcctacgctccccgggatctagtgatcagcatcagtcgcgacaacacccccgccctcgagccccaacctcagggaaacgtcccttacctggaagctcagaagggccagtttctgcgcctgctctgcgctgccgattcccagccacctgctactctgtcttgggttctccagaaccgggtgctatcatcttctcacccatggggcccacgcccactgggccttgagcttccaggtgtaaaggctggagacagcggacggtacacctgccgggccgagaacagactgggtagccagcagcgtgctctggacctctctgtgcagtatccaccagaaaacttaagagtaatggtctctcaggccaatagaacagtgttagaaaacctagggaatggcacatcactgccagtgctggaggggcaatcactgtgcctggtatgcgtgacccactccagtccaccagcccggttgtcttggacccagagaggccaggtcctgagtccttctcagccctcagaccctggcgtgctggaacttccccgcgtgcaggtcgagcacgagggtgagtttacttgccacgcgcgacaccccttaggctcccagcacgtgtccctcagccttagcgtgcactacaaaaaagggctcatttccaccgctttttcaaacggcgcttttttaggtatcggcattaccgcactgctcttcttatgtctcgctctgataattatgaagatcttacccaaacgaagaacgcagacggaaactcccaggcctaggttcagcagacatagcacaatcctcgattacatcaacgtggtccccaccgctggccccctggcccagaaacggaatcagaaagcaacgcccaatagccctagaacccccctccctccaggagcccctagccctgaatctaaaaagaaccagaaaaaacagtatcaactgccctcatttcctgagcccaagtcgagcacgcaagctcctgagtcacaggagagtcaggaggagcttcattatgccacattaaactttccaggtgtaagaccaagacctgaggcccgaatgcccaagggaacacaggccgactacgctgaggtgaagttccaatag

SEQ ID NO: 134288 - DNA, 2094 bp, synthetic construct
  misc_feature 1..2094: note = Description of Artificial Sequence: Synthetic coding sequence
  source 1..2094: mol_type = other DNA
atgctactgccactgcttctctcaagtctgctgggtggatctcaggccatggatggacggttttggatcagggtgcaggagagcgttatggtcccagagggactctgcatcagcgtgccatgtagtttctcctacccgaggcaggattggacaggctccaccccagcctatggctattggttcaaggccgtaactgagacaaccaaaggcgctcctgtggccaccaatcatcagtcccgtgaagttgagatgtccactagagggcgtttccagttgactggagacccagcaaagggtaattgtagcctggtcatccgggacgcccaaatgcaggacgaatcacaatacttttttagggttgagcgcggctcttatgtgcggtacaatttcatgaatgacggcttcttcctcaaagttaccgctttaacacagaaaccagacgtctacatcccagaaaccctggaaccaggtcaacccgtgactgtgatctgcgtctttaactgggccttcgaagaatgcccccctccctcctttagctggactggagcagcgctgagcagccagggaactaagccaaccacgagtcacttttcggttcttagctttacacctagaccacaagaccacaacaccgatctcacctgccacgtggacttcagccggaaaggagtttcagcgcagcgcacagtgagacttcgtgtcgcctacgctccaagggatctggttatctccatttccagagataacaccccagcactagaaccccagccgcagggcaatgtcccatacctcgaagcccagaagggacagttcctgcgcctcctgtgcgcagccgacagtcaaccgcccgccacactgagctgggtgctgcagaacagggttttgagcagttcacatccctggggcccaaggcctctcggactcgaactaccgggcgtcaaagccggagacagcgggaggtatacttgtagagccgaaaacaggctaggatctcagcagagggctttggatctaagtgtgcaatacccacccgagaatctcagagtcatggtgtcccaggctaacaggaccgtattagaaaacttaggaaatggcacgtcactccctgttttggaaggacaaagcttatgccttgtttgcgtaactcactctagtcccccagcacggctctcttggacccagagaggccaggtcctgtctccctcccaaccctctgatccgggagtcttagaattgcctcgcgtgcaggtcgagcatgagggcgaatttacctgccacgctagacacccacttggaagtcaacacgtgagtctctccctgtctgtgcattattcccccaagcttctggggccctcctgcagctgggaggctgaaggtctgcattgttcctgttcctctcaagcttcgcctgccccttctctgcggtggtggctcggcgaggaactgctggaggggaactcttcccaggacagctttgaagtcaccccatctagtgccggcccgtgggctaattcctctctctcccttcacggtgggctgtccagcggcctgcgactcaggtgtgaagcctggaacgtgcatggggcacagtctggatctattctgcagctgcccgacaaaaagggacttattagtaccgctttctctaacggggctttcctgggtataggaattactgctctgctttttctttgcctagccttgattattatgaaaatcctgcccaagcggcgcacacagaccgagaccccccggccacgtttctcccggcattccaccatcctggattatattaatgttgttcccaccgccggcccactggctcagaaaagaaatcagaaagccacacccaactcccctcgcacgcctcttccacctggggccccatctccagagtccaaaaaaaaccagaaaaagcagtatcagctcccctcctttcctgagccaaagtcgagtacccaggccccggagtcccaggagagtcaggaggaactccattacgccaccctaaatttcccgggcgtccgcccccgtcctgaggcccggatgccaaagggcacccaagccgattacgctgaggtaaagttccagtag

SEQ ID NO: 134289 - DNA, 1560 bp, synthetic construct
  misc_feature 1..1560: note = Description of Artificial Sequence: Synthetic coding sequence
  source 1..1560: mol_type = other DNA
atgctcctgcctctactccttagttccctattgggaggtagccaggctatggacgggaggttctggattagggtacaggaatctgtaatggtgccagagggcctctgtatttccgtgccatgtagtttcagttatcccaggcaggattggaccggctccacccccgcttatggctactggtttaaggccgtaacagaaaccacgaaaggggcccccgtggctactaaccatcagtcccgggaagtcgaaatgagtactaggggccggttccagctcaccggcgatccagccaagggaaactgtagtctggtgatacgagacgcacaaatgcaggacgaaagtcagtattttttccgtgtcgagaggggctcctatgtccggtataattttatgaacgacggcttttttctgaaagtgacagccttgacccagaagacagtccgcttgagagtggcatatgcaccccgcgatctagtgattagcattagtagggacaacactccagctcttgagccccagcctcaagggaacgtgccatatctggaggcccagaaagggcagttcctccggctgctctgcgctgccgactctcagccacccgcaacactgtcgtgggtcttacagaaccgcgtcctgtccagctctcatccatggggtcctcgaccactcggcttggagttgccaggcgtgaaagcaggagattccgggcgatatacctgtagagccgagaaccgtttaggttcccagcagcgcgcacttgacctgtccgtccagtatccacctgagaatctgcgcgtgatggtgtcacaggccaaccgaaccgtcctcgagaatctcggaaatgggacttccctgcctgtgctggaaggacagagcctttgcctcgtttgcgtgacacactcctcgcctccggcaaggctgtcctggactcagcgcggacaggttctttcgcctagtcagcccagcgatccaggcgtcctcgaactccctagagtccaggtcgagcacgagggagagttcacctgccacgctcgccatcctctcggaagtcagcacgttagtctgtccctgagtgtccactacaagaagggcctcattagcaccgccttctcaaatggcgccttcctcgggatcggaatcaccgctctgctgttcctttgcctggcccttatcatcatgaagatcctgcctaagaggcgcacccagacagagacaccaaggccgaggttttcgaggcactccactattctagactatatcaatgtcgtgccaacagcaggaccattggcccagaagcgtaaccagaaggctacacccaactcaccccgcacgcctctgccccccggggctccctcacctgaatccaaaaagaatcagaaaaaacagtaccagttgccctccttcccggagccaaagtcatctacgcaagccccggagtcacaggaaagccaagaggagctgcactatgctaccctgaattttcccggcgttcgcccacgtcccgaggccaggatgccaaaggggacccaggccgactatgctgaagtcaagtttcaatag

SEQ ID NO: 134290 - DNA, 1920 bp, synthetic construct
  misc_feature 1..1920: note = Description of Artificial Sequence: Synthetic coding sequence
  source 1..1920: mol_type = other DNA
atgttgctgcctttgcttctctctagtcttttaggtggtagtcaagccatggatggccgcttctggattcgcgtgcaagagagcgtcatggttcccgaaggtctgtgtatcagcgtgccctgtagttttagttatccccgacaggactggacaggatctacgcccgcctatggctattggttcaaggccgtgactgagactacgaagggggcccccgtggcaactaatcaccagtccagagaggtagaaatgtctactcgggggaggttccagttaaccggtgatcctgccaagggaaactgttcacttgtgatccgcgatgcccagatgcaggacgaaagtcagtacttcttccgtgtcgagagaggatcctacgttcgctacaactttatgaatgatggatttttcttgaaagtgacagtcctgagtttcacacctagacctcaggatcacaatactgacctaacatgccacgtggacttctctcgtaaaggggtgagcgctcaaagaacagttaggctccgagtggcctatgcaccacgggacctagtcatatccatcagccgggacaacacacccgcccttgaacctcagccgcaaggcaatgtaccctatttggaggctcagaaggggcagttcctcaggctcctgtgcgccgcagactctcagcccccagccaccctaagttgggttctccagaaccgagtgctgtcctccagccacccctggggcccacgccctttggggctcgagttgccaggggtgaaggcaggggactccgggagatatacttgtcgggccgagaacagactgggcagtcaacagcgcgctctcgacctgtccgtgcagtaccctcccgagaacctcagggttatggtttctcaggcgaacagaaccgtgctggagaatcttggcaacgggacgtccctgccggtgctggagggccagtccctgtgcctcgtgtgtgtcacacattcctccccacctgccaggttgagctggacccaacgtggacaggtgctgtcgccctcgcagccatcagatccgggcgttctcgagttgccccgcgtacaggttgagcacgaaggagagttcacgtgccacgctcgtcatcctctggggtcacagcacgtatcactttccctgtcagtacattattccccaaagctcttagggccaagctgttcatgggaggctgaagggctgcattgtagttgtagctcacaggcgtcccctgcaccttccctccggtggtggctgggcgaggagctcttggaaggtaacagttcccaggattcgttcgaggtgacaccctcgtccgccgggccctgggcgaattctagcctttctctacacggcggcctgtctagcggactgagactgcgatgcgaggcgtggaatgtgcacggcgcacaaagtggatctatcctccaactcccagataagaaaggcctcattagcaccgccttctcaaacggggcattcttagggattggtattactgctcttctgtttctttgcctggcactgatcattatgaaaattcttccaaagcggaggactcagaccgagacccctcgccccaggttctcacggcacagtactatcttggactatatcaatgtcgttccaacggctggccctcttgcacagaaacgcaatcagaaggcgacgcccaatagccccaggacccccttaccacctggcgctcccagcccagaatcaaaaaagaaccagaagaaacagtatcaactgcctagtttccctgagcccaagtcctccacccaggcccctgagagccaggaaagccaggaggagcttcactacgccacattaaatttccctggtgtcagaccccggccggaagctagaatgcctaagggaacccaggcagattacgccgaagtgaagttccaatag

SEQ ID NO: 134291 - DNA, 1635 bp, synthetic construct
  misc_feature 1..1635: note = Description of Artificial Sequence: Synthetic coding sequence
  source 1..1635: mol_type = other DNA
atgctgctgccactcttactgagctccctgcttggtgggtcccaggccatggacggcaggttctggatccgcgtgcaggagtcagtcatggtcccagaggggctttgtatttcagttccatgttccttctcatatcctaggcaagattggacaggaagtacgccagcttatgggtactggtttaaggctgtaactgaaaccacaaaaggggctccagtcgctaccaaccatcagagcagggaagttgagatgtctacccgcgggagatttcagttaacaggtgacccagccaagggtaattgttccctcgtcatacgcgatgcccagatgcaagatgaaagccagtatttctttcgtgtggaaagaggctcctacgtccggtacaatttcatgaatgacggattttttctgaaggtcacagtgctgtcttttacacccagaccgcaggatcataacacggacctgacatgccacgtagacttcagccggaaaggcgtttcagctcagcgaacagtacgactcagagtcgcttacgccccccgggatcttgtcatcagtatctcccgggacaacacacccgcccttgagccccaaccacagggtaatgtgccttatcttgaggcacagaaaggtcagttcttacgcctgttatgtgcagcagatagccagccgcctgccacgctgtcatgggtgttgcagaatcgcgtgctgtcgagcagtcacccctggggccctagacctctgggcctggaactgcctggagtgaaagccggcgattcagggcggtacacctgccgcgctgagaatcgcttgggatcacagcagagggctctggatctgtcggtgcagtaccctcccgaaaatttacgggtcatggtgtcccaggcaaataggaccgtgctggaaaacctgggcaacggtacctccctccctgttctagaaggccagtccttatgtctggtgtgcgtgacccattctagcccgcccgctaggctctcatggactcagcggggtcaagtgctgtctccttcccagcctagtgatccaggcgtacttgaacttcctagggtgcaggtcgagcatgagggggaattcacatgtcatgctcgccatcctctgggctcgcaacacgtaagtttatccctgagtgttcactacaaaaaagggctgatcagcaccgccttttctaatggcgctttcctcggaatcggaattacagctctccttttcttgtgcctggccctgataatcatgaaaattctgccgaagaggcgaactcagactgagacacctagaccgcggttctcgcgccatagcacgattttggactatattaatgttgtgccaaccgccggtccgctggcacagaaaaggaatcagaaagctacgccgaactcccctcggactcctctgccacccggcgccccaagccctgaaagcaaaaaaaatcagaagaaacagtaccaacttccatcttttccagaacccaaatccagtacccaggccccagagagccaagagtcccaggaagagctgcactacgctactctcaattttcctggcgtccggcccagacctgaggcccggatgcctaaaggcacacaggccgactacgccgaggtaaagttccagtag

SEQ ID NO: 134292 - DNA, 1365 bp, synthetic construct
  misc_feature 1..1365: note = Description of Artificial Sequence: Synthetic coding sequence
  source 1..1365: mol_type = other DNA
atgctgctgcctctgctgctgtcgtctcttctgggtggctcacaagccatggacgggcgattttggatcagggttcaagaatctgttatggtgcctgagggactgtgtattagtgtcccttgcagctttagctacccaaggcaggattggacgggctctacacccgcctatggctattggtttaaagctgtcacagagacgacaaagggggcacctgttgccacaaaccatcaatcccgcgaagtcgaaatgtctacacgcggccggttccagttgactggtgacccagctaagggcaactgcagcttagtaattagagatgctcagatgcaggatgagagccagtattttttccgcgtagagagaggatcttacgtgaggtataacttcatgaatgacggtttcttcctaaaggtgacggtcttgtcatttacaccacgcccccaagaccataatactgacttgacctgccacgtggatttttcccggaaaggggtgagtgcacagcgcaccgtcaggctgcgcgttgcgtacgcccctagagatctggtgatcagtatctcacgggataatacccccgatcccccagagaacctcagggtgatggtgagccaggccaatcggactgtgctagagaacctggggaatggaacaagtcttcccgttttagaagggcaatcactttgcctcgtctgcgtgacccactcctctccacccgctcgattaagttggacccaacgcggacaggtgctttcccccagccagccatccgatcctggggtgctcgagctgccccgcgtccaggtggaacacgagggtgaatttacttgccatgcacgccatccgctcggttcccagcacgtgtccctgtctctgtcggtgcattataagaagggtttaatctctacggccttcagtaatggcgcctttttgggaatcggaatcacagcattgctgtttctgtgcctggctttgataatcatgaagatcctgcccaaaagacgcacgcagacggaaacaccaaggcccagatttagccgtcattccacaattctagattacattaacgtggttccaaccgcaggaccgctagctcagaagagaaatcagaaagccaccccgaatagccctcggacccctctccccccaggagccccaagccccgagagtaagaaaaatcagaagaagcaatatcagctcccctcttttcccgagccaaagtcgtcaactcaggcgccagagtctcaggagtcccaggaggagttacactacgcaaccctcaatttcccaggcgtccggccgcggccagaggctaggatgccaaaggggactcaagctgactacgctgaagtaaagtttcagtag

SEQ ID NO: 134293 - DNA, 1665 bp, synthetic construct
  misc_feature 1..1665: note = Description of Artificial Sequence: Synthetic coding sequence
  source 1..1665: mol_type = other DNA
atgctcctgcccctgctgctgtcgtctctcttggggggcagtcaagccatggatggtaggttctggattagagtccaggagagcgtaatggtcccagaaggtctttgtatatcagttccttgcagcttcagctatccaagacaggattggacaggctcaactccggcctatggttactggtttaaggcagtaacagagaccaccaaaggcgccccggtggccactaaccatcagtccagggaagttgagatgtctacaagagggagattccagctaactggtgatcctgcaaaggggaactgctcactggtaatcagagatgcccaaatgcaagatgagtctcagtacttcttcagagttgaacgtggaagttacgtgcgatataatttcatgaacgacggtttttttctcaaagtgacgggtactaaaccgacaacaagtcatttctctgttctgagttttactcctaggccacaggatcataacactgacctgacatgccatgtcgacttctcccgcaagggcgtgagtgcacaacggaccgttcgccttcgtgtcgcttatgcccccagggacctggtgatttcaatcagccgagacaatactccagccctcgagccgcagccacagggcaatgttccatatcttgaagctcagaaggggcagttcttgaggttgctctgcgctgccgatagccaacctcccgctacgctgagttgggtgctgcagaaccgcgtgttatcctcatcacatccttggggccctaggcctcttggactcgagctgccaggcgtgaaggctggtgacagcggacgctacacctgtagagcagaaaataggttagggagccagcagcgggcgctcgatttatctgtacagtacccccctgagaacctgagggtgatggtgagccaggccaaccggaccgtgcttgaaaatcttggcaacggtacctcgctgcccgtgcttgagggacaatctctttgcttggtttgcgtgacacactcttctccccctgctcgtttgtcatggacacagcggggccaagtactcagcccctctcagccgagcgacccaggcgtcctcgaattacctcgggtacaggtggagcatgagggcgagtttacttgtcacgcccggcaccccctagggagccaacacgttagcctgtctttatccgtccactacaagaagggactgatctccactgcattttctaatggcgcctttctggggatcggtattacggccctgcttttcctgtgtctggccctgatcatcatgaagatcctgcccaaaaggaggacccaaacagagaccccacgtccccgattcagccggcactccaccatcttagactatataaacgtggttcctactgcggggcctctcgcccagaagcggaaccaaaaggccaccccaaacagccccaggacgccccttcctcccggggcgccgtccccagagagtaagaagaatcagaaaaagcagtaccagctgcctagctttcccgagcccaagtcttccactcaggcccctgaatcccaagaaagccaagaggagttacactacgcaacgttaaactttcccggtgtgcggccacgcccggaggctcggatgccaaaaggcacccaggccgactacgctgaagtcaaattccaatag

SEQ ID NO: 134294 - DNA, 2097 bp, synthetic construct
  misc_feature 1..2097: note = Description of Artificial Sequence: Synthetic coding sequence
  source 1..2097: mol_type = other DNA
atggtgccaggacaggcccagcctcagtcacctgaaatgctgctcttacctcttctgttacccgtgctgggcgctgggagtctgaacaaagatccctcttactctctccaggtccagcgacaagtgcccgtgcccgaaggactgtgcgtgatcgtgtcctgcaacctgtcttatccccgcgacggctgggatgagtccacagctgcttacggttattggtttaagggacgcacatcacccaagaccggcgcgcccgtggctaccaacaatcagtcgcgagaggttgagatgagtacacgggaccgctttcagctgaccggcgacccgggtaagggatcctgctcactcgtgatacgcgatgcacagagagaggatgaggcatggtactttttcagggttgagcgtggttcacgtgtccggcacagctttctgagtaacgccttctttctcaaggtgactgccttaacaaaaaaacccgatgtttacattccagagactctggagcctggacagcctgtcaccgtgatctgtgtttttaactgggcgttcaaaaaatgtccggccccgtccttttcctggactggcgccgccctcagcccaagacgtacccggccatccacttcccatttcagcgttttgtccttcacgccgtcccctcaggatcatgacaccgacctgacctgccatgtggattttagccggaaaggagtatccgctcagcggaccgtgcgtctgcgggtagcttatgcccctaaagaccttattatctctatttcacatgacaatacctctgcactcgaactgcagggcaatgtgatttacctagaagttcagaagggccaattcctgcgcctcctatgcgctgcagacagccagccacctgctaccctatcttgggtcttgcaggatcgggtcctttcctcttctcatccatggggccctaggacccttggcctggaactgaggggcgtgagggcaggtgattctggacgctacacatgtcgagccgagaatagactgggctcacagcaacaggcactggacctgagtgtacaataccctccagagaaccttcgtgtcatggttagccaggccaacagaactgtgctggaaaaccttggcaacggaacatccctccccgtgctggaaggacagtcactcaggcttgtgtgcgttactcactcctcccctcccgctcgactgtcttggacaaggtgggggcagaccgtcggaccatcccagccaagcgacccgggcgtcctggagctgccgccaatccagatggaacatgaaggggaattcacatgccacgcacagcatccattgggaagccaacacgtgtcactcagcctgtcagtgcattaccctcctcagctgttgggcccgtcctgttcttgggaggccgaaggactgcactgtagttgttcttcacaggcgtctcccgcgcccagtctgcggtggtggctcggagaagagctgctcgaaggtaatagctcccagggcagcttcgaggttacgccctcctctgctgggccgtgggcaaattcaagcctctctctccacggtggcctctcctccggtttgagacttaggtgtaaggcatggaacgtgcatggcgcccaatccgggtctgtgtttcaacttcttcctgggaaactcgagcatggcggcggcctaggcctcggtgctgctctgggcgctggcgtcgccgcactcctcgctttctgctcctgtctggtggtattcagagtcaagatttgtaggaaagaagcccggaaaagagctgccgccgagcaggatgtgccctcaaccttggggcctattagccaaggacatcagcacgagtgttctgcaggtagcagtcaggatcaccctcctccaggggcagcaacatataccccaggaaagggcgaagagcaggaactccactacgcttccctctcctttcagggattacgcctttgggagcctgcagatcaggaggcaccttccaccaccgaatactcggaaataaaaattcacactggtcagcccctccggggcccaggcttcggactgcagttagaacgagagatgagcggcatggtgcctaaatag

SEQ ID NO: 134295 - DNA, 1809 bp, synthetic construct
  misc_feature 1..1809: note = Description of Artificial Sequence: Synthetic coding sequence
  source 1..1809: mol_type = other DNA
atggtgcctggtcaagcccaacctcaatctccagaaatgctcttgttgcccctccttctgcccgtactcggcgctggaagcctgaacaaagatccctcttatagtctgcaggtccagaggcaagtccccgtacccgagggattatgtgttatagttagttgcaaccttagttaccctcgagacggctgggatgagtccaccgccgcttatggctactggtttaaggggcgaacaagccccaagacgggggctcccgtggccacaaataaccagtccagagaggttgagatgtcaacccgtgaccggttccaacttacaggagaccccggtaagggatcctgcagccttgtcattcgagatgcacagagggaggacgaggcatggtatttcttcagagttgagaggggcagtcgggtgcggcactctttcctgtcgaacgcgttctttctgaaagtaacagcactcaccaagaagcccgacgtatatataccggagactctcgagcccggacagcctgtcaccgtcatttgcgtgttcaattgggccttcaagaagtgtccagcaccaagcttttcctggacaggcgcagcgctgtcacctcgccgaactaggccctcaacgtcccacttctcggttctaagttttacaccttccccccaggaccacgacactgacctgacatgccacgtagacttcagtcgcaaaggcgtgtctgctcaacgtaccgttcggcttcgtgtggcttatgcccccaaggatctcatcatctcgatctctcatgacaacacgtcagccctggaactgcagggcaatgtaatatacctcgaggtgcagaaggggcaatttctgcgcctactatgtgctgctgactctcaaccccccgccaccctgtcgtgggtgcttcaggatcgcgtcctgtcctcatcacacccatggggacctaggacgttggggttggagttgcggggcgtgcgggcaggagactccggcagatatacttgtagagctgaaaacagactaggctcccagcagcaggccctggatctttctgtccagtacccccctgaaaacctgcgtgtgatggtgtcacaggctaaccggacagtgttggagaaccttggaaatggcactagccttcctgtgttggaagggcagtcgctaaggttggtatgcgtgactcattcctcccctcctgcacggttgagctggaccagatggggtcagactgtggggccttcacaaccgtctgatccaggcgtgcttgaactgccaccaatccaaatggaacacgagggcgagttcacatgtcatgctcagcatccgctgggaagccaacacgtatctctgagcctgtccgtgcactggaaattagagcacggtggcggcttgggcttgggggctgccttaggggcgggagtggcagccctcctggctttttgtagttgccttgttgtgttcagggttaaaatctgccgaaaagaagcccgaaaacgtgctgccgccgagcaggacgtgccgtcaacactgggccccatatcacagggccatcagcacgagtgctccgccggatcctcccaagatcatccccccccaggagctgccacttacacgcctggaaagggagaagaacaagagctccactacgcaagtctcagttttcagggactcagactttgggagcctgcggatcaggaagctccctccaccactgaatattccgaaattaagatccacactgggcagcccctccgtggaccaggttttgggctccagctggagcgtgagatgtccggaatggtgcctaagtag

SEQ ID NO: 134296 - DNA, 1809 bp, synthetic construct
  misc_feature 1..1809: note = Description of Artificial Sequence: Synthetic coding sequence
  source 1..1809: mol_type = other DNA
atggtacccggacaggcacaaccccagtcgcccgagatgcttctccttccactgctgttgccggtcctgggggccggctccttaaacaaagatcctagctactctctgcaggttcagagacaggtgcccgtgcctgagggactgtgcgtcatcgtgtcttgtaatcttagctatcccagagatggctgggatgagtcgactgccgcttatggctattggttcaaagggcggacctctcccaaaaccggcgctcctgtcgccacaaataaccagtctagagaagtcgagatgagcacccgcgatcggttccagctgaccggcgaccctggaaaaggtagctgtagcttggtgatcagggatgcgcagagagaagacgaagcatggtacttctttagggttgagaggggtagccgagtaagacatagcttcttatccaacgccttctttctaaaagtcaccgcactgactaagaaacccgacgtgtatattcccgagacactggagcccggccaacccgtaaccgttatctgtgtgtttaactgggcctttaagaagtgccccgcaccaagcttttcctggaccggggcagcccttagccctcgaaggacacggccctccacctcccatttctcagtcttgagtttcaccccctctcctcaggaccatgacactgacctaacatgccacgtcgacttttcccgcaagggcgtgtccgcccaaagaacagtgcggctccgggttgcctatgcacctaaggatttaattattagcatctcccatgacaatacaagtgccctggagctccagggaaacgtgatttatctcgaggtgcagaaaggacagttcttaagacttctgtgcgctgcagatagccagccacctgccactctctcatgggtcctgcaagaccgtgttctcagctcttctcatccctgggggccaaggacactgggactggagttaaggggagtcagggccggcgactccggcaggtatacatgccgagctgagaacaggctcggttcacagcagcaagcactggatctttcagtccagtacccccccgaaaatctgcgcgtaatggtgtctcaggccaataggaccgtcctggagaaccttggcaatggaacctccttgcctgttcttgaagggcaatccctccgcttggtctgcgttacccacagcagtccgcccgcccgattatcatggacccggtggggccagacagtaggaccctcccagccgtctgatccaggagtgctggaacttccccctatccagatggagcacgagggggagttcacctgtcacgcgcaacacccactgggatctcaacatgtcagcctgtcactctcagtacactggaagctggagcatggagggggcctagggctgggggcagctctcggggcaggcgtcgctgcactcctcgcattctgttcctgtttggtcgtctttcgcgtgaagatttgccggaaggaggccagaaagagagccgccgcagaacaggatgtgccttctactctaggccctatcagccagggtcatcagcacgaatgttccgccgggtcatcccaggaccatcctcctccgggggcagcaacctacaccccgggtaaaggcgaggaacaggaacttcattacgctagtttgtcctttcagggactgcggctctgggagcccgctgaccaagaggctccctcaactacagagtactccgaaattaaaatccatactggccagcccttgcgcggtcctggattcggactgcagctagaacgtgagatgtccggtatggtgccaaagtag

SEQ ID NO: 134297 - DNA, 1788 bp, synthetic construct
  misc_feature 1..1788: note = Description of Artificial Sequence: Synthetic coding sequence
  source 1..1788: mol_type = other DNA
atgcttttgttacttctcctgcttcctcccttattatgcggacgagtgggtgcgaaagagcagaaagattatttgttaacaatgcagaagagcgtgacagtgcaagagggattgtgtgtctcggttctgtgttcgttcagctacccccagaacgggtggaccgcctccgatccagtacatggctattggtttagggcaggagaccacgtgtcccgtaatatccccgtcgctacaaataatccagcccgcgcggtgcaggaggaaaccagagaccgctttcatctgctgggtgacccccagaacaaggactgtaccctgagtatcagagacacccgggagtctgatgccggaacttatgttttttgcgtagagcggggcaatatgaagtggaactacaagtatgatcagctcagtgtgaacgtcacagcaagccaggacctgctcagtcggtacagactggaagtcccagagagcgtgaccgtgcaggaaggcctttgtgtttccgtgccttgttctgtgttgtatccccactataactggacggccagttcacccgtatatggtagttggtttaaggagggcgcggatattccttgggacatacctgtcgctactaatacgccctctggaaaggttcaggaggatacacacgggcggttcctgctgctcggtgaccctcagactaataactgcagcctatctattcgcgacgcaaggaagggggactccggcaaatactacttccaggtggagcgcgggtctcgcaaatggaactacatttacgacaagcttagtgtccacgtgacagctcttacgcacatgcctacattttctatcccaggcacattggaaagcggccacccccggaatcttacatgcagcgtcccctgggcctgcgagcagggtacccctcctaccatcacatggatgggggcatcagtcagtagtctagacccaactattactaggtccagtatgttgagcttgatcccccagcctcaagatcatggcacaagcctcacctgccaggtgacactgcctggcgccggggtcactatgacccgggcagtgagactcaacataagctacccaccgcagaacctgacaatgaccgtgttccaaggcgatggcactgccagtaccacgttgcggaatggaagcgccttgagtgtactggagggacagagcctgcatcttgtgtgtgcagtcgactctaatcctcccgctcggctgtcatggacttgggggtctttgacactctcacccagccagtccagtaacttaggagttctggagctgcctcgggtacacgtgaaggacgaaggcgaatttacatgtcgcgcccagaatcccctcggaagccagcacatttccctgagcctctccctccagaacgaatatactgggaagatgaggccaatctcgggggtgacgctaggcgccttcggcggcgcaggcgcgactgcattggtattcctgtacttctgtatcattttcgtggtggtccgcagttgccggaagaaatccgcccggcctgccgtcggtgtcggcgacaccggaatggaagacgctaacgccgttcgtgggagcgcgtcccaaggtcccttgattgagtccccggcagacgattctccaccccaccatgctcccccagcactagccaccccatcacccgaagaaggtgagatacagtatgccagcttgtctttccacaaggcaagaccccagtacccccaggagcaggaggctataggctacgagtatagcgagataaatatcccaaaatag

SEQ ID NO: 134298 - DNA, 1290 bp, synthetic construct
  misc_feature 1..1290: note = Description of Artificial Sequence: Synthetic coding sequence
  source 1..1290: mol_type = other DNA
atgcctctgtgcagacctgagcacctgatgccacgagctagccgcgtaccagtcgcagcatctttgcccttgagccatgcagtgattcctactcaactgccgagcaggccaggccaccgcccccccggaaggcctcggcgatgcccgaaggccagctgcctgccacctcctgtggggccatcatcgacccaaacagcgaagcgggttactatgggatggccgcgccccgggcgcgccctggtcgccgtgaaggcactgcttgttttgagcctgttgcaggtacctgcccaggccgtcgtgagggccgtcctcgaggacaattcgtcaagcgtagacttcgctgaccttcccgcactattcggagtgcctctggcaccggagggcattcgaggttatctgatggaagttaaaccagctaatgcctgccatccaatagaggccccccgcctaggaaatcgctccctgggcgcaattgtgctgattagacgttatgattgtacatttgatctgaaagtgctgaacgcccaacgcgcaggtttcgaagccgccatcgtgcacaatgtgcatagtgacgatctggtgtccatgacacacgtgtacgaagaccttcgcggtcagatcgcaatcccttcggtgttcgtttcggaagctgcgtcgcaggatctgagagtcatcttaggctgcaataagtctgcccatgcgttgctgttgccagacgacccaccatgccacgatttaggatgtcaccctgttttgaccgtatcatgggtactcggttgcactctagcgctcgtggtaagcgctttctttgtattgaaccacctatggctctgggcgcaggcttgttgttctcacaggaggcccgtcaagactagcacgtgccaaaaggcccaagttcgcaccttcacatggcataacgatttatgcgcgatttgtttagacgaatacgaggagggcgaccagctgaagatcctgccctgttcacatacttaccattgtaaatgcatcgacccatggttctctcaagcgcctcggcgcagctgccccgtatgtaaacagtctgtagccgccacagaagacagttttgatagcacgacgtactcattcagggacgaggatccgagcctgccggggcataggccgccaatctgggccattcaggtacagctcaggtctcgacggctcgaactcctgggccgggccagccctcactgtcactgctccaccacttccctggaggccgaatacactacagtgagtagcgcaccaccagaagcccctgggcagtag

SEQ ID NO: 134299 - DNA, 1656 bp, synthetic construct
  misc_feature 1..1656: note = Description of Artificial Sequence: Synthetic coding sequence
  source 1..1656: mol_type = other DNA
atgctgcccttgctgctcctcccactgctgtgggggggcagcctgcaagagaagccagtctatgaacttcaggtgcagaagagtgtgaccgtccaggaaggcctttgtgtcctagtcccttgcagttttagctatccatggagaagctggtattctagcccccccctatatgtgtactggtttcgagacggagaaatcccctattatgctgaagtagtggccactaacaatccagatcgcagggttaagcctgaaactcagggacgctttaggctgctgggtgacgttcagaagaaaaattgctctctgtcaattggcgatgctcgaatggaagacaccggctcctatttttttagggtggagagggggcgggacgtgaagtattcataccagcagaataaattaaacctggaagttaccgccctgatcgagaaaccagatatccattttctcgagccactggaaagtggccggccaacccggttatcatgctcactccccgggtcctgcgaggcgggcccaccgctgacattctcctggaccggtaacgccctctcccctctggatcccgaaaccacccgcagctctgagctgaccctgacgccgcgacctgaagaccacgggacaaaccttacgtgccaaatgaaacggcagggcgctcaagtgaccaccgagcgcactgtgcagctgaatgtgtcatacgcgcctcagaccattaccatcttcagaaatggcatcgcactggaaattctacagaacacgtcctatcttcccgtcttagaggggcaagctctcaggttattatgtgatgcgcctagcaacccacctgcgcatctttcctggtttcaaggttcccctgccctcaacgctacaccaattagcaatactggaatactggaactccgacgcgtgcggagcgccgaggagggagggtttacgtgccgagcgcaacatccattaggctttctgcagatcttcttgaacctaagtgtgtacagcctgccgcagctgttgggcccttcctgcagctgggaggcagaaggactgcactgtagatgtagctttcgggcccgtccagccccatctctttgttggaggctggaggaaaagcccttggaaggcaactcttcacagggttctttcaaggtgaacagttcttccgcggggccctgggccaatagcagcctgatactgcatggcggccttagttctgacctgaaggtttcctgcaaagcttggaacatttatggctctcagtccgggtcggtactgcttttgcagggcagatcaaaccttggaactggggtggttcccgccgctctggggggggcaggggtgatggcgctgttgtgcatttgtctgtgccttattttttttctgatcgttaaagcccgacgcaagcaggccgccggacggcccgaaaaaatggatgatgaggatccaattatgggcaccattacctccggcagcaggaaaaaaccttggccggactcccctggcgatcaggcctctcctccgggggatgcccccccactggaagagcagaaggagcttcactacgcatctctttctttctctgaaatgaagagccgggagcccaaagatcaagaggctccctctaccactgagtacagtgagataaagacctcaaaatag

SEQ ID NO: 134300 - DNA, 1062 bp, synthetic construct
  misc_feature 1..1062: note = Description of Artificial Sequence: Synthetic coding sequence
  source 1..1062: mol_type = other DNA
atgcagggcgcccaggaggctagcgccagcgagatgcttcccctgttgcttccgttactctgggccggcgctctggcccaggaacgacgctttcagctggagggaccggagtcactcacagtccaggaagggttgtgtgtgctggtcccctgtcgcctccccaccacactccccgcctcctattatggctatggttactggtttctagagggagcggatgttccggtcgctacaaacgaccccgacgaagaagtgcaggaggagactagggggcgcttccatctcctatgggatccacgccgtaaaaactgctccctatctatcagagacgcacgtagacgcgataacgcggcctacttctttcgccttaaatctaagtggatgaagtatgggtataccagcagtaaactctcagtgcgtgtgatggccctgacacatcggccaaacatctctatccctggaactttagagagtggccatccttccaatcttacctgctcagtcccatgggtctgcgagcagggaactcctccaatcttcagctggatgtccgccgcgcccacttccctcgggcctcgcacaacccaatcttccgtgctgaccattacaccacggccccaagatcactccacaaacctcacatgtcaggtgactttccctggcgcgggagttaccatggaacggaccatccaactcaatgtcagttacgcccctcagaaggtggctatctctatcttccagggtaattctgccgctttcaaaatcctgcagaatacaagctccctgcccgtgctcgaggggcaggccttaaggcttctgtgtgatgccgatgggaaccctcccgctcatttgtcttggttccaaggcttcccagccttgaacgctacacccattagtaataccggagtcctggaactgccacaagtcggtagtgctgaggagggcgatttcacctgtcgggcccagcacccgttggggtccttacagataagtctgagcctgttcgtgcattggtccagcgccccagtccctgacaggcattctttcaggccaccatgctag

SEQ ID NO: 134301 - DNA, 1281 bp, synthetic construct
  misc_feature 1..1281: note = Description of Artificial Sequence: Synthetic coding sequence
  source 1..1281: mol_type = other DNA
atgctacccctcctgctaccattactgtgggctggggccctcgcccaggaacgtcggtttcagctggagggacctgagagcctcactgtgcaagagggactgtgcgtgttggtgccatgtaggctgcccactacactccccgccagctactacggatatgggtactggtttctcgagggggccgatgtgcccgtggcaactaacgatccagatgaagaggtccaggaggagacccgcggtcgttttcatttactctgggaccccagacgcaaaaattgttctttaagtatccgagatgcccgcaggcgagacaatgcagcttacttcttccgcctgaaaagcaaatggatgaaatatggatacacctctagcaaactgtccgttagggtgatggcactgactcataggcccaatattagtatcccaggaacgttggagtccgggcatccctcaaatttgacctgctccgtaccctgggtgtgcgaacagggcactcctccaatcttcagttggatgagcgcagctcccacaagtctgggccctcgcactacccaaagttcagtgcttactattacgcctcggcctcaggatcactccacgaatctgacttgccaggtcacctttcccggagcaggtgtcacaatggaaagaactatccaacttaacgtatcgagcttcaaaattttgcagaatacttccagcttaccggttctggagggacaagcccttcgtctgttgtgcgatgcggacggtaatccacccgcacatctgtcgtggtttcaagggtttcctgctttaaacgctacacccatctctaacaccggcgttcttgagttgccacaggtggggagcgctgaggaaggtgacttcacatgcagagcgcaacaccctctgggatctctccagattagcctgtccctctttgtacattggaaaccggagggcagggccgggggggtccttggcgccgtgtggggcgccagcattaccactttggtgttcctgtgcgtgtgtttcatatttcgcgtgaaaaccaggcgcaagaaggccgctcagcccgtccagaatacagatgacgttaacccagtgatggtaagcggcagcagaggtcatcagcatcagtttcagaccgggattgtaagcgaccaccccgcagaggccggcccaatctcagaggatgagcaggagctccactacgcagtgctgcattttcacaaggtgcagccacaggaaccgaaagttactgacacagagtactccgaaatcaaaattcacaagtag

SEQ ID NO: 134302 - DNA, 1314 bp, synthetic construct
  misc_feature 1..1314: note = Description of Artificial Sequence: Synthetic coding sequence
  source 1..1314: mol_type = other DNA
atgcagggagcacaggaggccagtgctagtgagatgctgcctttgctgctgccattgctctgggctggtgcgctcgcccaagaaaggcgattccaactggaagggccagagagcttaactgtgcaggagggtttatgcgttcttgtgccctgtagattaccaaccacccttcccgcgtcatattatgggtacgggtactggttcttggagggcgccgacgtgcctgtagctaccaatgatccagatgaagaggtccaggaagagacaaggggccggtttcacttactttgggaccccaggagaaaaaactgtagcctctcaatcagagatgctcgaagacgtgacaacgctgcatacttttttcgcttgaagagcaaatggatgaagtatgggtacacttctagtaaactatctgtcagagtgatggccttaacccacaggcctaacattagcatcccggggactctagaatccggacacccctccaacctcacctgctctgtgccatgggtttgcgaacaaggaacaccccctattttttcatggatgtccgccgcccctactagcctggggcctcgcaccactcagagcagcgtgttgacaatcacacctaggcctcaagaccacagcactaatttgacttgtcaggtaacgtttcccggagctggggttaccatggaacgcaccattcagctgaacgtgagctcctttaagattctccagaataccagctccctaccagtgctggagggccaggcattgcggctgctatgtgacgccgatggcaacccccctgcccacctctcttggttccagggattccctgctctgaatgctacacccatctccaataccggagtactggagttgccccaggttggctctgccgaggaaggagactttacctgccgggcacagcatcccctgggcagcttgcaaatcagtctcagcctcttcgttcattggaaacctgagggtcgggccgggggggtactgggggccgtgtggggagccagcataaccaccttagtgttcctctgcgtctgttttatctttcgtgtcaagaccagacgcaaaaaggccgctcagccagtgcagaacactgatgacgtgaaccctgtgatggtatccggctccagaggtcaccagcatcagtttcaaactggcattgtgagcgaccaccctgcggaggccggacctataagcgaggatgaacaggaacttcattacgccgttctgcatttccacaaggttcagccacaagagcctaaggtgactgacaccgagtactctgagattaagatccataaatag

SEQ ID NO: 134303 - DNA, 1362 bp, synthetic construct
  misc_feature 1..1362: note = Description of Artificial Sequence: Synthetic coding sequence
  source 1..1362: mol_type = other DNA
atgcagggcgctcaagaagcgtccgccagcgaaatgctcccactcttgcttcctctcctgtgggccggcgcccttgcacaggagcgcagatttcagctggaaggaccagagagcttgactgtgcaagagggcctctgcgtactggtcccttgtcgcctaccaacaacgcttccagcctcgtactatggatatggttactggtttctggagggagctgacgtcccagtggcgaccaacgatccagatgaggaggtgcaggaggaaacacgaggccggttccatctcctgtgggatccaaggcgcaagaattgctcccttagtatccgtgatgctcgacgccgggataacgcagcatacttttttcgcctcaagtctaaatggatgaagtacggatacaccagctctaaactgtcagtcagagtgatggcactcactcatcgtcccaacatttccatccccggaactctagagtcgggacatccatcaaatttgacatgcagtgttccatgggtgtgcgagcagggtacaccacccatcttcagctggatgtctgccgcccccacctctttggggcctcgcaccacccagtccagcgtccttacaattaccccccggccgcaggatcactctactaatctgacctgtcaggtgacttttcccggggcaggggtgaccatggagaggacaattcagctgaatgtctcttacgcaccccagaaagtggccatcagtatattccaaggcaacagcgcagcctttaagatcctacaaaacaccagctccctacccgtactggaggggcaggcattgcgcctattgtgcgacgctgacgggaatcctccagcacatctttcgtggttccagggattccctgcactgaatgctaccccgatcagcaatacgggcgtgctcgaactcccccaggtggggagcgctgaggagggcgacttcacttgccgtgcccaacaccccctggggagcctacaaatttccctgagtctcttcgtgcactggaagcctgaagggcgcgcagggggcgtactgggcgccgtatggggagcctccatcaccaccctagtcttcctctgcgtctgttttatattcagagtgaagacaaggcgaaagaaggccgcccagcctgtgcagaacaccgatgatgtaaaccctgtcatggtctctggtagtagaggacaccagcatcagttccaaaccggtatcgtgtcagatcatcctgccgaagcaggcccaatcagcgaggatgagcaggagctgcattatgccgttctgcacttccacaaagttcagccccaggagcccaaggtgaccgatacagagtattccgaaatcaaaattcacaaatag

SEQ ID NO: 134304 - DNA, 1170 bp, synthetic construct
  misc_feature 1..1170: note = Description of Artificial Sequence: Synthetic coding sequence
  source 1..1170: mol_type = other DNA
atgcagggggcccaggaggcctctgcttctgaaatgctccccctcctgctgccactgctgtgggcaggcgcgcttgcacaggagcgtcgtttccagcttgaggggcccgagtccctgactgtgcaagaaggtctctgtgtcttggttccgtgcaggctcccaaccacactgcccgctagctactacggctacggatactggttcctcgagggcgctgacgtgccagtggctacaaatgatccagatgaggaagttcaggaggaaaccagggggagatttcatctgctgtgggacccccggcgcaagaattgtagcttatcaattcgagacgccaggcggcgtgataatgcagcctacttctttcgattgaagtccaagtggatgaaatacggctacacatcttctaagctctccgtccgcgtgatggctctgacccaccggcctaacattagtatcccaggaaccctcgaaagcggacacccatctaaccttacgtgtagtgtcccctgggtctgcgagcagggtacgcccccgatctttagctggatgtccgctgctccaacatcattaggtccgaggactacccagtcctccgttttaacgataacacctagaccccaagatcattcgacaaatctcacctgccaggtcacctttcctggcgccggtgtcaccatggagcggacgatacaactcaatgtgtcatggatgctccgtcgacccccactgagcacccccgacgccccacagaaggtggccatttctattttccaggggaattcagctgcttttaagatcttgcagaacacaagctccctgccagtgctagagggccaggctctgcggctgctgtgcgatgcagacggtaaccctcccgcgcacctgtcctggttccaaggtttccctgcccttaacgcaacacccatcagtaacacaggggtcctggagctcccccaagtagggagcgccgaagaaggggactttacatgtagggcccagcatcccctcggcagccttcagatctccctctcactgttcgtacactggaagccagagggaagggccggcggggtcctgggcgcagtctggggtgccagcatcactactctggtgttcctgtgtgtctgtttcatttttcgcgtcataagcacctctagcagacaggcttag

SEQ ID NO: 134305 - DNA, 1206 bp, synthetic construct
  misc_feature 1..1206: note = Description of Artificial Sequence: Synthetic coding sequence
  source 1..1206: mol_type = other DNA
atgcaaggtgcccaagaggcttcagccagtgagatgctgcctctcctgctgcctttgctgtgggctgcaagctactatggatacggctattggttcctcgaaggagccgatgtcccggtggccaccaacgaccctgacgaggaggttcaggaggagactcgcgggcggttccatctactttgggacccccgaaggaaaaattgtagcttgtccataagggacgctaggaggcgagacaatgccgcctactttttcaggttaaagtcaaaatggatgaagtatgggtatacaagttccaaattgtctgtaagagtgatggctctgacacaccggccaaatatatccattcccggaacattggaatccggccacccttccaacctgacttgctccgttccctgggtctgcgaacagggcacccctcctattttcagctggatgagcgccgcgccgacttccttggggcctcgaacaacccagagctccgttctgacaattacaccaaggccccaggaccactccacaaacttgacttgtcaggttacctttcccggtgcaggagtgactatggagaggacaatccagcttaatgttagcagtttcaaaatactccagaatacttccagtctgccggtgctcgagggccaggctcttcggctgctgtgcgatgctgacggcaatccacccgcccacttgtcctggtttcaggggttcccagcactcaatgctacccccatcagcaatacaggagtcttagagctccctcaggttggcagcgctgaggagggagattttacatgcagggcacagcaccccttgggctcactccagatctcactctctttgttcgtgcactggaagccagaggggagagccggtggtgtgctgggggccgtctggggagcatccataacaacactcgtgtttctgtgtgtgtgttttattttccgggtcaagactcggagaaaaaaagctgcccaacccgtgcaaaatacagacgacgttaatccggtgatggtgtccggatctcggggccatcagcaccagttccaaactgggatcgtgagtgatcaccctgctgaggcgggacctatctccgaggatgagcaagagttacactacgctgtgctgcactttcacaaggtgcagcctcaagagcctaaagtgaccgacacagagtactccgagataaagatacacaagtag

SEQ ID NO: 134306 - DNA, 1125 bp, synthetic construct
  misc_feature 1..1125: note = Description of Artificial Sequence: Synthetic coding sequence
  source 1..1125: mol_type = other DNA
atgctgcttctcctgctcttgccactcctctggggacgagagcgtgtggaaggccagaagtccaatcgaaaggattattcgctgactatgcagtcatccgtgacagttcaagaaggcatgtgcgttcacgtgaggtgtagtttctcctaccctgtagattcccagacagattcagacccagtgcatggctattggttccgagccgggaacgacatctcctggaaggcccctgtggcaacaaataatccagcatgggcagtgcaagaagagacccgcgacaggtttcacctgctgggtgatccacagactaaaaattgcaccctgtctattagagacgcccgcatgtccgatgccggtaggtatttctttaggatggagaaggggaacattaagtggaactataagtatgatcaactgagtgtgaatgttaccgaccctcctcagaacttgactgtaaccgtgttccagggggaaggaactgcgtccaccgccctcggcaactcttccagcctatctgttctagagggccagtctttaagattagtttgtgccgtcgattccaatccgccagcacgactgtcttggacctggagaagtctcactctataccccagtcagccctctaaccccctggtattggagctccaagtgcatctgggcgacgagggggaattcacctgtcgggcgcagaactccctgggttcacagcatgtatcccttaacctctcgctacagcaggagtacaccggaaaaatgcgccccgtgagtggagttctgttgggggcagtcgggggcgctggagcaacagccttggtattcctgtctttttgcgtgattttcatcgtggtgagaagctgtcggaagaagtccgcacgacccgccgcagacgtgggcgacattggtatgaaggacgccaatacaataagaggaagcgcctcccagggcaacctaaccgagagctgggctgatgacaacccgcgccaccacgggctggccgcacactccagtggggaggagagagagatccagtacgctccactgtccttccacaagggggaaccacaagacctgagcgggcaggaggcaaccaacaacgagtactccgagatcaaaatccccaagtag

SEQ ID NO: 134307 - DNA, 1404 bp, synthetic construct
  misc_feature 1..1404: note = Description of Artificial Sequence: Synthetic coding sequence
  source 1..1404: mol_type = other DNA
atgctactccttctgctgttacccctgctgtggggaagggaacgggtagaggggcagaagtctaatagaaaggattacagccttaccatgcagagcagcgtcaccgttcaggagggaatgtgcgtacacgttaggtgttctttctcctaccccgtcgatagccagaccgattcagatccagtgcacggctactggttcagggccggtaacgacattagttggaaggctcctgtggctacaaataatcccgcatgggcagtgcaggaggaaacacgggatagattccacttattgggggaccctcaaacgaagaactgtaccctgagcatccgcgatgctcgaatgtctgatgcagggagatacttttttcgtatggagaaaggaaacatcaagtggaattacaagtacgatcaactgtctgtcaacgtgaccgcgttgacacatagacctaatatcctgatccctgggacactcgaatccggctgttttcaaaacctgacatgttccgtgccttgggcctgtgagcagggcactcccccaatgatctcctggatggggaccagtgtgtctcctcttcacccgtctaccacacgttccagtgtgctaactctaattccccagccccagcaccatgggacatcccttacgtgtcaagtgactctcccaggggccggtgtcaccacgaatcggacaattcagttaaacgtctcttacccaccacagaatttgaccgtgacagtctttcaaggggaagggactgcctcaacggctctaggcaactccagctctctcagcgtgctggagggtcagagcctacggctcgtatgtgctgtggacagtaatcctcccgcccggctatcctggacatggagaagtcttaccctgtatccgagtcagcccagtaacccccttgtccttgaacttcaggtccacctcggtgacgagggagaattcacttgcagagctcaaaactcactggggtctcagcacgttagcttgaatttaagcctgcaacaggagtataccgggaagatgaggcccgtcagcggagtgctacttggcgccgtcggcggagctggagcgaccgcactcgtctttctcagcttttgcgtgattttcatcgtcgtgaggagctgcagaaaaaaaagcgcaagacctgccgccgacgtaggcgatatcgggatgaaagatgcaaacactattagaggttcggcaagccagggcaacctgaccgagagctgggcggacgacaatccccggcaccacgggctagccgcacattcaagtggtgaggaacgagaaattcaatacgcacccctctcctttcacaaaggtgaaccccaagatctgtccggccaagaagctacgaataatgagtacagcgagattaagatcccaaaatag

SEQ ID NO: 134308 - DNA, 438 bp, synthetic construct
  misc_feature 1..438: note = Description of Artificial Sequence: Synthetic coding sequence
  source 1..438: mol_type = other DNA
atgttacttcttctactgctgcccttactttggggcagggagagagttgagggccagaagagtaaccgaaaagattattcactgaccatgcagagttccgtcacagttcaggaaggaatgtgcgtgcatgtgaggtgttcatttagttaccccgtggattcccagaccgatagcgaccccgtgcacggttactggttcagagctggaaacgacatctcttggaaagctcctgtggcaaccaataaccctgcctgggccgttcaggaggaaactcgagaccgcttccatcttttgggcgacccacaaaccaagaattgcacgcttagtatcagagacgctagaatgagcgacgccggaagatatttttttagaatggagaagggcaatataaagtggaactataagtacgaccagttgtccgtgaacgtgaccgaatag

SEQ ID NO: 134309 - DNA, 1500 bp, synthetic construct
  misc_feature 1..1500: note = Description of Artificial Sequence: Synthetic coding sequence
  source 1..1500: mol_type = other DNA
atgctcctcctcctcttgctattgcccctgttatggggcactaaaggtatggagggtgatcgacaatatggcgatggctacctgctgcaagtgcaagaattagtgacagtgcaggagggcctgtgcgttcatgtcccgtgctcctttagttacccacaggacggttggaccgattccgatcccgttcatggctattggttccgagccggtgaccggccttatcaggacgctccagttgcaacaaataaccctgatagagaggtgcaggccgagacgcagggaagatttcagctcctgggtgacatctggagcaacgactgttcattgagcatccgtgacgcacggaagcgtgataaagggagctacttctttcggttggaaagaggttccatgaagtggagctataaatcccagctgaattacaaaacaaagcagctcagcgtcttcgtgaccgcactcactcaccggcccgacatcctgatattagggactttggagtcaggacacagtagaaatctcacatgcagcgtaccatgggcgtgtaaacaaggtacgcctccaatgatatcttggattggtgcttctgtgagctctcccggccccactactgccagaagttcagtgcttactttgaccccaaaaccacaggaccatggaaccagcctcacctgtcaggtgacattgcccgggacaggagtgactactacaagtacggttagacttgacgtgtcttatcctccctggaacctgaccatgaccgtgtttcagggcgatgctacagccagcacggcccttggtaatggaagttcgctgtctgtcctggagggacagagtctcagacttgtttgcgccgtgaatagtaacccaccagcgcgcttgtcttggacacgaggcagcctgacattgtgtccttccaggagcagtaatcccggtctcctggagctgccaagggttcatgtgagagacgaaggagagttcacctgccgggcccagaatgcccagggctcccagcacatatctcttagtctcagtttgcagaacgagggaacagggacaagcagacctgtgtctcaagtgacactggccgctgtgggcggggctggagccaccgcattggcctttctgtctttttgtattatcttcattattgtacggtcctgtaggaaaaaatctgctcggcctgccgctggtgttggagatacaggaatggaagacgccaaggcaatcagaggctctgccagtcaaggtcctctgactgaatcgtggaaagatgggaatccactgaagaagccacccccagctgtcgcccccagctcaggagaagaaggagagctgcattatgcgacgctgtccttccataaagtcaagccacaagatcctcagggccaggaggctaccgacagcgagtactcagagattaagattcacaagcgtgagacggccgagacacaagcgtgtctccggaaccacaaccctagttctaaggaagtgcgcggatag

SEQ ID NO: 134310 - DNA, 1221 bp, synthetic construct
  misc_feature 1..1221: note = Description of Artificial Sequence: Synthetic coding sequence
  source 1..1221: mol_type = other DNA
atgttactgctcctgctcctgctccccctgctttggggcacaaaaggaatggagggagaccgccagtacggagacgggtatctgctccaagtacaggagttggtgaccgtgcaggaaggcctgtgcgtccatgtcccttgcagtttttcctacccacaggatggatggactgacagtgatccggtccatggctattggtttcgcgctggcgaccgaccttaccaggatgcccccgtcgccaccaataacccagaccgagaagtgcaggccgagacccagggccggtttcagctgctgggcgatatctggtctaatgattgctcgctgagtatcagggatgcaaggaagcgggacaagggctcttactttttcagattagaacgcggctcaatgaagtggtcttataagagccagctaaattacaaaacaaaacagttatccgttttcgtcactgatcctccttggaacctgaccatgaccgtctttcagggggatgccacggcttccaccgctctgggtaatggctccagcctgtccgtactcgaggggcagtccctcaggctggtgtgcgctgtgaatagcaatccccctgcccgactctcctggaccagaggcagtctgacgctgtgtccttcccgatcgtcaaatcctggcttgctggagttaccacgggtccacgtaagagacgagggcgagtttacctgcagagcccagaatgcacaaggaagccagcatatttccctgtccctttcacttcagaacgagggaactggcaccagccgccccgtctctcaggtgactcttgcggcggtcggcggggctggagccacagccctcgcattcctgagcttctgcataatcttcatcattgtgcgctcctgccgaaaaaaatctgctcgccccgccgctggggtcggggacacaggaatggaggatgctaaagcaattagaggtagcgcttctcaaggccccctgaccgagagctggaaggatggaaatccgcttaagaagcctccaccagcggtggctccaagcagcggggaagaaggggagttgcactacgcaaccttaagcttccataaggtgaagcctcaggacccccaggggcaggaggcgactgactcagaatacagcgagatcaagattcacaagcgcgaaacagctgaaacacaggcctgcctgagaaaccacaacccttcttcaaaagaggtgcgtggatag

SEQ ID NO: 134311 - DNA, 1173 bp, synthetic construct
  misc_feature 1..1173: note = Description of Artificial Sequence: Synthetic coding sequence
  source 1..1173: mol_type = other DNA
atgctgctgttgctgctgttactgccattgttgtggggtactaaaggcatggagggagacaggcagtacggagacgggtacttactccaggttcaagaactggtgaccgtccaggaagggttgtgcgtccacgtgccctgttccttctcctatccccaggatgggtggacagatagcgaccctgtccatggatattggttcagggccggggatcggccctatcaggacgccccagtcgccactaacaatcccgacagagaggtacaagccgagacccaggggcgctttcagctactgggagatatctggagcaatgactgttctctcagtattagggacgcacgcaagagagacaaggggtcatatttctttcggctggaacggggcagcatgaagtggtcctacaaatcacagctgaactacaaaaccaagcagctgagcgtcttcgtgacagcatcgacggcattagggaacgggtcttcgttgtcagtgttggagggtcagtccctcagactggtgtgtgctgtaaattcgaacccccctgcgaggctgtcctggacaagaggctccctcaccctctgcccgtcaagatcctctaatcccgggctgcttgagctgcctcgcgtgcacgtccgggacgaaggggaatttacatgtcgagcccagaatgctcagggaagccagcacataagcctgtccctgagtctccaaaacgagggcaccggcacctctagacctgtgagccaggtaacgctggccgctgtgggcggagcaggcgccactgctcttgcgtttcttagtttttgtatcatttttatcatcgtcaggtcctgtaggaagaaaagcgcgcgcccggctgcgggagtcggtgatactggtatggaggatgcgaaagcaatacgggggagtgcaagccagggccctctgaccgagtcctggaaggacgggaatccactgaagaaacccccaccagccgtagctcccagcagcggagaggagggggaactccactacgctacactgtcgtttcataaagtcaaaccccaggacccccagggtcaggaggccaccgactctgaatattcagagattaaaatccacaagcgtgaaaccgctgagacccaggcctgcttgaggaatcataacccgtcctccaaagaagtacgcggctag

SEQ ID NO: 134312 - DNA, 1392 bp, synthetic construct
  misc_feature 1..1392: note = Description of Artificial Sequence: Synthetic coding sequence
  source 1..1392: mol_type = other DNA
atgctgcttttactcttaccccttctatggggccgggagcgcgccgagggccagacctcaaaactcctcacaatgcaaagtagtgttacagtgcaggagggcttgtgtgtgcatgtaccttgctctttcagctaccctagtcatggctggatatatccaggtccggtggttcatgggtactggtttcgtgagggcgccaacacggaccaggacgcccccgtcgccacaaataatcccgctagagcagtttgggaggaaacccgcgacagatttcacctgctcggggacccgcacactaagaattgtactttaagtatcagagatgcacggcgttcggatgccggcaggtatttctttagaatggagaaggggtcaattaaatggaactataagcaccacaggttgtcggtgaacgttaccgcactgacccatcggcccaacatcttaattcctggaacccttgagagcgggtgccctcagaacctgacctgctcagtaccatgggcgtgcgaacaggggacaccaccaatgatctcatggatcgggacttctgtgagtcccctcgaccccagcacaacaagatctagtgttcttactctgataccgcagcctcaggatcacggcacatccctgacgtgtcaagtgaccttccctggggcctctgtgacaactaacaagaccgttcacctcaacgtctcttacccaccacagaatcttacgatgaccgtctttcagggagacggcaccgtgtccacggtcctcggtaacgggtcctccttgtctcttcctgaggggcaatcccttaggctcgtatgcgcagttgacgctgttgattctaaccccccagcccgcctgtctttaagttggagggggctcactctttgtccatctcagcccagcaaccccggagttctcgaactgccatgggtgcacctgcgcgacgcggcggaatttacgtgtagggcccagaatccgcttggatcccagcaggtatacctgaatgtgagtctgcagtctaaggctacatcgggcgtgacccaaggagtggtgggcggcgctggtgctaccgctctggttttcttgtcattttgtgtcatttttgtggtggtcaggtcctgccggaaaaaatctgcacgtcccgccgccggcgtcggcgacacaggtatagaggatgctaacgctgtgcgcggttctgcttctcaagggcctctgaccgagccctgggccgaggacagcccgcctgaccagccgccccccgccagcgccaggagctcggtcggtgagggcgagcttcaatacgcctcactctcattccagatggtcaagccttgggactcccgcggccaagaagccactgacaccgaatattccgagattaagatccacaggtag

SEQ ID NO: 134313 - DNA, 1440 bp, synthetic construct
  misc_feature 1..1440: note = Description of Artificial Sequence: Synthetic coding sequence
  source 1..1440: mol_type = other DNA
atgctcctgcttttgctgccccttttatggggcagagagcgagccgagggccagacgtccaagcttctcacgatgcagtccagcgttaccgttcaggagggtctctgtgtgcatgttccttgttctttttcttacccttcacacggctggatctaccctggacccgtcgttcacgggtactggttccgggaaggcgcaaacacagatcaggatgctccagtcgcaactaacaatcccgccagagctgtttgggaagagactcgggatcgctttcatctgctgggggatcctcataccaaaaattgcaccctgagcatcagggatgcaagacgcagcgacgcaggacgctacttcttccgcatggaaaagggtagcattaaatggaactacaagcaccaccggctgagcgtcaacgtgaccgctctgacgcatcgccccaacatactgattcctggcaccctggaatcaggatgtccccaaaacctaacgtgctctgttccctgggcttgcgaacagggtactccccccatgatctcatggatcggaacaagtgtcagtccccttgatcctagcaccactaggtcaagcgtgcttacactaatcccccaaccacaggaccacgggacttcgctcacctgtcaggtgacttttccaggagccagtgtgactaccaacaagacagtgcatctcaatgtgtcttacccaccccaaaatctgacaatgaccgtatttcagggcgatggcacggtttctactgtgcttgggaacggttcaagcctgagtttgcctgaaggacagtccttacgactggtatgcgccgtcgatgccgtggatagcaaccctccggcccgactaagcttgtcatggagaggcctgacattgtgcccaagccagccttcaaacccgggggtcctggagctgccctgggtgcaccttcgcgatgcggcggagtttacttgccgcgcacagaaccccctgggaagccagcaggtctacctcaatgtctccctgcagtctaaggcgaccagcggggtgacgcaaggtgtggtgggaggcgccggagccactgctttagtgtttttgagtttctgcgtgatcttcgtggtagtgcgatcctgtaggaaaaagagtgcgcgtccagctgccggtgttggcgacacaggaatcgaggacgctaacgccgttaggggctcagccagtcaaatcctcaaccatttcatcggcttcccgacgttcctcgggttgggattcgagtttctgctcaatctacgcgatctgtgctgtcatcctgattcagaattttacgtgtatcacttcagccatttccgtctcattaaaaacatagctggagagatcgtttggagtcttgagggcaaaattctatggttactagacgtcagtgacttcttccactggttttttctaatttgcgtcggatag

SEQ ID NO: 134314 - DNA, 735 bp, synthetic construct
  misc_feature 1..735: note = Description of Artificial Sequence: Synthetic coding sequence
  source 1..735: mol_type = other DNA
atggccgccgccgcatcacctgcctttctgctgtgcctgccactgctccatttgctatccggctggagcagggccggctgggtcgacacgcattgcctgtgctatgactttatcatcacacctaaatcgcgacccgagccacagtggtgcgaggtgcagggtctcgtcgacgagcggccgttcttacattacgactgcgtgaaccacaaggccaaggccttcgcatcactgggaaagaaggtaaatgtgactaaaacgtgggaagagcagactgagacactccgtgacgttgtggactttttgaagggtcaactcttggacattcaggttgaaaaccttattcccatcgaacccttaacgcttcaggctcgcatgagctgtgagcatgaagcgcacggccacgggcggggctcttggcagttcctgtttaatggccagaagttcctgctgtttgactcgaacaatagaaagtggacagctctgcacccgggcgcaaaaaaaatgacggaaaagtgggaaaagaacagagatgtcactatgttcttccaaaaaatttctctgggcgactgtaagatgtggcttgaagagttccttatgtactgggagcagatgttggatcccacaaagcccccaagccttgcacccggcacaacgcagcctaaggctatggctaccacccttagcccttggtccctccttattatcttcctgtgcttcatcttggccggccgctag

SEQ ID NO: 134315 - DNA, 1248 bp, synthetic construct
  misc_feature 1..1248: note = Description of Artificial Sequence: Synthetic coding sequence
  source 1..1248: mol_type = other DNA
atgaccggggagaggccctctactgccttgcctgatcgcaggtggggaccgcggatcctgggtttctggggcggatgtcgcgtgtgggtctttgctgctattttcctgctcttgtccctcgcagcatcgtggtctaaagctgagaatgactttggcttagtgcagcccctggtaacgatggagcagctgctgtgggtttcgggccggcagattggctctgtcgacactttccggattcccttgatcaccgccacaccccgggggaccctgctcgcattcgctgaggcccggaaaatgagtagctcagatgagggggcaaaatttatcgctctgcgccgttcaatggaccaaggaagcacctggtccccaactgcattcatagttaacgacggcgatgtccccgacggtttgaatcttggggctgtggtttcagacgtagagacgggcgtggtgtttttattttactctctgtgcgcccataaggctgggtgtcaagtggcttccacaatgctagtgtggtccaaggacgatggagtgagctggtccacccctcgcaacctctcgcttgacataggcactgaggtcttcgcccctgggcccggatcaggtatccagaagcagcgcgagccgcgtaagggacgtctgattgtttgcggccatggtacactggaaagagacggggttttctgtctactgtcagacgaccacggcgcctcatggcgctatggatctggggtgagtggcattccctatggacagccaaagcaggagaatgactttaatcctgatgagtgccagccatacgagcttcctgatgggtccgtggtcatcaacgcgcgaaatcagaacaactaccactgccactgcaggatagtcctgcggtcgtatgacgcttgcgacacactccggccaagagacgttacctttgatcccgagcttgtggacccagtggtagctgctggcgcagtggtgaccagctcaggcatcgtgttctttagtaatcctgcgcaccccgaattcagagtcaatctcaccctcaggtggtccttctctaacggaacttcttggcggaaggagactgtccagctgtggccaggtccgagcggctactcctccttagcaacattggaaggttctatggatggtgaagagcaggcaccccagctgtatgtcctatacgaaaagggaaggaaccactacacggaatcaatctctgttgctaaaatatcagtttatggtacactatag

SEQ ID NO: 134316 - DNA, 1248 bp, synthetic construct
  misc_feature 1..1248: note = Description of Artificial Sequence: Synthetic coding sequence
  source 1..1248: mol_type = other DNA
atgaccggggaacgtccctctactgctctgcctgaccgccggtggggaccaagaatcctgggtttctggggcggctgccgcgtctgggtctttgccgccatcttcctgctcctcagccttgcggcgagctggagcaaagcagagaatgacttcggtctggtgcagccacttgtgaccatggaacagcttctgtgggtatctggccgacaaattggttctgtggatacattcagaatacccctgatcacggccaccccacggggcacactgctagccttcgcagaggctaggaagatgtcctccagcgacgaaggtgccaaatttatagctctcagaaggagcatggatcagggctcaacctggagtccaacggccttcatcgtgaacgatggcgatgtacccgatgggctgaatctcggcgcagtcgtgtccgacgtcgagaccggcgtcgtgttccttttttattccttatgtgcccataaggctggatgccaggtggccagcacaatgttggtatggagcaaggatgatggtgtatcgtggagtactccacggaacctgtcacttgatatagggaccgaagtctttgcaccgggacccggttccgggatccagaaacagcgcgagcctaggaaggggaggctcattgtgtgcggccatggcacattagagcgggacggagtcttctgcctgctttcagacgaccacggggccagctggaggtatggctccggggtgtcaggcatcccttatggacagcccaagcaggaaaacgatttcaaccctgatgagtgccagccctatgaactgccagacggatccgtggtgattaacgccaggaatcagaacaattaccactgtcattgtaggattgtgttgcgctcttatgatgcctgtgacaccctcagacctagggacgtaacctttgaccctgagcttgtcgaccccgtggtggctgccggggcggtcgtcaccagctccggaatcgttttcttttccaatcctgcccatccagagttccgcgtgaatctgacactcaggtggagcttctctaacggaacctcatggagaaaagaaaccgtccagctgtggcccggcccaagcggatattcgtccttggctactcttgaaggcagtatggatggggaggaacaagcacctcagctgtatgtcctctatgagaaaggccggaatcattatacagaatcgatcagtgtggctaagattagcgtctacgggaccctgtag

SEQ ID NO: 134317 - DNA, 1248 bp, synthetic construct
  misc_feature 1..1248: note = Description of Artificial Sequence: Synthetic coding sequence
  source 1..1248: mol_type = other DNA
atgacaggggaacgtccctcaactgccctccctgataggagatggggtcccaggatactcggcttttggggcgggtgtcgggtatgggtctttgctgccatttttcttctcctttccctggccgcctcttggtctaaagctgaaaacgattttggactggtgcagcctcttgtgaccatggagcagctcttatgggtatccggcaggcaaatcggttccgtcgacacatttcggattcccttgataacggcaacacccagagggacgctgctcgcctttgctgaagcgcgaaaaatgtcttctagcgacgaaggagccaaatttattgctctccgccggtcgatggaccaggggtcaacatggtctcccacagctttcatagtgaatgacggtgacgtgcctgatgggctgaatctcggggccgtagtcagtgacgttgaaaccggagtcgtcttcctgttctacagcctctgcgcacataaggcggggtgccaagtcgcatccaccatgcttgtctggtctaaagatgatggggtgtcatggtccacccctcggaaccttagtcttgatattgggacagaagtgtttgcacccggtcctgggagcggtatccagaagcaacgcgagccacgcaaggggcggcttatcgtttgcggacatggtacactcgaacgggatggcgtgttctgcctgcttagtgacgaccatggtgcttcttggcgttatggtagcggcgtctctgggatcccatacggccagccaaagcaagaaaatgacttcaaccctgatgaatgccagccatatgagttacccgatggctctgtggtcattaacgccaggaatcaaaacaattatcattgccactgcaggatcgtcctccggtcatacgacgcctgcgataccctgaggcccagagacgtaacgttcgaccccgaattggtagatcccgttgtcgcagccggcgctgtggtgacctccagtggtattgtattctttagtaatcctgcccatcccgagtttagggtaaatctgactctgcgttggtctttttcgaacggtacaagctggcgcaaagagactgtgcaactgtggcccggaccgtccggctattcttccctggcaacactcgaaggcagcatggacggcgaggagcaagccccacaactgtatgtcctctacgagaagggcaggaaccactacacagagtccatctctgtggccaaaatctctgtgtacggcaccctctag

SEQ ID NO: 134318 - DNA, 1248 bp, synthetic construct
  misc_feature 1..1248: note = Description of Artificial Sequence: Synthetic coding sequence
  source 1..1248: mol_type = other DNA
atgaccggggaacgaccaagcacggctcttccagacaggcggtggggacccaggatccttggcttctggggcggatgtcgcgtctgggttttcgctgcaattttcctgcttctgtctctggccgccagctggagcaaagctgagaatgatttcggtctggtgcagccactcgtcacaatggagcagttgctctgggtcagcggtaggcagatcgggtcagtggacaccttcagaatccctctgattacggccacaccccgcggcacgctcctggcgttcgccgaggcacgaaagatgtccagtagcgacgagggagcaaaattcattgcacttaggcggagcatggatcaaggctctacctggtccccaactgcttttatagtcaacgacggggacgtgcctgatgggctgaatctgggcgcagtcgtgtctgacgtggagactggcgttgttttccttttctacagtctatgcgcccataaggcagggtgtcaagtcgcttccaccatgttggtgtggtccaaggacgatggcgtatcctggtcgactccaaggaacttatccttggacatcggcactgaggtgtttgcccctgggccaggtagcggcatccagaagcagcgggagccacgcaagggtaggctgattgtctgtggccacgggactcttgagagagacggtgttttctgtctgttgtccgacgaccacggcgccagctggaggtacggctctggagtctccgggattccatacggccagccaaaacaggagaatgactttaatccagatgagtgtcagccttacgaacttccggatggttccgtcgtgataaacgcaagaaaccaaaataattatcattgccattgtcggatagtacttcgctcttacgatgcttgcgatacactgagaccccgagacgtgacctttgatcccgaattggttgatccagtggtggctgccggtgccgtagtgacaagttctgggattgtgttcttttcaaaccccgcacatcccgagttcagagtgaatttgacattgcgctggtccttcagtaatggaactagttggcggaaggaaaccgtgcaattgtggcctggaccatctggatatagcagcctggccactctcgagggatctatggatggcgaggaacaggcaccccaactttatgttctctacgaaaagggtagaaaccactataccgagagtatttccgtggctaagatctctgtatatggaactctgtag

SEQ ID NO: 134319 - DNA, 1248 bp, synthetic construct
  misc_feature 1..1248: note = Description of Artificial Sequence: Synthetic coding sequence
  source 1..1248: mol_type = other DNA
atgacgggagagaggccttcaaccgctctccctgatcgcagatggggacccagaatcctcgggttttgggggggctgcagagtatgggtattcgcggctattttccttcttctgagtctggctgcgagttggtctaaggctgagaacgattttgggttagtgcagccattagtcacgatggaacagttgctgtgggtttccgggcggcagataggatccgtggatactttccgtatccccttgattacagccacaccccgagggaccctgctagcctttgcagaagcaaggaaaatgagtagctctgatgagggcgcaaaattcatcgcactccggaggtccatggatcaggggtctacatggtccccaacagcattcatcgtgaatgacggcgacgtgccagatggactaaatctcggagccgtagtctctgacgtggaaactggagtcgtctttctcttctactccttgtgtgcccataaggctggatgccaagtcgcgagtacaatgctagtgtggtcaaaggacgacggcgtctcctggagcacaccccggaatctgagcctggatattggtaccgaggttttcgcgcccgggcccggatccgggattcagaagcagagagagccccgcaaaggaaggctgattgtctgtggccacggtaccttggaacgcgacggcgtgttctgtctcctgtccgacgatcacggcgcttcttggcgctacggcagcggcgtgtctggtatcccttacgggcaacccaagcaggaaaacgatttcaatcctgacgagtgtcagccctacgaactgcccgatggcagcgtggtcattaacgcccggaatcaaaataactaccattgccactgcagaatcgtcctgcgctcctatgacgcctgtgataccctgagacctagggatgtgactttcgaccctgaacttgttgaccccgttgtggccgccggagccgttgtgactagctcaggtatagttttctttagtaatccagctcacccggagttccgtgtcaatctgacccttaggtggtctttcagcaatgggactagctggagaaaggagactgtccagttatggcccggcccatccgggtatagcagccttgctaccctggagggcagcatggacggggaagaacaagcaccccagctctacgtgctctacgagaaaggaagaaatcattatactgagtctatatccgtcgctaaaataagtgtctacggcacattgtag

SEQ ID NO: 134320 - DNA, 1248 bp, synthetic construct
  misc_feature 1..1248: note = Description of Artificial Sequence: Synthetic coding sequence
  source 1..1248: mol_type = other DNA
atgacaggtgaaagaccctccactgctctgcctgacagaaggtggggacccaggattctcggcttctggggcggttgtagggtttgggtctttgcggccatcttcttacttctgtcgctcgccgccagttggtcaaaagctgagaatgacttcggtctggtacagcccctggtcactatggaacagctgttatgggtatctggccgtcagatcggctctgtggatacattccggattcccctcataacagcgacaccgcgaggcaccctcctggcgttcgctgaggcgcgaaaaatgtcctcaagcgacgagggggccaagtttatagctctgcgacggagtatggatcaaggcagcacctggagccctacagcgtttatagttaatgacggagatgttccagacgggcttaatctcggggccgtcgttagcgatgtggaaacaggagttgtttttcttttctacagtctttgcgcacacaaagccgggtgtcaggtggcgagtactatgttggtgtggtctaaagacgacggcgtgtcatggtcgacaccgcgaaacttatctctagatatcggaaccgaagtgttcgcgccaggcccaggttcaggcatacaaaaacagagagagccaagaaaagggcggctgatcgtctgcgggcacggaactctcgaacgtgatggggtgttttgtttactgtccgatgatcatggcgccagttggagatatgggagcggagtatcagggataccttacgggcagcctaagcaggagaacgattttaatcccgatgagtgtcagccttatgaattaccggacggttctgtggtgatcaacgctcgcaatcagaataactaccactgccattgtcggatcgtgttgcggtcctatgatgcatgcgacactttgcgccctcgggacgtgacatttgacccagagctggtcgacccagtagttgccgccggcgccgttgttacatcctccggaattgttttcttttcaaatccagctcaccccgagttccgcgtgaaccttacattgaggtggagcttcagtaatgggacatcctggcgcaaggaaacagtgcagctgtggccaggcccatccgggtactcctctcttgctacacttgaaggctctatggatggcgaggagcaggctccacaattgtatgttctatacgaaaagggcagaaaccattacaccgaatctatatctgtggcaaagatctccgtatatgggaccttatag

SEQ ID NO: 134321 - DNA, 1248 bp, synthetic construct
  misc_feature 1..1248: note = Description of Artificial Sequence: Synthetic coding sequence
  source 1..1248: mol_type = other DNA
atgacaggggagaggcctagtacagcattgccggataggcggtggggcccacggattctgggattctggggggggtgtcgggtctgggtgtttgccgctatctttcttcttttaagcctcgcagccagctggtcaaaagcggagaacgatttcggactggttcagccactggtgactatggagcagctgctgtgggtgtcaggaaggcagatcggctccgttgatacttttaggatacctctgatcaccgccaccccacgcggaactctgctggcgtttgccgaggcacgaaaaatgagcagttctgacgaaggggccaaattcatcgccctccgtaggtccatggatcagggctccacatggtcacccactgcatttatcgttaacgacggcgatgtcccagatggcctgaacctgggcgcggtagtcagcgacgtagaaactggggtggttttcctattttatagcctttgtgctcataaagctggttgccaggtggccagtactatgctggtgtggagcaaagacgatggcgtgagttggtctacaccaagaaatctttccctggacatcggcactgaggttttcgcccccggacccggaagcggaatccagaagcaaagagagccccgtaaaggacgcttaattgtctgcggccacggtacgctggagcgcgacggcgtgttttgtctcctctccgacgatcatggagcctcctggcgttatggcagtggtgtctccggtattccttacgggcaacccaagcaggaaaatgattttaaccctgatgagtgccagccatatgagctgcctgatggttccgtagttattaatgcccgtaatcagaacaattaccactgccactgccggattgtgctgcgctcctacgatgcatgtgacactcttcgccctcgagacgtgactttcgatccagagctggtggaccccgtggtggccgccggcgccgtcgtcacatcctctggtattgtgttcttttcaaatcccgctcatccagagttccgcgtcaatctcactctccggtggagcttttccaatggtacttcatggcgaaaagaaacagtccaattgtggccgggcccttcaggttacagtagcctggctacgctggaaggtagcatggatggagaagagcaggcccctcagttgtacgttctttacgagaaaggccgcaaccactatactgagtccatatcagtggcaaagataagcgtgtacgggactttgtag

SEQ ID NO: 134322 - DNA, 2277 bp, synthetic construct
  misc_feature 1..2277: note = Description of Artificial Sequence: Synthetic coding sequence
  source 1..2277: mol_type = other DNA
atggccgttagtgcagggtccgctaggacgagcccgagcagcgataaagtgcagaaagataaggcggagctcatttcagggccgcggcaggacagccgcattgggaaactccttgggtttgagtggacagacctttcctcctggagaagactcgtaacactgctgaatcgtcccacggaccctgcatccctggccgtgtttcgcttcctctttggtttcctgatggtcctggatatcccccaagaacgggggctcagctcccttgatcgcaaatatctggacggactggatgtctgcagattcccgcttctggatgccttacgcccactaccactggattggatgtacctcgtctatacaattatgtttctcggcgcccttggcatgatgctcggcctatgctataggatttcctgcgtgctgttcctcctcccctactggtatgtattcctcctcgataaaaccagctggaacaaccacagttatctgtatggccttctcgctttccagctaactttcatggatgccaatcactattggagtgttgatggactgttgaatgctcaccggcggaatgctcacgtcccattatggaattatgctgtgctacggggtcagatcttcattgtatatttcatcgctggagttaagaaattggacgctgattgggttgaaggatactctatggaatatctgtccagacactggttattctctccgttcaaacttctgttgtcggaggagctcacatccctacttgtggtgcactgggggggactcctccttgatctgtcggctggcttcctgctgttctttgatgtctcccgatcaataggcttgttcttcgtatcctatttccactgcatgaacagccagctgttttctattggtatgttttcgtacgtgatgctggccagcagtcccctgttttgtagtcccgagtggccccgtaagttagtttcttactgtccacgaagactacagcagttgcttcctctgaaagccgcccctcaaccctctgtgtcatgcgtctacaaacggtcacgcggcaagtctggacagaagccgggactgagacaccaattgggagccgctttcactctgttgtacctcctggagcagttattcctgccctactcacatttcctgacccagggttataacaactggaccaacggtctgtacggttacagctgggatatgatggtgcacagcagaagccaccagcacgtcaaaattacataccgagacgggcgcaccggagaactcgggtacctcaacccaggggtcttcacgcagagcagacggtggaaggaccatgctgatatgctcaaacagtacgcgacatgcctgagccgactcctccctaagtataatgtgacagaaccccaaatctattttgatatctgggtttccatcaacgatcgattccagcaacgcattttcgatcctcgggtagacatcgtgcaggccgcttggtcccctttccagcgaacctcctgggtacagcccctccttatggacctctcaccgtggcgcgccaaactgcaagagattaagagttcattagataaccacaccgaggtcgtttttatcgcagatttccccgggctgcatctggaaaacttcgttagtgaagatttggggaatacttccattcaattgctgcagggcgaggttactgtagagctcgttgcagagcaaaaaaaccagaccctgcgggagggtgagaagatgcagctcccagccggtgaataccataaggtctacacaacgagtcctagcccttcctgctatatgtacgtatatgtcaacaccaccgagcttgccctggaacaggatcttgcttaccttcaggagctcaaagaaaaagtggaaaatggatctgagactggccccttgcctccagagctccaaccacttcttgaaggagaggtaaagggcgggcctgagcccacaccattagttcagactttccttagaagacaacagcggctgcaggaaatcgagagaaggagaaatacgcctttccacgaacgcttctttcgtttcttgctgagaaaactctacgtgtttcgccgcagtttcctgatgacctgtatttcacttcggaacctgattctcgggcgtcccagtctggagcagctagcccaggaggtaacatacgccaacctgcgacccttcgaagctgtgggggaactgaaccctagtaatactgattcatcccattccaatccacccgaatctaacccggatcccgtccactcagaattctag

SEQ ID NO: 134323 - DNA, 1386 bp, synthetic construct
  misc_feature 1..1386: note = Description of Artificial Sequence: Synthetic coding sequence
  source 1..1386: mol_type = other DNA
atgaggcctgctgaccttccccccagaccgatggaggaatcgcctgccagcagtagtgcacctactgaaaccgaagaacccgggtcttccgccgaggttatggaggaggtgactacatgctcattcaatagccccctcttcagacaagaggacgaccggggcatcacctacagaatcccggctctgctgtacatacctcccacccacacctttctggcctttgctgagaagagatctactagacgtgatgaagatgccctccacttagtgttgcggcgcggactaagaatcggacagttggtccagtggggaccactgaaacccctgatggaagccacactaccagggcacaggacgatgaacccctgtccggtttgggaacagaaatctggttgtgtgtttctgttttttatctgtgttcgcgggcatgttaccgagagacagcagattgtttctggccgcaacgcagccaggctgtgttttatttactctcaggacgctgggtgcagctggtcagaagtccgcgacctcaccgaggaggtgatcggttctgaactgaaacactgggcgacatttgcagtgggacctggccacgggattcagcttcagtctggcaggctggtgattccggcgtatacgtattacattccctcctggtttttttgtttccagttgccgtgcaagacacggcctcactcccttatgatttacagcgatgatttgggagtaacatggcaccatgggagactcataagacctatggtcaccgtggaatgtgaggtagccgaggtcacaggccgcgctggccatccggtcctgtattgctctgcccgcactcccaaccgctgtagagccgaagctttaagcaccgaccatggtgaaggtttccagcgcctggctctcagccggcaactttgcgagccaccacacgggtgccagggctcagtagtgagctttcggccactggagattccccatcgctgccaagatagctccagcaaggacgccccgaccattcagcaatcctcacccggttctagtctgcggctggaggaagaggcaggaacaccttcggagagctggcttctctattcccatcccaccagcaggaaacagagggtggacctcggcatctatttgaaccagacacccctcgaggcagcatgctggtcacgtccctggatcctgcactgcgggccatgcggctactcggacctggcagcgctggaggaagaggggctttttggatgtctgttcgaatgtggaactaaacaggaatgcgagcagatcgcctttagactcttcacacatagagagatcctcagccacctgcagggtgactgtacctctccggggcggaatccctctcagttcaaaagcaattag

SEQ ID NO: 134324 - DNA, 1386 bp, synthetic construct
  misc_feature 1..1386: note = Description of Artificial Sequence: Synthetic coding sequence
  source 1..1386: mol_type = other DNA
atgaggccggctgacctgccgcctaggccaatggaggaatctcctgcaagtagtagcgccccaacggagacagaggaaccgggttcgtcggcggaagtgatggaagaagtgacaacgtgtagcttcaattcgccccttttccgtcaagaagacgatcgcggaatcacctacaggattcccgcccttctgtatattccgcccacacatacattcctcgcctttgccgagaaaaggagtactcggagagatgaggatgcactgcatctggtgttgaggcgcggcctcagaattggtcagctggttcagtgggggccattaaagccactgatggaagctactctgccgggtcacaggacaatgaacccttgcccagtgtgggagcaaaagagtgggtgtgtgttcctgttctttatctgcgtgagaggccatgtgaccgagaggcagcagatcgtttctggacgcaacgctgctcgactgtgcttcatttattcacaagatgctggctgttcttggtccgaagtccgggacttgactgaggaagtaatcggttctgagctgaaacactgggcaacatttgcagtggggcccgggcacggtatacaacttcagagtggcaggctcgtaatcccagcttacacctactatattccctcttggttcttttgtttccagcttccatgcaaaacccgcccacactctctgatgatctattcggacgacctgggagtcacttggcaccacggaagactgattcgtccaatggtgactgtggagtgtgaggttgcagaagttacggggcgggccggacacccagtcctgtattgctccgcacggacccccaatcgctgtagggctgaagctctttccactgaccacggtgagggatttcagcgtctggccctgagtcggcagctgtgtgagcctcctcacggatgccaaggcagcgtggtgtcttttcggcctctcgaaatcccgcataggtgtcaggactctagcagcaaggacgcccctaccattcaacagagtagcccgggctcttccctgagactggaagaggaagccggcacaccgagcgagagctggttgttgtactcccatcctacctctaggaaacagagggtggacctgggaatttacctgaatcagacaccactcgaagctgcctgctggagtcgcccatggatattgcactgcggcccttgcggttatagtgatctggcagcactggaagaggagggcttatttgggtgcttgtttgaatgtggcaccaaacaggagtgcgagcagattgcctttaggctctttacccatcgtgagattctgtcccatttgcagggagattgcacatctcctgggaggaatccttctcagtttaagagcaattag

SEQ ID NO: 134325 - DNA, 1287 bp, synthetic construct
  misc_feature 1..1287: note = Description of Artificial Sequence: Synthetic coding sequence
  source 1..1287: mol_type = other DNA
atggaggaagtgaccacttgtagtttcaactcaccactgtttcgacaggaggacgatcgggggattacttaccgcattcctgctctgctctatattccacccacccataccttcctcgcgtttgctgagaaaaggtccacacgaagagacgaggacgccctccatctagtgttacgccgcggccttcgcatcgggcaactagtgcagtggggcccgcttaaacctcttatggaagcgacccttccaggtcaccgcacaatgaacccatgccctgtttgggaacagaaatccggctgcgtcttcctgttttttatttgcgtgagagggcacgtaacagaaaggcagcaaattgtctctggtcgaaatgctgctcgattatgttttatctattcacaagacgcaggctgtagttggagtgaagtgcgcgacctgactgaagaggtgatcggaagtgagttgaaacattgggctaccttcgccgtgggtccagggcacggcattcagctgcaatctgggcgcttggttatccccgcctacacgtactatatcccctcctggttcttttgcttccagctaccttgcaaaacgcggccccactctctgatgatatattccgacgaccttggcgttacatggcaccacgggaggctgatacggcccatggtcacggtggagtgcgaagttgccgaggtgacgggtagagcaggacatcctgtgctgtactgctctgccagaacaccaaataggtgtagagcggaagctctgtcaaccgatcatggcgaaggattccaacgcttagctctgagccggcagctttgcgaaccacctcatggatgtcagggatctgtggtgagcttcagacccctcgagatccctcaccgctgtcaggacagctcctcaaaggatgcaccgacaatccaacaatcttccccaggctcttccttgcgcctggaagaagaggccggtacaccgtccgagtcctggctgctttactcccaccctaccagtagaaagcaacgggtggacctaggcatctacctgaatcagactccgctggaggcagcatgttggagccgcccgtggatcctgcactgtggcccctgcggatatagcgaccttgcggcactggaagaggagggactgtttggttgtttatttgagtgtgggaccaagcaggaatgcgaacagattgcctttcgactgttcacccaccgtgagatcctgtcacacttgcagggagattgcactagccctggaagaaatccgtcccagtttaaatccaattag

SEQ ID NO: 134326 - DNA, 1059 bp, synthetic construct
  misc_feature 1..1059: note = Description of Artificial Sequence: Synthetic coding sequence
  source 1..1059: mol_type = other DNA
atggaagccaccctgcccgggcatcgcaccatgaacccatgcccagtctgggagcagaagtctggctgtgtgtttctgttctttatctgtgtgcgaggacatgtcacggagcgtcagcagattgtgagcggccgtaacgcagccagactatgctttatctattctcaggacgctggctgttcttggtcggaggttcgagatcttacggaagaggtaattggatcagagctcaaacactgggccacattcgccgtggggcctggacacggcatccagttacagtccgggcgtctcgtgatccccgcttatacatattacatcccaagctggtttttttgtttccagttaccatgtaaaacccggcctcattccttgatgatctatagcgacgacttaggagttacatggcaccacggacgattgatccgtcccatggtgaccgtagaatgcgaggtggcagaagtcacaggccgagcgggtcatcccgtcctttattgttccgctcgcactccgaatagatgtagagcagaagccctgtccaccgatcatggcgaaggcttccaacgcctcgccttgtcgcggcagctctgcgaacccccacacggatgccaggggtccgtcgtctcttttcgcccactggaaatcccacatcgttgccaggactcctccagcaaagacgcaccaaccatccagcagtcttcccctggctcctctctgcgcctcgaggaggaggcgggaacccctagcgagtcatggttactctacagccaccccacctctagaaagcagagggtcgacctcggtatctatttgaatcagactcctctggaagcagcatgctggtctcggccttggattctccactgtggcccgtgtggatacagcgacctcgcggcacttgaagaggagggattatttgggtgcctgtttgaatgcggcaccaaacaggaatgcgaacagatcgcattcaggctgttcacacatagggagatcttgagccacttacaaggtgactgcacaagtccaggccgcaatcccagccagtttaagagtaattag

SEQ ID NO: 134327 - DNA, 1203 bp, synthetic construct
  misc_feature 1..1203: note = Description of Artificial Sequence: Synthetic coding sequence
  source 1..1203: mol_type = other DNA
atggctactctgttactgctgttaggtgtgcttgtggtctctccagatgcactcggttctaccaccgctgtacagacccccacctcgggtgagcccctggtgtcaacctccgaacctctctcctccaagatgtatactacatcgataacatcagatccaaaggctgatagcaccggcgatcaaactagcgcgctgccaccttcaacaagcatcaacgagggaagccctctgtggacttctatcggtgctagcaccgggagtccgctgcccgagcccaccacgtaccaggaagtcagcattaaaatgagttccgtcccgcaagagaccccccacgctacttcacaccctgctgtacctattaccgctaactctcttggctctcacaccgtcacaggaggtacgatcaccacaaattctccggaaacctcgtccagaacctccggagctcctgtgactaccgcagccagttcactggaaaccagcagaggaacctcagggcctcctcttaccatggcgacagtatctctagagacttcaaagggcactagcggaccgccagtcacaatggcaaccgactctctggaaacaagtacgggcactaccggtccacctgtcacaatgaccacaggctctctagaaccgagtagcggtgcctctggaccacaggtgtcgtctgtgaaactgtctacgatgatgtctcccacaactagtactaacgcatcgacggtccccttccggaacccagatgaaaacagcagaggcatgctgcctgtggccgtcttggttgcactccttgcagtcatcgttctcgtagcattgcttctgctttggcgacggcgacagaagagacgcacgggtgccctggtgctcagccgaggaggcaagcggaacggcgtcgttgacgcctgggcgggacccgcccaggtcccagaggagggagcagtgactgtgaccgtgggcgggtctggcggggacaagggctcgggatttccggatggagagggatctagtcgacgccccacgctgacaacttttttcggccggcggaagtctcgccagggctcactggcgatggaggaacttaagtccggtagcggcccatcgcttaagggggaggaagaaccgttggtcgcaagcgaagatggggccgtcgacgcgcccgccccagacgagccagaaggcggggatggagcggctccctag

SEQ ID NO: 134328 - DNA, 1203 bp, synthetic construct
  misc_feature 1..1203: note = Description of Artificial Sequence: Synthetic coding sequence
  source 1..1203: mol_type = other DNA
atggccaccctgctcttgctactgggcgtcctcgtcgtaagtcctgacgccctagggtccacaactgcagtacagactcctacttcaggggaacccctcgtctcaacctcggaacccctatcttcaaagatgtataccacatccatcacatcagacccaaaagccgatagtaccggcgatcagacatctgccctccctccaagcactagcatcaacgaaggttcacccctgtggactagtataggagcctcaaccggaagcccgttaccagagcccactacctaccaagaggtctccatcaaaatgtcaagtgtgcctcaggaaacccctcacgcgacatcccacccagcggtgccgattacagcgaattctcttggcagtcacaccgtaacaggcggcaccatcacaacaaattcccctgaaactagctcacgtacctccggcgctccagtgacaactgccgcctcatccctagaaacatccagaggaacctctgggccgccattaaccatggctacagttagcttggaaaccagcaagggaacctcagggccccccgtcaccatggctactgattctctcgagactagtaccggaactaccggaccacctgtcactatgactacgggaagcctggaaccttcatccggcgcttctggcccgcaggtttccagtgtgaaactcagcactatgatgtcacctaccacttccacaaatgccagcactgttcctttccgcaatcctgacgaaaactctcgtgggatgctacccgtggcagtgcttgtcgcccttctggctgttattgttttggtggccttgcttctgctttggcgacggcgccagaaacggcgcacaggcgcactagtcctgtcccgtggcggcaagcggaatggggtggttgacgcctgggccggcccggctcaggtaccggaagagggcgccgtgaccgtgacagtcggggggtcggggggtgacaaggggtccggttttcccgatggagagggttcgagccggaggccgactctcacgacattttttggaagaagaaagagtagacagggatccctcgccatggaagagctcaaatcaggctcgggcccctcgctcaaaggcgaggaagaacccctcgtggcctccgaagatggcgctgtggacgctcctgcacccgacgagcccgaggggggggatggggctgcgccttag

SEQ ID NO: 134329 - DNA, 1068 bp, synthetic construct
  misc_feature 1..1068: note = Description of Artificial Sequence: Synthetic coding sequence
  source 1..1068: mol_type = other DNA
atggctacacttctcctgctcctgggggtcctggttgtgtcccctgacgctctcgggtcaaccacagcagtgcagacaccaactagcggtgagcccctggtgagcaccagtgagccgttgtcctccaagatgtataccacatctatcaccagcgaccccaaagctgacagcaccggtgatcagacgagcgcactgcctccgagcacttccataaatgaaggatcgcccttatggactagcattggagcctccaccggttcccctctgccggagcccacaacataccaagaagtctctattaagatgagctccgtccctcaggagaccccccacgctacctcacaccctgcagttcccattacagccaatagcctggggagccataccgtcacaggggggaccatcactactaactctccagagacttcatctagaacgtctggcgctcccgtcacgaccgccgctagcagcctagagacatctcgcgggacgagcggcccccccctcacaatggctaccgtgtctttggagacctctaagggaacatccggcccccccgtgactatggccacggactccctcgagacctcaacaggtacaactggacccccggtcactatgactaccggaagtctcgaaccctctagcggggcgagcggcccacaggtttcctcggtgaagctgtccacgatgatgtcccccaccaccagcacaaatgccagcacagtgcccttcagaaatccagatgagaactcccgggggatgctccccgtggcagtgttagtcgctctgctcgcggtgatcgtgctggtagcattgctgttgctgtggcgaagaaggcaaaagcgtcgaactggggccctggtgcttagtaggggaggcaagcgcaatggagtggtggatgcctgggctggccctgcacaggttcccgaggaaggagccgtaaccgttacggtggggggctctggaggagataagggttcaggatttcccgatggagagggctccagccggcgaccaactctcacaacgttctttggcagaaggaaaagcaggcagggctcatag

SEQ ID NO: 134330 - DNA, 672 bp, synthetic construct
  misc_feature 1..672: note = Description of Artificial Sequence: Synthetic coding sequence
  source 1..672: mol_type = other DNA
atgcagtgggctgtcggacgccgctgggcctgggcggcactgcttttggcagtggcagccgtcctgacacaggtggtctggctctggcttggtacacagtcctttgtgtttcagcgggaagagatcgcccagctagccaggcaatacgcaggcctcgatcacgagctcgctttctcgcgccttatagtggaactgaggcggctacaccccggccatgtattgcctgacgaagagctgcagtgggtgtttgtgaacgccggcggctggatgggagcaatgtgtttgctgcacgcttcgctgtccgagtatgtgttactatttggaactgctttaggttcccgcggacactctgggcggtattgggccgagatatccgacactataatcagcggtacattccatcagtggcgggagggtactacaaaaagtgaggtgttttatcccggggagactgtggtgcatggacctggcgaggctaccgccgtggaatggggaccgaacacctggatggttgagtatggccgtggagtgatcccttctactcttgcctttgctcttgccgacacggtgttttccacccaggactttctcactttgttctacactctgcgttcttacgctagggggttacggctggagctgactacatacctcttcgggcaggatccatag

SEQ ID NO: 134331 - DNA, 570 bp, synthetic construct
  misc_feature 1..570: note = Description of Artificial Sequence: Synthetic coding sequence
  source 1..570: mol_type = other DNA
atgcagtgggcggtgggacgcagatgggcctgggctgcccttctgctcgctgtcgcagccgtcctcactcaggtggtctggctctggctgggtttggatcacgaacttgccttttcacggctgatcgaggagcttcaatgggtctttgtaaacgctggcggatggatgggggcgatgtgtctgctgcatgcatcgttgagcgaatatgttcttctgtttggtacagcactgggcagtcgcggccacagcggccggtattgggccgagatctccgatacaatcatctccggcactttccaccagtggagggagggaaccacgaaatcagaagtcttttatcctggagagaccgtcgttcacggtcccggggaggctaccgccgtggagtggggaccaaacacctggatggtggaatatggtcgtggcgtgattccctcaacactggcgttcgccctggctgataccgtgttcagcactcaagattttctgacgctgttttatacattaagaagctatgctcgtggcttgcgactggagctcactacctatctttttgggcaggacccctag

SEQ ID NO: 134332 - DNA, 405 bp, synthetic construct
  misc_feature 1..405: note = Description of Artificial Sequence: Synthetic coding sequence
  source 1..405: mol_type = other DNA
atgggtgcaatgtgccttctgcacgcgtctctctccgagtatgtgctgctttttggaactgccctgggctctagaggacacagcgggcgatattgggcagaaatcagcgataccatcatatcgggcacattccaccagtggcgggagggcaccacgaagtctgaggtgttctaccctggagagacggttgtccacgggcccggagaagctacagctgtggagtgggggcccaacacttggatggttgagtatgggaggggggtcattccttccacccttgcctttgcactcgccgacactgtattttcaacacaggatttcctcaccctattttacaccttgcgctcttatgctagggggcttaggcttgagctcaccacctacctcttcgggcaggatccctag

SEQ ID NO: 134333 - DNA, 579 bp, synthetic construct
  misc_feature 1..579: note = Description of Artificial Sequence: Synthetic coding sequence
  source 1..579: mol_type = other DNA
atgcagtgggcagtgggacgtcgctgggcctgggccgccctgctgctcgctgtggctgctgtgcttactcaagtcgtttggctgtggctgggcacacagagctttgtgttccaaagggaggagattgcacaactcgctcgccagtacgcaggcctcgaccacgaactagctttttccaggctaatagtcgagttgagaagactgcatccgggccacgtgctccctgacgaagaactgcagtgggtttttgtgaacgctggtggctggatgggtgcgatgtgcctgctgcatgcgtcgctttccgagtacgtactcctgttcggtaccgcccttggctcccgcgggcactcaggcgagaccgtagtgcacggacctggtgaggcaaccgccgtcgaatggggtcccaacacatggatggtcgaatatggaaggggagtgattcctagtacccttgcctttgcccttgctgacactgtcttttcaacacaggactttctcacactcttttataccctccggtcttacgcccgtgggttgcgccttgagcttactacttacctgtttggccaagatccctag

SEQ ID NO: 134334 - DNA, 2916 bp, synthetic construct
  misc_feature 1..2916: note = Description of Artificial Sequence: Synthetic coding sequence
  source 1..2916: mol_type = other DNA
atgggggtggcaggccgtaataggccaggtgcagcatgggcagtgttattactcctccttctgctacccccccttttactgctggcaggggcagttcctccgggaagaggccgagccgcgggtccccaggaggacgtagatgaatgcgctcaagggctagacgactgtcacgccgacgcattgtgccaaaatactcccacgtcttacaaatgctcatgtaaaccagggtaccagggcgagggccggcagtgcgaggatattgacgaatgcggtaacgagttaaatggcgggtgcgtgcatgattgcctgaatattcctgggaattaccgatgcacatgttttgatgggtttatgcttgcacacgacgggcataattgtttggacgtggatgaatgtctggagaacaacggagggtgccaacatacatgtgtcaacgttatggggagctacgagtgttgttgcaaggaggggtttttcttgagcgataaccaacacacttgcattcaccggtccgaggagggactgagttgcatgaataaagaccacggatgcagccatatctgcaaagaagccccccggggaagtgttgcatgtgagtgcaggccgggattcgaacttgctaaaaatcagagggattgcattctcacatgtaaccatgggaacggcggctgccagcatagttgtgatgacactgcggacggccccgaatgttcctgccatcctcaatataagatgcacactgatgggaggagttgcctcgagcgagaggacactgtgttggaggtcactgaatcaaatacaacaagtgtcgtcgacggcgacaagcgagttaagagaaggctacttatggaaacatgtgccgtgaataacggtgggtgcgatcgcacctgcaaagacacatccactggcgtgcactgttcatgtcctgtgggtttcacgctacagctggacggtaaaacctgcaaggatatagacgagtgtcagactcgcaacggcggctgcgaccatttctgcaagaatattgtaggatctttcgattgcggttgcaagaaaggcttcaaactgctgaccgacgagaagtcctgccaggatgtggatgaatgcagtctagacagaacctgtgatcactcttgtatcaatcaccccgggaccttcgcctgtgcctgcaacagaggttatacactctacgggtttacacattgcggggatacaaacgagtgttcaataaataacggtgggtgccagcaggtttgcgtaaataccgtgggaagctatgagtgccagtgtcaccccgggtataagctgcattggaacaaaaaggactgcgtggaagtgaagggtctgctccccacttctgtcagccccagggtgtcgctccactgtgggaagagcggcggaggcgacggttgtttcctacgttgtcattctggaattcacctgtcttccgggctgcagggagcatattcagtgacatgcggatcctcgtcaccacttcgtaacaagcagcagaaaagcaacgattctgccttcggagacgttacgaccatacggacttccgtcactttcaaattgaacgaggggaagtgctctctgaagaacgcagaactattccctgaaggactgcgccctgcactgccggagaaacacagtagcgtgaaagagagtttccggtacgttaatcttacttgctcatccggcaaacaggtgcctggtgcccctgggcggccgtcaacacccaaggagatgttcatcacagtggagtttgaactagagaccaaccagaaagaggttactgcatcttgtgatcttagctgtattgtcaaacggacagagaagcgactgcgcaaagctatccgcaccctgcgcaaggcagttcatagagaacaattccacctccagctctctggaatgaacctggatgttgccaaaaaaccgccccgcaccagcgagcggcaggccgagtcctgcggagtcggccagggacatgccgagaaccagtgcggattgtgtcagccaggcgagtacagtgccgacggatttgctccatgccatctgtgcgccctcggaacctttcagcccgaggcaggccggacatcttgcttcccgtgcggtggggggcttgccactaagcatcagggtgccacctcctttcaggactgcgagacaagggtccagtgttccccaggccatttctacaatactactacccacaggtgcattcgctgtcctgtggggacttatcaaccagaatttggcaagaacaactgcgtatcttgtccaggtaatacaaccactgactttgacggctcaaccaatatcacccagtgcaaaaaccgtagatgcggtggtgagctcggcgattttacagggtatatcgagtctcctaattacccaggcaattaccctgcaaatactgagtgcacctggaccatcaacccccctccaaagaggagaatcttgattgtggtaccagagatctttctgcccatagaggacgactgtggggattacttagttatgcgtaaaacaagctcctccaattctgtcacaacgtacgaaacttgtcaaacatatgaacgacccatagcctttacatctcgaagcaagaagctgtggatacagtttaaatcaaatgaagggaatagcgcccggggattccaggttccatatgttacatatgacgaggattaccaggagctaattgaggacatcgtccgcgatggcaggctgtacgctagcgaaaaccaccaggaaatactgaaggacaagaagctcattaaagcactctttgatgtgctcgctcatcctcagaattacttcaaatatactgctcaggagagccgcgaaatgttcccacggtccttcattagactcctccgcagcaaggtcagccgattcttacgcccttacaagtag

SEQ ID NO: 134335 - DNA, 1044 bp, synthetic construct
  misc_feature 1..1044: note = Description of Artificial Sequence: Synthetic coding sequence
  source 1..1044: mol_type = other DNA
atgggtgcagctgctgtgaggtggcacctgtgcgtcctgctggcattagggacgcgagggcgtttagcaggtggctccggattgcccggatcagtcgacgtggatgaatgctctgagggaactgacgattgtcatatcgacgccatctgccaaaatacacctaagagctacaagtgcctttgtaaacccgggtacaagggcgaaggcaaacagtgcgaagacatcgatgaatgcgagaacgattactacaatggaggctgcgtccatgagtgcattaacatacccgggaactaccgttgtacatgcttcgacggctttatgctcgcccatgacggccacaactgcctggatgtggatgagtgccaggataataacgggggctgtcagcagatctgtgtaaatgcaatggggtcatacgagtgccaatgtcattccggttttttcctgtctgataaccaacatacatgtatccaccgctcgaacgagggaatgaactgcatgaacaaagatcacggttgcgcccacatttgccgcgagacccctaagggcggggtagcctgtgattgccgacccgggttcgacctcgcacagaatcagaaagattgtaccttgacatgtaactacggtaacggaggctgtcagcattcctgcgaggataccgatacggggccaacctgcggctgtcaccaaaagtatgctcttcatagcgatggtcgtacatgtatagagaaagatgaggccgccattgaaaggtcccagttcaacgctacatctgttgccgacgtagacaagagagttaagaggaggctcttgatggagacgtgcgcggtaaacaacggcggctgcgaccgcacatgtaaggacacagcaaccggagtccggtgtagttgtcctgtgggattcactctccaaccagatgggaagacatgcaagggacaacacgtggagttatgcggctgtccctgtctgtactggcccggacaagaacccccctgtgcatgtattgctggccccagggctggattgaacgggggccatgtctag

SEQ ID NO: 134336 - DNA, 2967 bp, synthetic construct
  misc_feature 1..2967: note = Description of Artificial Sequence: Synthetic coding sequence
  source 1..2967: mol_type = other DNA
atgggtgccgcagccgtgcgctggcatctgtgcgtacttttggccctgggcacacggggcagactagctggcggtagtgggctgcccggctctgtggacgttgatgaatgctccgagggaacagatgactgtcatattgacgcaatttgtcagaacaccccaaaatcctataaatgcctgtgtaaacccggttacaaaggagaagggaagcagtgcgaggacatagatgaatgcgaaaatgattattataacggtgggtgcgtgcatgagtgtattaacatccccgggaactatcgctgcacgtgcttcgatgggtttatgttggcgcacgatggccacaactgtttggacgttgacgagtgccaggacaacaatggcggctgccagcaaatctgtgtcaatgctatggggagctacgaatgccagtgccatagcggcttctttctcagcgacaaccagcatacttgtattcacaggagcaatgagggtatgaactgcatgaacaaagaccatggctgcgctcatatttgtcgcgagactcctaaggggggcgtggcctgtgattgtcggccaggattcgacctggcacagaatcagaaagactgcacccttacctgtaactacggaaacggtggttgccagcacagttgtgaggatactgatactggccctacatgtggatgccaccagaagtacgcattacactccgacggccgcacctgcatcgaaacctgcgccgtcaataacggaggttgcgaccggacctgcaaagatactgctaccggtgtgcgctgctcgtgtcctgttgggttcaccctgcagcccgacggtaaaacctgcaaagacatcaatgagtgtctagtgaacaacggcggctgcgatcacttttgcagaaacacggtcggttcgttcgaatgtgggtgtagaaaaggctataagttgctcactgatgaacggacctgccaggatattgatgagtgctctttcgagcggacctgtgatcacatttgcatcaacagccccgggtcttttcaatgcctgtgtcaccgcggttatatcctgtatggcacaacacactgtggagatgtggacgagtgctccatgtcgaatggttcctgtgaccagggatgcgtcaacaccaagggctcgtacgaatgtgtatgcccccctggccgccggctgcattggaatggcaaagactgcgtcgaaacaggaaaatgcctgagtagagctaaaactagtccccgggcccagctcagctgttccaaggcaggcggcgtggaaagttgctttctgagctgtcccgcccacacattgttcgtgcccgatagcgagaactcatacgtactttcatgtggagttcccggaccccaggggaaggctcttcagaagcggaacgggacctcgagcgggctgggaccatcgtgctccgatgctccaactacccccatcaaacaaaaagcgaggtttaagatacgggatgctaaatgccatctgaggccacacagtcaggcccgtgctaaagagacagctaggcaacctctcttggatcactgccacgttacctttgtcaccctgaaatgtgactcatccaagaaaagaaggaggggacgtaaatcaccctcaaaagaggtgtcacacataacggccgaatttgagatcgaaaccaagatggaagaggcatccgacacctgcgaagccgattgtctccgcaagcgcgccgagcagtccctccaggcggctattaagacactaagaaaatccattggaagacaacagttctatgtgcaagtatccgggacagagtacgaagtcgcccagcgccccgcaaaagctctggagggacagggggcatgcggagcaggccaggtccttcaagatagcaaatgcgttgcctgtggacctggcactcactttggcggagagctcggccagtgcgtatcttgtatgcccggcacctatcaggacatggagggccagttgagctgtactccttgcccctccagcgacggcctgggactgcccggtgccagaaatgtgagtgaatgtggcggtcagtgctcacctggctttttttcagccgatggatttaagccctgccaggcttgccctgtgggcacctatcagcccgaacccggccggaccggctgctttccttgcggcggcggactgttaacaaaacacgagggcaccacctcttttcaggactgtgaagccaaggtacactgttcgccgggacatcactacaatacgaccactcacagatgtatccggtgcccagtgggcacataccagccggaatttggtcagaatcactgcataacctgtcctgggaacactagcacggatttcgatgggtccactaacgtgactcactgcaagaaccagcactgcgggggcgaactcggggattatacgggctatattgaaagtccaaattaccccggtgactatcccgctaacgccgagtgcgtttggcatatagcgccaccgcctaagcgccgcattcttatcgtggtgccagagatattcctgcccatcgaggacgagtgtggcgatgttctggttatgaggaagagcgcctcacctactagcataacaacttacgagacgtgccagacgtatgagcgccccattgcctttacgtctcgctcacgtaagctgtggattcagttcaaatcaaatgaaggaaattcgggtaaggggttccaggtcccgtacgtcacctacgatgaggattatcagcagctgatcgaggacatagttagagatggacgcctctacgcgagtgaaaaccaccaggagattctgaaggataaaaaactcatcaaggctctgtttgatgttctcgcccacccacaaaactactttaagtacaccgctcaggagagtaaagaaatgtttcccaggagttttatcaagctgctgagatccaaagtgagtcggtttctcagaccctataagtag

SEQ ID NO: 134337 - DNA, 1857 bp, synthetic construct
  misc_feature 1..1857: note = Description of Artificial Sequence: Synthetic coding sequence
  source 1..1857: mol_type = other DNA
atggaaactgaggccgcctcgactgccgtgcgcacccagacacaggcaccccgcgtagtggctacacggtccacccccagcacccagactgtggccagggccagcaggcgggcccaaagtattactgaggccgccactgggcatgctcgcacccaaccactcgcctgtgatgctgcagcaccattggatagtcattgttctcggacggggagacacgccaaaacatccacctcagcatggtccacaacagaagccgccacaacttctgccgccactccgtgggcagctagctcagcagccgccgggcgcgctaccagttgcagcccaacctctgcacctgctagaactagcactagtgccccctcatcaggccccgtgactacgagtgcaagcactccccaagcaagggcaaaggaaaccgcacggcagccgctgctggaccactgtcatgtgacatttgtgacgctcaagtgcgatagttcaaaaaaaaggaggcgtggcaggaaatcacctagtaaggaagtgtctcatattactgctgagtttgaaatcgaaacaaagatggaagaagccagcgacacctgcgaagcagattgcctaaggaaacgagcagagcaatctctccaggccgccattaagacccttcgtaaaagtatcggaaggcagcagttctatgttcaagtgtccgggacagagtatgaggtagcccaacgccccgcaaaagctctcgaaggccagggcgcctgcggggccgggcaggtgttgcaagatagcaaatgcgtggcatgcgggcccggaactcacttcgggggcgagctgggccagtgcgtttcttgtatgccaggcacctaccaggacatggaaggacagttgtcctgtactccctgtccaagcagtgacgggctgggactgcctggtgcccgaaatgtgagcgagtgcggaggccagtgcagtcccggattcttctccgcagatggattcaaaccttgtcaggcatgcccggtaggaacctatcagccagagccagggcgtaccggctgcttcccttgtggtggcggcctgctgaccaaacatgaggggacaacctcctttcaggattgtgaggctaaggtgcactgttcacctggtcaccactataatacaactactcacaggtgcatccggtgcccagttgggacatatcagccagagttcggccagaaccactgcataacatgccctggcaatacaagtacagattttgacggaagtacgaacgttacacactgcaagaaccagcactgtggtggtgaactaggggactatacaggatacattgagagcccaaattaccccggggattatcctgccaacgctgagtgtgtgtggcatatcgctcccccacccaaacggcggattctgattgtcgtgcccgagatttttctgccgatcgaagatgagtgtggggacgtgctggtgatgcgcaaatcagcgagccccacatcgattaccacttacgagacgtgtcagacctatgaacgaccgatagcgtttacctctcgaagcaggaaactctggatccaattcaaatctaatgaaggaaatagcggcaaggggttccaggtaccatatgtcacttatgatgaggactaccagcagctaatcgaagacattgtgcgggacggccgcctctatgcaagcgaaaaccatcaagagatcttgaaggataaaaagctcataaaggcactcttcgatgtgctcgcccacccccagaattacttcaaatatacagcacaagaaagcaaagagatgtttccccggtcttttataaaactgctaaggtcaaaagtgtctcggtttctccggccttacaagtag

SEQ ID NO: 134338 - DNA, 1092 bp, synthetic construct
  misc_feature 1..1092: note = Description of Artificial Sequence: Synthetic coding sequence
  source 1..1092: mol_type = other DNA
atgggcgccgcagccgtgaggtggcacttgtgtgtgctgttggcgttgggcactcggggcaggctcgccgggggaagcggcttgcccggttcagtcgatgtcgacgagtgcagcgagggcaccgatgactgccacattgatgctatttgccagaatacccctaagagctataagtgcttgtgtaagccaggctacaagggagagggaaaacaatgtgaggatatcgacgaatgcgagaacgattactacaacggcggttgcgtgcacgagtgtatcaacattccaggcaactatagatgtacttgtttcgacggattcatgctcgcccatgatggtcacaactgtttagatgttgacgagtgccaggacaacaatggaggatgccagcagatctgcgtgaatgcaatgggatcttatgaatgccagtgtcactccggtttctttctctcagacaatcagcacacctgcatacacaggtccaatgaggggatgaattgtatgaataaggatcacgggtgtgcacatatctgccgggagacgccaaaaggcggagtggcttgcgactgtcggcccggatttgatctcgcccaaaaccagaaggattgtacactgacatgtaattacggtaatggtgggtgccagcactcttgcgaagatacagatactgggcctacctgcggctgccaccagaagtacgccctacactccgatggacgtacatgcatcgaaacctgtgccgtgaataatgggggatgcgaccggacgtgtaaagacactgccactggggtccggtgtagctgtcctgtgggatttaccctgcagcccgacggcaaaacgtgtaaagatatcaatgaatgtctcgttaacaatggagggtgtgatcatttctgccgcaataccgtggggagcttcgagtgcggctgtcgcaaggggtataagctgcttaccgacgaacgcacctgccaagatattgatgaatgctcgttcgagcgcacctgcgaccatatttgcataaattcccccggatcatttcagtgtctgatcaaactattgagatccaaggtatcaaggttcctgagaccttacaaatag

SEQ ID NO: 134339 - DNA, 528 bp, synthetic construct
  misc_feature 1..528: note = Description of Artificial Sequence: Synthetic coding sequence
  source 1..528: mol_type = other DNA
tagagagagactcctaaaggtggggtggcctgcgattgtcgtcctggcttcgacttggctcaaaaccaaaaggactgtacgcttacgtgtaattacggcaatggaggctgtcaacacagttgcgaagacacagacactggcccgacttgtggctgtcatcagaaatatgcccttcacagtgatggaaggacctgcatcgagaaggacgaggcagctatcgagaggtcccaatttaatgctacatcagtcgcagatgtggataagcgagtcaagagaaggctccttatggaaacctgtgcagtaaacaatgggggctgcgaccgaacctgtaaagacacagccactggcgtgagatgcagctgccccgtgggtttcactctacagcccgacggcaagacctgcaaagatatcaacgagtgcctcgtgaacaatgggggctgtgaccatttctgtaggaacaccgtaggctcatttgagtgtggatgccgcaagggatataagcttctaaccgacgagcggacctgctag

SEQ ID NO: 134340 - DNA, 3000 bp, synthetic construct
  misc_feature 1..3000: note = Description of Artificial Sequence: Synthetic coding sequence
  source 1..3000: mol_type = other DNA
atgggcgtggctggacgtaaccgaccaggggctgcctgggcagtgctgctgctgctgctgctcctgccaccacttcttctcctcgcgggcgcagtccccccaggccgcggacgagctgctgggccgcaagaagatgtagacgagtgcgcacagggtctggatgactgccacgctgatgccctgtgtcaaaatactcctactagttataaatgttcctgcaaacctgggtaccaaggggagggcagacagtgtgaagacatcgacgagtgtggaaacgagctgaacggtggatgtgtccatgattgtctcaatattcccggtaactatcggtgcacgtgtttcgatggtttcatgctggctcatgacggccacaactgcctggatgtggatgaatgcctggaaaacaatggaggttgccagcacacctgtgtgaacgtgatgggctcgtacgagtgttgctgtaaggaggggttttttctgtccgacaatcagcacacctgtattcatagatccgaggaaggcctcagctgtatgaataaggatcacggctgctcccatatatgcaaagaagcccccagaggatcggtcgcttgcgagtgtcgacctggttttgagctagccaagaatcagagggattgcatcttaacttgcaaccacggcaatggcggctgccagcatagctgtgacgataccgcggacggccctgagtgcagttgtcacccacagtataagatgcacacagatggccgatcctgtctcgaacgcgaggacaccgtgttggaggttacagagagcaatacaacctccgtcgtggatggggacaagcgcgtaaaaagacgcctcctgatggagacttgcgcggtaaataatgggggatgcgatcggacatgtaaggacacgtcaaccggtgtgcattgctcttgccccgtcgggtttaccctccagctggatggtaaaacatgtaaagatatcgacgagtgccaaaccagaaacggaggctgtgaccacttttgtaagaatatcgtaggcagctttgactgcggctgtaagaaagggtttaaactgttgacggatgagaagagctgtcaggatgtggacgagtgttccctagataggacctgtgatcactcatgcattaaccatcctggcacatttgcctgcgcatgtaatcgcggctacaccctatacggctttacccattgtggcgacaccaacgagtgctccatcaataacggtggctgtcagcaggtgtgcgtgaacaccgtagggagctatgagtgtcagtgccaccccggctataagctgcactggaacaaaaaggattgcgtcgaggtcaagggtcttttgcccaccagcgtcagccccagagtgtcgctgcattgtggcaagtcaggtggtggcgacgggtgtttcctgcgctgtcactccgggatccatttatcctccgacgtgactaccatcaggacctctgtcaccttcaaactcaatgagggcaagtgttctttgaaaaatgccgaattatttccggagggtcttaggcctgcccttcccgagaagcatagttcagttaaggaaagctttcgctacgtgaacctaacttgcagttctggtaagcaggtacccggagcccctgggaggcccagcacgccaaaagaaatgtttatcacagtagagtttgagcttgaaacaaaccagaaagaggtaaccgcatcttgcgacctgtcctgcatcgtcaagcggaccgaaaagaggctgaggaaagcaatccggaccctgagaaaagccgtgcatcgcgagcagttccacttacagctttctggaatgaatctcgatgtcgcaaagaagccccctagaacgtcagagcgacaggctgagtcatgcggcgtgggacagggacatgccgaaaatcagtgcgtttcttgccgggccggaacttattatgacggggcccgcgagaggtgtatcctttgccctaatggtacttttcagaacgaagaaggccagatgacctgtgagccgtgccccaggcctggtaattctggggccttaaaaactcctgaggcatggaacatgtccgagtgcgggggcctctgccagccaggcgagtacagcgccgacggcttcgctccatgtcacctgtgtgccctggggacctttcagcctgaggccgggcggacatcatgctttccatgtggtggggggttagccacaaagcatcaaggagccacctcatttcaggactgcgagacacgagtgcagtgttcgccaggacacttctacaacactaccacacatcgttgcattagatgtccagtcggaacctatcagcccgagtttggaaagaacaactgcgtgagttgtccggggaatacaacgactgacttcgacggcagcactaatattacacaatgtaaaaacaggcgctgcggcggcgaactgggtgatttcaccggttatatcgagtccccaaactacccgggcaattaccccgccaatacagagtgtacatggaccattaaccccccacccaaaagaaggattttgatagtcgtacccgagatcttcctgccgatcgaggacgactgcggtgattacctggtgatgaggaaaaccagttcttccaactcagtgaccacgtacgagacttgtcagacgtacgagcgcccaatcgctttcacgtctagatctaagaagctgtggatccagttcaagagtaatgaggggaactctgcccgcggatttcaggtaccctacgtgacatatgatgaggactatcaggaactgatcgaggacattgtgcgcgacggtagattgtatgcatcagagaaccatcaagaaatcctgaaagataaaaagctaataaaggcactgttcgatgtgttggctcacccacagaattatttcaaatacactgctcaggaatcccgcgaaatgtttccaaggtcttttatccggttactgcggtcaaaagtctccaggttcctacgcccctacaaatag

SEQ ID NO: 134341 - DNA, 2424 bp, synthetic construct
  misc_feature 1..2424: note = Description of Artificial Sequence: Synthetic coding sequence
  source 1..2424: mol_type = other DNA
atgggcgtggcagggcggaataggcctggcgccgcttgggctgtcctgctgttgttgttgctgctgccgcctttactgctgctagcgggagcagtacctccaggcaggggacgggcagctggcccccaggaggacgtagacgagtgcgcccagggtctggatgattgccacgctgacgccctttgccagaatacccccacgagttacaagtgctcctgtaaacctgggtatcagggggagggtcgtcagtgtgaggacatagacgaatgtggaaacgaacttaatgggggttgtgtccacgattgcctgaatattccagggaattatcggtgcacctgctttgacggcttcatgctggctcatgacggccacaattgtcttgatgtggacgaatgtctggagaacaatggtgggtgtcagcacacctgtgttaatgtgatgggcagctacgaatgctgttgcaaagaaggtttttttctgtccgacaaccagcacacctgtattcacagatctgaagaaggactgtcttgtatgaataaagatcacggctgtagccatatctgcaaagaggccccccgcgggagtgtggcatgcgagtgtcgccctggatttgagcttgcaaaaaaccagcgcgactgtatcctgacatgcaaccatgggaatggtggctgccagcatagctgcgatgacaccgctgacggaccagagtgcagttgccacccacagtataaaatgcacacagacggacgaagttgcctggagcgggaagacaccgtgcttgaggtcactgagtctaacaccacatccgtggtggatggagacaagagagtcaaacgacgtctcctgatggagacctgtgctgtcaacaatggtggttgtgataggacctgcaaggacacaagtactggggtccactgctcctgtcctgtaggatttacactgcagctagacggcaagacttgtaaagacattgacgaatgtcaaaccaggaatggcggctgtgaccacttttgcaagaatatagtgggttcctttgattgcggctgcaaaaaggggttcaaacttttaactgatgagaagtcttgtcaagacgtcgatgagtgttccctagaccggacctgcgatcactcttgcattaaccaccccgggacattcgcatgcgcatgcaaccggggatatactttatatggttttacgcattgtggcgacacaaatgaatgcagcattaataacggagggtgtcagcaggtatgcgtcaatactgtcgggtcctacgaatgccaatgccatcctggatataaactgcactggaacaaaaaggattgtgtggcctcttgcgatctctcctgtattgtcaagaggacggaaaagcgcctgagaaaggctatccggacgctgcgcaaagcagtccatcgcgagcagttccaccttcaacttagcggaatgaacctggacgttgcaaagaaaccaccaagaacgtctgaacgccaggctgagtcctgcggagttgggcagggacatgcagaaaaccagtgcgtaagctgtagagcgggcacatactacgacggcgcaagagagcggtgtatcctttgccctaacggcactttccagaacgaagaagggcagatgacatgcgaaccttgcccccgccccggcaacagcggtgcactgaagacgccggaagcctggaacatgtctgaatgcggaggattgtgccaacccggagagtattcagcagacggtttcgctccgtgccacctttgcgcacttggtacattccagcctgaggccggaaggacttcttgcttcccctgtggtggtggattagcaactaaacaccagggggccacaagttttcaggactgcgaaactagggttcagtgttctcccgggcacttttacaatacaaccacacatcgctgcattcgttgtcctgtgggtacataccagcctgagttcggtaaaaacaactgcgtctcatgccctgggaatactactacggacttcgacgggtctacaaatatcacgcagtgcaaaacaagtagcaactcagtaaccacttacgaaacttgtcaaacatacgaacgtcctatcgcattcacatctcgcagtaaaaagttgtggatccaattcaagagcaacgagggtaattctgcacgcggattccaggtgccatatgtgacatatgatgaggactatcaggagctgatcgaggacattgtgcgagatggacggttgtatgcgtctgagaatcatcaggaaattcttaaagataagaagttgattaaagccctgttcgatgttctcgcccacccgcagaattattttaagtataccgcccaggagtcaagagagatgtttccacgatccttcatcagattacttcggagcaaggtgtcaagattccttcgtccatataagtag

SEQ ID NO: 134342 - DNA, 3087 bp, synthetic construct
  misc_feature 1..3087: note = Description of Artificial Sequence: Synthetic coding sequence
  source 1..3087: mol_type = other DNA
atgggagttgcgggcaggaaccggcctggcgcggcctgggcagtcttactgctccttcttcttctgcccccacttctgctactcgccggcgccgtgccccccggaagggggcgcgcagccggcccccaggaggacgtggacgagtgcgctcagggcttggatgactgtcatgctgatgcactatgccagaacacacctaccagttataaatgtagctgcaagcctggctatcagggggaagggagacagtgtgaagacattgacgagtgcggcaacgagctcaacggaggctgtgtccatgattgtttgaacatccccggtaactatcgctgtacttgttttgacggattcatgctcgcgcacgacggccataactgtctcgacgttgatgagtgccttgagaacaatgggggctgccagcatacctgtgtgaacgtgatggggagctatgagtgctgctgcaaggagggattcttcctgtcagataatcagcacacctgtatccatcgatcagaagaaggactgagttgcatgaacaaagaccatgggtgttcgcacatttgtaaagaagctccaaggggctctgtggcctgcgaatgccgaccaggattcgagctcgcaaaaaatcagcgcgattgtatcttgacatgcaaccacgggaacggtgggtgccagcatagctgcgatgatacagcagacggacctgaatgctcttgccacccccagtacaaaatgcacactgatggccggtcctgcttggagagggaggacactgtcctggaagttactgagtccaatacaacaagcgtggtggacggagacaaacgtgtgaagcggagacttctgatggagacgtgtgctgtgaacaatggggggtgtgaccggacgtgtaaggatacctctacaggcgttcactgctcttgtccagtggggttcaccctccagctagatggaaagacttgtaaagacatcgatgaatgccagacgcggaatggcggctgtgaccacttctgcaagaacattgtgggttcatttgactgcggctgtaaaaaaggttttaagctgttaactgatgagaagagctgtcaggacgtagacgaatgctctctggacaggacctgtgatcactcctgcattaatcacccagggactttcgcatgtgcctgcaatagaggctatacgctgtacggctttactcactgtggggacacaaacgaatgttctatcaacaacggcggctgtcaacaagtgtgcgttaacacggtcggcagctacgaatgccagtgtcaccccggctataaactgcattggaataagaaagactgtgtagaggtgaagggcctcctgcccacttctgtctcccctcgcgtctcacttcactgtggcaaatcggggggcggcgatggttgcttcctgaggtgccactctggcatccacctcagtagtggactgcagggtgcttactccgtgacatgcgggtcttccagcccacttaggaacaaacagcaaaagtccaatgactcggcgttcggtgacgtgactacaatcagaacgtcagttacctttaaattgaatgaaggaaagtgctccttaaaaaacgctgaactgtttccagagggactaaggcctgctttacccgagaagcattcctccgtcaaggagtcatttcgttacgtgaatctgacgtgttcttcagggaaacaggtgcccggcgcgcctgggcgcccaagtacccccaaggagatgttcatcacagttgaatttgagctcgagaccaatcagaaggaagttacagcttcttgcgacctctcttgtatcgtaaagcggactgagaagagactccgcaaggctatccgcaccttgcggaaagcagtccatcgggaacaattccatctgcagctgtcaggaatgaacctggatgttgcgaagaaacctcccagaacctccgaacggcaagcagagtcttgcggagtaggacagggccatgccgaaaaccaatgtgtctcctgtcgggcaggaacctactatgacggcgctagagaacggtgtattctgtgtccaaacggcacattccagaacgaggaaggacaaatgacctgcgaaccatgtccccggcctggaaactctggtgctctcaagactccagaggcgtggaatatgtccgagtgtgggggactctgtcaacccggcgagtacagtgccgatgggttcgcaccttgccatctctgcgccttaggaacattccagcctgaggccggccggacaagctgttttccatgtggtggcggcctggccaccaaacatcagggagctactagtttccaagactgtgaaactcgggtgcagtgcagtcccggccatttttacaataccaccactcacagatgtatcaggtgccccgtgggcacttaccagcccgagttcggcaaaaacaactgcgtttcatgccccgggaacacaactacggatttcgatggctcaacaaacattacccagtgcaagaaccgcaggtgcggcggcgagctaggggatttcactggatacatcgaaagtcccaactatccaggaaattatcccgccaacacagagtgcacttggactattaatccccctcccaagcgtaggattctgattgtggttcctgagatctttctcccgatcgaggatgactgcggcgattacttagttatgcggaaaacctcttcctcgaactcggtaactacctatgagacgtgccagacctatgaaagacccattgcttttacaagtcggagcaaaaagctgtggattcaattcaaatcaaacgaaggcaatagcgcccgagggtttcaggttccttacgtcacttacgacgaagactatcaggagcttatagaggacattgttcgtgatggtcgcctgtatgcttccgaaaaccaccaggagattttgaaggataaaaaactgattaaggctctttttgacgtccttgcccacccccagaactatttcaaatatacagcacaggaatccagagagatgttcccgcggtcttttatacgattgctgaggtccaaagtgagcagatttttaaggccttacaaatag

SEQ ID NO: 134343 - DNA, 411 bp, synthetic construct
  misc_feature 1..411: note = Description of Artificial Sequence: Synthetic coding sequence
  source 1..411: mol_type = other DNA
atggtcctcctggaatccgagcagtttctcacagagttaacaagactctttcaaaaatgccgcacgagtggctcagtgtatattaccctcaagaaatacgacggacgaaccaaaccaatacctaagaagggaactgtggaaggattcgagcctgccgataacaaatgcctgctgcgcgctacagatggcaaaaaaaaaatctccacagtagtgagttcaaaggaggtaaataaattccagatggcttattccaacctgctgagagctaacatggatggcttgaagaagagggacaaaaagaacaagacgaagaagaccaaggcggctgcagctgccgcggcagcggctcctgccgccgcagccaccgcgcctacaacagccgctactaccgcggccaccgctgcccagtag

SEQ ID NO: 134344 - DNA, 333 bp, synthetic construct
  misc_feature 1..333: note = Description of Artificial Sequence: Synthetic coding sequence
  source 1..333: mol_type = other DNA
atggcatgtgcggctgccaggagtccagcagaccaggatagattcatctgcatttaccctgcttatctgaataacaaaaaaacaatcgccgaaggtagacgcatccccattagtaaggccgtggaaaaccccactgcgacggaaattcaggacgtctgttccgcggtaggcctgaatgttttcctcgaaaaaaacaaaatgtattctagagagtggaatagggacgttcagtaccgtggtcgtgttcgagtacagctaaaacaagaggacgggagcctgtgcctggtgcagttcccatcacactacacactctctttaactagcggctcatag

SEQ ID NO: 134345 - DNA, 435 bp, synthetic construct
  misc_feature 1..435: note = Description of Artificial Sequence: Synthetic coding sequence
  source 1..435: mol_type = other DNA
atggcttgcgccgcagcacgcagtcccgcagaccaagacagattcatctgtatttaccctgcttacttgaataataaaaaaacaatcgctgagggccggagaatcccgatctcaaaagccgtggagaatccaacggcgaccgaaatacaagacgtgtgctctgccgtagggttaaatgtatttctggaaaaaaacaaaatgtattcacgcgagtggaatcgcgatgtgcaatatcgtgggagggtgcgcgtgcaacttaaacaggaggacgggtccctttgtctcgtgcagtttccaagcaggaaaagcgtgatgctctacgccgccgaaatgatacccaagctgaaaacacgcacacagaagactggcggcgccgatcagtcactgcagcagggtgaggggtctaagaaggggaaggggaagaagaagaaatag

SEQ ID NO: 134346 - DNA, 237 bp, synthetic construct
  misc_feature 1..237: note = Description of Artificial Sequence: Synthetic coding sequence
  source 1..237: mol_type = other DNA
atggcctgtgcagcagcacggtctccagcggatcaagatcggctgctgaagatcctgcaattacaacgctttaaaatgtatgtccagcaactcgatttgacctactttctgcggaaaataaaatgcaccctcgagaatggcatcgtaatgtctaacacggaagctgaaagcggctcatccagcaacaggaagatgggcgcatccgcattatattcatctcaccacgtgagccaatag

SEQ ID NO: 134347 - DNA, 639 bp, synthetic construct
  misc_feature 1..639: note = Description of Artificial Sequence: Synthetic coding sequence
  source 1..639: mol_type = other DNA
atggaagcaaagaccctggggacagtgacgccaagaaagccggtcctcagtgtcagcgcccgaaagattaaggataatgccgccgactggcataatctgatactcaaatgggagaccttaaacgacgctgggttcaccaccgccaacaatatcgccaacttgaaaatttcattactcaacaaagataaaatcgaactcgactcctcatcacctgcgtccaaggagaacgaagaaaaggtttgcctcgagtataatgaagaactggaaaagctgtgtgaggaactccaggctacactggacggtctcaccaaaatccaggtgaaaatggagaaactgagctccactaccaaaggtatttgtgaactcgaaaattaccattacggcgaggagagcaagcggcctcctcttttccacacatggccaacaacgcacttttacgaggtttctcacaagctgctcgagatgtatcgcaaggaactattgttgaaacgcactgtcgcaaaagaactggcacatacgggtgatcccgatctgactctgtcgtaccttagcatgtggctccatcaaccctatgttgagtcagattctcgattacacttggaatccatgcttttggagaccgggcacagggcgctgtag

SEQ ID NO: 134348 - DNA, 1368 bp, synthetic construct
  misc_feature 1..1368: note = Description of Artificial Sequence: Synthetic coding sequence
  source 1..1368: mol_type = other DNA
atgcctcccctgtcaatgaagcggtctgctatcgatctagaggaaatggccagcggtcttaacaaaagaaagatgatccaacacgctgtatttaaagagttggtcaagctggtggaccccggggttaaagcatggaccccaactaaaggtaagcagaacgtgattatgttcgtggggctgcagggatccgggaaaactacgacgtgctccaagctggcctattactatcagcgcaaaggatggaagacctgcttgatttgtgcagacacttttagggctggtgcctttgatcagctcaaacaaaatgccaccaaagctaggatccccttttatggttcatatacagagatggaccctgtcatcatcgctagcgagggcgtggagaagttcaagaatgagaacttcgagattatcatcgtggacaccagcgggcggcacaagcaggaggatagccttttcgaggaaatgctgcaagttgcaaatgcaatacagcctgacaatatagtctatgtgatggacgcaagtattggtcaggcctgtgaagcacaggctaaggcatttaaagacaaagtggacgtggcatctgtgatagttaccaaactggatggacacgcgaaaggaggcggggccctgagtgctgtggcagccaccaaatccccaataatattcataggtactggggagcacatcgacgacttcgagccgtttaagacccaaccattcattagtaaattgctgggtatgggcgatatagagggactgatcgataaggtgaatgaactgaagttagacgacaacgaggctctgatcgaaaaactaaagcatggacagttcacgctcagagacatgtatgaacagtttcagaacataatgaaaatgggtcccttttcccagattcttggcatgatccccggatttgggaccgatttcatgagtaaagggaatgaacaggaaagtatggctaggctcaaaaagctgatgactattatggacagcatgaatgaccaggagcttgactccaccgatggcgccaaagtgttctctaagcagccagggcggatccagcgggtggctagggggtccggcgtgagcacacgcgatgtgcaggagctgctgacacagtatactaagtttgcacaaatggtcaaaaaaatgggcggcatcaagggtctttttaagggcggtgacatgtccaagaatgttagtcaatcacagatggccaagctgaatcagcagatggctaaaatgatggatccccgtgtcttacaccatatgggaggaatggcagggctgcaatcgatgatgagacaatttcagcagggggctgccgggaacatgaaggggatgatgggttttaacaatatgtag

SEQ ID NO: 134349 - DNA, 135 bp, synthetic construct
  misc_feature 1..135: note = Description of Artificial Sequence: Synthetic coding sequence
  source 1..135: mol_type = other DNA
atggtactggccgacctggggcgcaaaatcaccagcgcgctgagaagtctgtcaaacgccacgattattaatgaagaagtgctgaacgcgatgctgaaggaggtgtgcactgctttgctggaagcagatgtgtag

SEQ ID NO: 134350 - DNA, 225 bp, synthetic construct
  misc_feature 1..225: note = Description of Artificial Sequence: Synthetic coding sequence
  source 1..225: mol_type = other DNA
atggttttggcagatcttggacgcaaaatcacatccgcactgagatcactctctaacgccacgatcattaacgaagaggtgctgaacgctatgctgaaggaagtatgcaccgctctgctagaggccgatgtgaatataaaattggttaagcagttaagagagaacgtaaaatctgcaattgacctggaagagatggccagcggcctgaacaagcggaagatgtag

SEQ ID NO: 134351 - DNA, 1515 bp, synthetic construct
  misc_feature 1..1515: note = Description of Artificial Sequence: Synthetic coding sequence
  source 1..1515: mol_type = other DNA
atggttctagctgatcttggcagaaagattacatccgcgctgcgctctctttcaaatgccacaattattaacgaggaagtcctgaatgccatgcttaaggaggtctgtaccgccctgttggaagccgacgtgaacataaaactggtcaaacagctgagggaaaacgtcaagtctgcaatcgacctggaagaaatggcctcggggctgaataaaaggaagatgattcagcacgctgtttttaaggaactggttaaactggtggatcctggggtcaaagcctggacaccaacaaagggaaagcagaacgttattatgttcgtgggactccagggatcaggcaagactactacttgttcaaagctagcctattattatcagcgaaagggctggaagacttgcctgatctgtgcagacacatttagagctggcgccttcgaccagttgaaacagaatgccaccaaagcgcgcatccctttttacggatcctatactgagatggaccccgttattatcgcctctgaaggagtggagaagtttaaaaacgaaaactttgagattatcattgtagacaccagcggcaggcataagcaagaggattcactgttcgaggagatgctgcaggtggctaatgctatacaacccgataatattgtttatgtcatggacgcctccattgggcaggcttgtgaagctcaggctaaagctttcaaagataaggtggatgtggccagcgtaattgtgaccaaactggatggccacgctaagggcggcggcgctcttagcgctgtggctgctaccaagtctcctataatctttatcggaaccggcgagcatattgacgattttgaaccattcaagacccaaccattcatcagcaagttgttgggaatgggcgatattgaagggctaattgataaggtgaacgagctgaagctggatgataacgaagcacttatcgagaaattaaaacacggccagtttacccttcgggatatgtacgaacaatttcagaatatcatgaaaatggggcctttctcccagatacttgggatgattcctggctttggaacagactttatgtcaaagggtaacgaacaggaatcaatggcaaggctgaaaaaattgatgactattatggatagcatgaatgaccaggagctggacagcacagacggggcgaaggtgttctcaaagcagccaggccggatccagcgggtggcacggggctcaggcgtctcaaccagggacgtgcaggaacttctaactcagtacacgaagtttgcccaaatggtgaagaagatgggcgggatcaagggactgtttaagggcggtgatatgtcaaaaaatgtaagccagagtcaaatggcgaaactgaatcagcagatggccaaaatgatggaccccagggttcttcatcacatgggaggcatggccgggctccagtccatgatgagacagttccagcaaggagcagctggaaacatgaaaggcatgatggggttcaataacatgtag

SEQ ID NO: 134352 - DNA, 1791 bp, synthetic construct
  misc_feature 1..1791: note = Description of Artificial Sequence: Synthetic coding sequence
  source 1..1791: mol_type = other DNA
atggcggccgaaaaacaagtgcccggaggaggcggcggaggtggttcaggaggcggaggaggaagcgggggaggcggaagtggcgggggacgtggcgccggaggtgaggaaaacaaggagaacgagaggcctagcgctggcagtaaagctaataaagagttcggcgattcactgagtttagaaattctacagataattaaggagtcgcaacagcagcatggcttgaggcatggagacttccagcgttacagaggatattgtagcagacggcagaggagactgcggaagaccttgaactttaagatgggaaaccgtcataagttcacaggaaaaaaagtgacagaagagctgttgaccgataaccgttatttgctgcttgtgctgatggacgctgagcgtgcctggtcatacgccatgcagttgaaacaagaagcaaatactgagccgcgaaagagattccatctgctgtcaagattacgtaaggcagtgaagcacgcggaagaattggaaaggttgtgtgagagtaacagggtggatgcaaaaacgaaattagaggctcaagcctataccgcctatctgtccggtatgcttcgttttgaacatcaggagtggaaagcagctatcgaagcgttcaataaatgtaaaacaatttatgagaaactggcgagcgcgttcaccgaggaacaggctgtcctgtacaaccagcgcgttgaagagatctcccctaacatacgatactgcgcctacaacatcggagagactcgtgccaagcaggcagccactatgagtgaagtggagtggcggggccggaccgtgcctgtcaaaatagataaagtgaggatatttctgctgggactggctgacaatgaggctgcaattgtgcaggccgagtccgaggagactaaagaacgactctttgaatcaatgttatccgagtgtcgagatgccattcaggtagtcagagaagaactgaaaccagaccagaaacagcgtgactatatacttgagggtgagcctgggaaggttagcaacttgcaatatctgcatagttatctgacttatatcaaactatcgactgcaataaaaagaaacgagaacatggccaagggattgcaacgggccctgctgcagcagcagcccgaggatgattctaagcgcagtcctagacctcaggacctaatccggctatatgacatcatcctacaaaaccttgtcgaactgctgcaattgcccggcctggaggaggacaaggcattccagaaggagatcggcttgaagaccctggtcttcaaggcttataggtgcttcttcattgcacagtcctatgtgctcgtgaagaaatggtccgaggctctggtcctttacgatagagttctcaaatacgctaatgaagtgaattctgatgccggtgcatttaaaaatagcttgaaggatctgcccgatgtccaagagctcataactcaagtacgctccgaaaaatgcagccttcaggccgccgccatcctggatgccaacgatgcccaccagactgaaacaagctccagccaggttaaggacaataaacctctggtcgaaagatttgaaacgttttgtctggatccatctttggtgaccaagcaagccaacctagtgcattttccacccggtttccagcctatcccttgcaagccgctcttcttcgacctcgcgctgaatcacgttgccttccctcctcttgaggacaagctagagcagaaaactaaatccggattgaccggttacataaagggaatctttgggttccgcagttag

SEQ ID NO: 134353 - DNA, 1884 bp, synthetic construct
  misc_feature 1..1884: note = Description of Artificial Sequence: Synthetic coding sequence
  source 1..1884: mol_type = other DNA
atggccgccgagaaacaggtccctggtggtggcgggggtggcggttccggtgggggtgggggcagcggcggtggcggttccggcggcggtaggggcgctggcggggaggaaaataaggagaatgagcgtcccagtgcaggatccaaggccaacaaagagtttggcgactctctgtccctggagattctgcagatcatcaaggagagccagcagcagcatggtctgaggcatggagacttccagcgctacagaggatattgcagccgtagacagcgccgcctccgaaaaaccctgaactttaagatgggcaacagacataaattcacaggaaagaaggtgacagaagagctgctgactgataatcgatacttgctgctggttctgatggatgcggaaagggcttggtcttacgccatgcagctgaaacaggaagcaaataccgaacctagaaagcgtttccacttgctatcgcgcttgcggaaggctgtcaagcatgcagaggagttggagcggctctgtgaaagcaacagggtcgacgctaaaaccaagttggaagctcaagcttatacagcctacctctcagggatgctccgctttgagcatcaagaatggaaggcggctattgaggcgttcaacaagtgcaagaccatatacgaaaagcttgcctcagctttcacagaggagcaggctgtgctgtacaatcaaagggtggaggagatttccccaaacattcggtattgtgcttataacattggagaccagtcagcaatcaacgagctgatgcaaatgcggctcaggtcgggaggtactgagggcctgctggccgagaaacttgaagccctgattacacaaacgcgcgccaagcaagctgccacaatgagcgaagttgaatggcgcggacggacagtacctgtgaagattgacaaggtgcggatcttcctcctgggtctggctgacaacgaagcagccattgttcaggcggaatcagaggaaacaaaggagcggttatttgaatctatgctttccgagtgccgagacgccatacaggtggtgagagaggagcttaagcccgaccagaagcagcgagattacatcctcgagggcgagccgggaaaagtgtccaatctgcagtatttacatagttacctcacctatatcaagctgtctacggcaatcaagagaaacgaaaatatggcaaagggtctgcagagggctttactccagcagcaacctgaggacgacagcaaacgaagtcccaggccccaggacctgattagactgtatgacataatcctgcagaacttggtggagctcctccagttgcctggcctagaagaggacaaagccttccaaaaggagattgggctgaagactctggtgttcaaggcgtatcgctgcttctttattgcccagagctatgtgttagttaagaaatggtccgaggcccttgtgctatatgacagggtgctgaagtacgctaacgaggtgaattctgatgcaggggcgttcaagaatagccttaaagacttacccgacgtgcaggagcttattactcaggtgcgtagcgagaagtgttctctccaagctgcagcaattctcgacgccaacgacgcccatcagaccgagacaagttcgtctcaagtgaaagataacaagccattagtcgaacgcttcgaaactttctgtctggatccttccctcgtaacaaaacaagctaatttggtccactttcctccagggttccaaccaattccatgcaaacctctgtttttcgatctcgctctgaatcacgtggcatttccccctctggaagacaagctggaacagaaaacaaaatcggggttgaccggctacatcaagggaatcttcggatttcgctcatag

SEQ ID NO: 134354 - DNA, 1581 bp, synthetic construct
  misc_feature 1..1581: note = Description of Artificial Sequence: Synthetic coding sequence
  source 1..1581: mol_type = other DNA
atgggcaaccgacataagtttacaggaaagaaagttaccgaggagctcctgacagataatcgctacctgctgttggttctgatggatgccgagagagcatggagctacgcaatgcagctgaaacaggaagctaacaccgagcccagaaaacggtttcatctgctctcccggttaaggaaggctgtcaagcatgccgaggaactggaacgtttatgcgaatctaatcgagtggatgcgaagactaagttggaggcacaggcctacacagcctatctgagtggaatgctgaggtttgagcaccaagaatggaaagcagctattgaagcatttaacaaatgcaaaacgatttacgaaaagctggctagcgcattcacagaggagcaggctgtgctgtataaccagagagttgaggaaataagccccaacatccgttattgtgcctacaacattggggatcaaagcgcaataaatgaactgatgcagatgcgtctacgatctggcggcaccgaggggctgttagccgagaagttagaagcattaatcacacagacacgggctaaacaggccgcaactatgtctgaagtggagtggcgcggcagaacagttcccgtcaaaatcgacaaggtgaggatatttctgctcggactggctgacaatgaggcagcaattgtccaggcagaatccgaagaaaccaaggaaaggttgttcgagtccatgttgagtgaatgccgcgatgccatacaggttgttagagaggaattgaaacccgatcagaaacagcgggattacatcctcgagggtgagccaggcaaagtaagtaatttacagtacctacactcatatttgacctatataaagttgagcactgcgataaaacggaatgaaaatatggcaaagggcctgcaaagggccttgcttcaacagcagcccgaagatgacagtaagcggtcaccccgccctcaggacttgatcagactttacgacatcattttacagaatctcgtcgagctgctgcaactccctggtctggaggaggacaaggccttccaaaaggagatcggccttaaaactttggtgttcaaggcctacaggtgcttcttcatcgctcagagttacgtacttgtcaagaaatggagcgaggccctggtgctttacgatcgtgtgcttaagtacgctaacgaagttaactccgacgctggcgctttcaagaattctctgaaagacttgccagacgttcaggaactgatcacccaggttcggtcagagaaatgttcattacaagccgccgctatcctcgacgctaatgacgcccaccagacggagacctcctcctcacaagtgaaagacaacaaacccctggttgagcgcttcgagaccttttgtcttgacccctctctcgtcaccaagcaggcgaacctggtgcactttccgcccggatttcagcctatcccatgtaaaccactgttctttgacctcgctcttaatcacgtcgcctttccccccctagaagacaagctggagcagaagactaagagcggactaaccggctacattaaggggatttttggctttcgcagctag

SEQ ID NO: 134355 - DNA, 984 bp, synthetic construct
  misc_feature 1..984: note = Description of Artificial Sequence: Synthetic coding sequence
  source 1..984: mol_type = other DNA
atgcagatgcggctgcgcagcggtgggactgaaggactgctggctgaaaagcttgaagcccttatcacacaaacaagagccaagcaagctgcgacgatgtctgaggtggagtggcgcggccgtacagtacctgttaagatcgataaggttcggatctttcttctaggactcgcagacaatgaggcggctatagtgcaggccgagtccgaagagacaaaggagcgcctcttcgagagtatgttgtctgaatgtagggacgctattcaagttgtccgagaagagctaaaacccgaccagaaacaacgagactatatcctcgagggagagcccgggaaagtctcaaatctacagtacctgcactcttacttaacctacatcaaattgtccaccgccatcaagcggaacgaaaatatggcgaaggggctccaacgggcgctgttacagcagcaacccgaggatgattccaaaagatcaccaagaccacaggacctcatcagactgtacgacatcatacttcagaaccttgttgagctgctgcaacttcctggtctcgaggaggacaaggcatttcagaaggagatcggattgaagacattggtgttcaaagcctatcgctgttttttcattgctcagagctatgtgctggtcaagaaatggtccgaagctctggtgctgtacgatcgggtccttaaatacgccaacgaggtgaactcggatgccggagcctttaaaaattcgctgaaagacctgccagacgtgcaagagctgataactcaggtgagatcagaaaaatgttctcttcaggcggccgcaattctggatgcaaatgacgcccatcagacagaaacaagctctagccaggtcaaggacaacaaacctttagtcgagaggttcgagtctactccaggcacagacggagccctgaagcgatttgtgatgctgctgcaatatcacggatttgaaatgaacagcagcctcctgtag

SEQ ID NO: 134356 - DNA, 1770 bp, synthetic construct
  misc_feature 1..1770: note = Description of Artificial Sequence: Synthetic coding sequence
  source 1..1770: mol_type = other DNA
atggctgcggagaaacaggtgcccggaggaggcggcggcggcggctccggcggcggcggtgggtctggaggaggaggatccggtggaggaaggggggctggaggcgaggagaataaagagaacgaaaggccttctgctgggagtaaagccaacaaggagtttggagactcactttcactcgagatcctccagatcattaaggagagtcagcagcaacatgggctgaggcatggggattttcagcgctacagatacctgctcctggtcctgatggacgctgagcgtgcctggtcctacgctatgcagctgaagcaggaagccaacaccgaaccgagaaagagattccacctcttgtcacgactccgaaaagctgtgaagcatgcagaagagctcgaacgactgtgtgagtcgaacagagtcgacgctaagacaaagcttgaagcgcaagcttatactgcatacctttccggaatgttgcggttcgaacatcaggaatggaaggctgctatcgaggcctttaacaaatgtaaaaccatttacgaaaaacttgcttccgccttcaccgaagagcaggccgtgctttataaccagagagtcgaggagataagccccaacatacggtactgtgcttacaatatcggtgatcagtccgccattaatgagctcatgcaaatgcggcttcgctccggcggcactgaaggattgctcgccgagaaactcgaggcactgattactcagactcgcgccaaacaggctgctactatgtctgaagtggagtggcgaggaaggacggttcctgttaaaatcgataaggtgcgaatcttcctcctgggtctggctgataacgaggccgcaatcgtgcaggccgagtcagaagaaactaaggaacggttgtttgaatccatgctctccgagtgcagagacgcaatccaggtggtacgggaggagcttaagcctgatcagaaacagcgcgactatatcctggagggggaaccaggcaaggtttctaatctccagtacttgcattcttatttgacatacataaagctcagcaccgccatcaaacgaaacgagaacatggcaaaaggtctccaacgtgccctcctgcagcagcagcccgaggatgacagcaaacggtctccacgaccccaggacttaatcagattgtatgacataatccttcaaaacctggtagaactgctccagctgcctgggctggaagaggacaaagccttccagaaggaaatcggactcaagaccttggtttttaaagcatatcggtgcttcttcattgctcagtcttacgttttggtgaaaaagtggtctgaggccctcgtattatacgaccgagttctgaaatatgccaacgaggtgaattccgacgctggagcttttaagaatagtctaaaagacctcccagatgtacaggagctcattacccaggtgcgaagtgaaaaatgtagcttacaagcagctgcgattctagacgctaatgacgcacatcagaccgagacaagctcgagccaggtcaaggacaataaacctttggtagaaagattcgagaccttctgcctggacccttccctggtgactaaacaggccaatttggtacactttccccccggctttcagcctataccgtgcaaaccactcttcttcgacctggcattgaaccatgttgcctttccccccctggaggacaaactggagcagaagaccaagtccggcctcaccggctatatcaaaggcatctttgggtttcgctcctag

SEQ ID NO: 134357 - DNA, 1110 bp, synthetic construct
  misc_feature 1..1110: note = Description of Artificial Sequence: Synthetic coding sequence
  source 1..1110: mol_type = other DNA
atggccgctgagaagcaggtgcccggtgggggtgggggcggcggctctgggggcggaggggggagcggcggtgggggctcaggaggtggcagaggagccggtggcgaggaaaataaagagaacgagcggccatccgccgggtcaaaagctaacaaggagttcggtgacagcctgtcactcgaaatcctgcagatcatcaaggagagtcaacagcagcacggactgagacacggcgactttcagcggtaccgaggttactgttcaaggcgacagcgccgtctgcgtaaaacactgaacttcaagatgggaaatcgacacaaattcactggcaagaaggtgaccgaggaattactaactgataatcgctatctgctgctagtcctaatggatgccgaaagggcatggagctacgctatgcagctaaaacaggaggcaaacaccgaaccacgcaagcgctttcatctcctctcgagactgagaaaggccgtcaaacacgctgaggagctggaaaggctgtgcgagtccaatagggtggatgccaaaaccaaactggaagcccaggcatacacagcatacctgtccggcatgcttcggtttgagcatcaggagtggaaggccgcaattgaggcgttcaataagtgtaagacaatctacgaaaagcttgcatctgcatttacagaagaacaagcagtgctctacaatcagagggtcgaggaaatttcccctaatatcaggtattgtgcgtataacataggcgatcagagtgcaattaatgaactcatgcagatgcgtttgaggagcggagggacagaagggctgttggctgagaagcttgaagccctgatcacacagactcgggccaaacaagctgctactatgtccgaggttgagtggcgaggcagaactgtcccagtcaagatagataaagtccgcatctttctgttagggctggccgacaatgaagcagctattgttcaggccgagagcgaggaaacaaaggaaaggcttttcgaatccatgttaagtgagtgtcgggatgcgatccaggtcgtgcgcgaggaactgaaacccgatcaaagggatctgctgttgccttcacaagggcagtag

SEQ ID NO: 134358 - DNA, 867 bp, synthetic construct
  misc_feature 1..867: note = Description of Artificial Sequence: Synthetic coding sequence
  source 1..867: mol_type = other DNA
atgctttccgagtgcagggacgccattcaggtagtccgggaggagttgaaacccgatcaaaagcagcgagactatatactcgagggggagcccggcaaagtgtctaacctgcagtatctgcactcctacctgacctacatcaaactctccacagccattaaacgcaacgaaaacatggctaagggactgcagcgggcgttgctgcagcaacagccagaagatgactccaaacgttcaccgaggccacaggatctgattagattgtacgatattattttgcaaaacctagtggagctgctgcagctgcctggattagaagaggataaggccttccagaaggaaatagggcttaaaacgctcgtcttcaaagcttatcggtgcttcttcatcgctcaatcttacgtacttgtcaagaaatggtccgaagccctcgtcctgtacgatcgagtgctcaagtatgctaatgaggtgaattcagacgctggagctttcaagaacagcctgaaggatctacctgatgtgcaggagctaattacccaagtaaggtccgagaagtgttctctccaggcagccgctatccttgacgctaatgacgcccatcagacagagacttcctcgagtcaggtcaaggataacaaaccgctggtggaacgcttcgaaactttctgcctagacccctctctggtgaccaaacaggctaatctcgtccatttccctccaggctttcagccaatcccatgtaagcctctcttcttcgacctggctcttaaccatgtggcttttccacccctggaggataaactggagcagaagacgaagtcaggactgacggggtacataaaaggcatttttggctttcgctcttag

SEQ ID NO: 134359 - DNA, 2016 bp, synthetic construct
  misc_feature 1..2016: note = Description of Artificial Sequence: Synthetic coding sequence
  source 1..2016: mol_type = other DNA
atggccagcggaggctctggcggcgtgagcgttccagcattgtggagcgaggttaatagatacggccaaaacggtgatttcacacgggcgctcaagaccgtgaacaagatcctacagatcaataaagacgatgtgacagccctgcattgcaaggttgtttgcctgatccagaacgggagcttcaaagaggccctgaatgtgatcaacacccacaccaaggtcctggctaataacagtttatcattcgagaaggcgtattgtgagtaccgactgaatagaattgagaacgcactgaaaactatcgagtccgccaaccagcagactgacaaacttaaagaactgtacggccaagtgctctacaggctggaacgatatgatgagtgtctggctgtataccgcgatctcgtgcgcaatagccaagacgattatgacgaagagaggaagacgaatttgtctgcggtggtcgcggctcagagcaattgggaaaaagtggtccctgaaaatctgggcttacaggagggtacccatgagttgtgctataacacggcatgtgccctgatagggcaagggcaacttaaccaggccatgaagatactccagaaggcagaagatctgtgtcgcaggtctctgagcgaggacacagacggaactgaggaggatccacaggcagaacttgccattattcacggccagatggcctacattctccagctgcaaggcaggacagaagaggcactgcagttatataatcagatcattaagctgaaacctaccgacgttggactgctcgccgttatcgctaataatataatcaccattaacaaggaccagaacgtgttcgatagcaagaagaaagtaaagcttaccaatgctgaaggggtggaattcaaactgtctaagaagcagttgcaggccatcgaattcaacaaggccttgctggcaatgtacaccaaccaggcagaacaatgcagaaagatttccgcatctctgcaatctcagagccctgagcacttgcttccagttttgatccaggccgcccagttatgccgggaaaaacagcatactaaggctatcgagctcctacaggaattttccgaccagcatcctgagaatgccgctgagataaaactgaccatggcccagctgaaaattagccaagggaatatctctaaagcgtgtctcatcctgaggtctatcgaggaactgaagcataagccagggatggttagcgctctggtcaccatgtatagtcacgaggaggatattgatagcgcaattgaggtattcacgcaggccatccagtggtaccagaaccatcagcctaagagtcctgcgcacctgagcctgattcgtgaagccgccaacttcaagcttaaatacggacgaaaaaaagaagctatatctgacctgcagcaactctggaaacagaatcctaaagacattcacactctcgcgcaactaatttccgcctattcattggtggatccggaaaaggccaaagctctgagcaaacacttgccctcatctgatagtatgtccctgaaagttgacgtagaggccctcgagaactctgctggcgctacctacatccgaaaaaagggcggtaaggttactggcgattctcagccaaaggaacagggacagggggacctaaagaagaaaaagaagaaaaagaaaggcaagctgcccaagaattacgaccccaaagtgacccccgatcccgaacgctggctgccaatgcgtgagaggtcttactacagagggagaaaaaaaggaaaaaagaaagaccagattggaaaaggaacgcagggcgctacagcgggcgcatcctccgaactggatgccagtaaaactgtgtcgagtccgcctacgtctcccagacctggtagcgcggcaaccgtgagcgccagtaccagtaacatcatcccaccacggcatcaaaagcccgcgggagcccccgccactaagaaaaaacagcagcagaaaaaaaagaagggcgggaaaggcggttggtag

SEQ ID NO: 134360 - DNA, 1878 bp, synthetic construct
  misc_feature 1..1878: note = Description of Artificial Sequence: Synthetic coding sequence
  source 1..1878: mol_type = other DNA
cccctcgtcagcagcaagatggcctccggcgggtcaggcggcgtgtctgtcccagcactatggtccgaggtgaataggtacggacaaaacggcgacttcacccgggcacttaagacagtgaacaaaatcctgcagatcaacaaggacgacgtgaccgccctgcattgtaaggttgtgtgcctaattcagaatgggagctttaaggaggctctcaacgtaatcaacacccataccaaggtgctcgctaataacagtctttctttcgaaaaggcgtattgcgaatacagactgaacagaatcgagaatgcactaaaaacgatagagtccgcgaatcagcaaacggataagcttaaggaactgtacgggcaggtgctgtaccggctggaaagatacgatgaatgtctcgcagtgtacagagatttggtgcgcaacagtcaagacgactacgacgaggagcggaaaaccaaccttagcgccgtagtggcggctcagagcaactgggagaaggtggtgccagaaaacctgggcctgcaggaaggtacccatgagttgtgttacaatacagcctgtgcacttatcggccaggggcagctgaatcaagctatgaaaatcctgcagaaggctgaggacctgtgcagaagatcactgtcagaagataccgaccaaaatgttttcgattccaagaagaaggtgaagcttaccaatgccgaaggagtagaatttaaactgagtaagaaacaactccaagcaattgagtttaacaaagctctgctggcaatgtacactaatcaagcggagcaatgtcggaagataagcgcaagcctgcagtcccagtcccccgagcatctcttgccagtcctgatccaggcggctcagctctgcagggaaaaacaacacaccaaggcgatagaactgctgcaggaattctcggatcagcaccctgagaacgctgccgaaattaagttgaccatggcccagctgaaaatcagtcagggcaatatctccaaagcttgccttatcttacggtccattgaagaactgaagcataaacccggtatggtgagtgcccttgtaactatgtattcccacgaggaggacatagattccgctatcgaggtgttcactcaagctatccagtggtaccagaatcaccaacccaagtcgcccgctcatctgtccctaatcagagaagccgctaatttcaagctcaagtacggtagaaaaaaagaagccatctccgatctccagcaactgtggaagcagaatccaaaggacattcacacattggcgcagctgatatctgcttactcactggttgatcccgagaaagcaaaggctctgtctaaacacctcccctcctccgacagtatgtctctcaaagttgacgtggaggcgttggagaacagtgccggggcgacctacatacgcaaaaagggcgggaaggtaacgggtgacagtcagcctaaagagcagggccagggagacctcaagaaaaagaagaaaaagaagaaaggaaaactgccaaaaaactacgaccctaaagtgacgcctgatccagagagatggctgcctatgcgagagagatcctactatcgggggcggaagaaagggaaaaagaaggatcagataggaaagggcactcaaggggccacagctggtgcttcctctgagctagatgcctccaaaacagtaagtagcccacctacacaggatctagccgttcttcagcagtatttgcctctgcaagtgacctcctacccccaggacacgcgaaacttgcaggggctccaacagcagaagcggaactccaatcggaagcggcggaaagtcgaaaaggtggcaggcgacgagaatatattagtagctgggtgcttctag

SEQ ID NO: 134361 - DNA, 1833 bp, synthetic construct
  misc_feature 1..1833: note = Description of Artificial Sequence: Synthetic coding sequence
  source 1..1833: mol_type = other DNA
atggccagcgggggttccggtggagtgtctgtgccggctctatggagcgaggtgaatcggtacggccagaacggggatttcactagagccttaaaaaccgttaataaaatcctgcagataaacaaggacgacgtgacagcactccattgtaaggtggtttgtctgattcagaatggatcttttaaggaagccctgaacgtgataaacacacatacgaaggtccttgctaataacagccttagctttgagaaggcttactgcgagtataggctgaacaggatcgaaaatgctctgaagaccattgaatcagcaaaccagcagactgacaagctgaaggaattgtatggtcaggttttgtatcgcctcgagcggtatgacgaatgtttagccgtgtaccgggaccttgtgcggaactcccaagatgactacgacgaagaacgcaaaaccaacctctctgcagtggttgccgcacaatccaactgggaaaaagtggtccctgaaaacctcggccttcaggagggtacgcacgagctgtgttacaacacagcttgcgctctcatcggtcaggggcagttaaatcaggcgatgaaaatcctccagaaggccgaggacttatgtcgccgctcgctctccgaagatacagaccagaacgtgtttgattccaaaaaaaaagtgaagttaactaatgcagaaggcgtcgagttcaagctcagcaagaagcagctgcaggctatcgagtttaacaaggctctactcgctatgtatacaaatcaggccgaacagtgtcgtaagatttcagcttcgttacaatcccagtcgcctgagcatctgttgcccgtcctgattcaggccgcgcagctttgtagggagaagcagcatacgaaggcaattgagcttctccaagaattctctgaccagcaccctgaaaacgccgcggagataaagctgactatggcacagctcaagattagtcagggtaatatcagtaaagcatgtctaatattacggtctatcgaggaactcaagcacaaaccaggaatggtttcagccctggttaccatgtacagtcatgaggaagacattgacagcgctatcgaagtgtttacccaagctattcagtggtaccagaaccatcagcctaaaagcccagctcatctctccctgattcgtgaggctgctaactttaagttaaaatacggccgcaagaaagaggcgattagcgatctgcagcagctgtggaagcagaaccctaaggacattcataccttggctcaacttatatctgcttactccctggtggatcctgaaaaggctaaagcactcagcaaacacctgccttcaagtgactcaatgtccttgaaagtcgatgtggaagccttggaaaattccgcaggtgcgacatacatacgaaaaaaaggaggcaaggtcaccggggactctcagcccaaagagcaggggcagggagatcttaaaaagaaaaaaaagaagaagaaaggaaagctgccaaaaaactacgatcctaaggtcacacctgatcccgaacggtggctgcctatgagggaaagaagttattaccgagggagaaagaaggggaagaagaaggaccagataggaaaggggacccagggagctaccgccggcgcatcttctgaattggacgcatcaaaaaccgtgtcctcccctccaacgtccccaagaccaggttcagctgccacagtgagcgctagcactagcaatataataccccctcgtcatcagaaaccagcaggtgcgcctgccacaaagaaaaaacagcaacaaaagaagaagaaagggggtaaaggcgggtggtag

SEQ ID NO: 134362 - DNA, 1917 bp, synthetic construct
  misc_feature 1..1917: note = Description of Artificial Sequence: Synthetic coding sequence
  source 1..1917: mol_type = other DNA
atgctcgacttttttaccatcttcagcaaaggcggcctcgttctgtggtgcttccaaggcgtgtcagactcctgcaccggtcctgtcaacgccctaatccggtctgtgctgttgcaggagcggggcggcaacaacagctttactcatgaggccttaaccctcaagtataagctcgacaatcagtttgaactcgtgttcgtggtgggcttccagaagattctgacacttacttacgtcgacaaactgatcgacgacgtgcaccggctttttcgggacaagtaccgtaccgaaatccagcaacaatccgcactaagtctgcttaacggcaccttcgactttcagaacgacttcctcagactcttacgagaagctgaggagtcgagcaagatccgcgcccctaccaccatgaagaaattcgaggacagcgagaaggcaaaaaagccagtccggtcaatgatcgaaacccgaggagaaaagcccaaggagaaagcaaagaatagtaagaagaagggagccaagaaagaagggtcagacggaccgttggcaacttccaagcccgtgcccgccgaaaaaagcggcttgccagtggggcctgaaaatggggtcgagctgagtaaagaggagctgatccggcgaaagagagaggagttcattcagaaacatggtcggggaatggaaaaatccaataaatccactaagtctgacgccccaaaggaaaagggcaagaaagcaccacgtgtgtgggaattgggtggatgcgctaacaaggaggtgctggattactctacgccaaccactaatggcacacctgaagcagctctgagcgaggatattaatctgatacgcggtactgggtctggaggtcagctacaggatctggattgctctagtagcgatgatgaaggtgctgctcagaactcaacaaagccctccgcaactaaagggaccttaggcggtatgtttggcatgcttaagggcctggtggggtcgaagagcctctcccgggaggacatggagtcagtcctggacaagatgagggatcacttaatcgcaaaaaatgtcgccgccgatatcgctgtgcaactgtgtgagtccgtggctaataagctagaaggaaaagtcatgggaaccttctctaccgtgacaagcacagtgaaacaggctttgcaggagtcactcgtccaaattctgcagcctcagcgtcgggtagacatgttacgggacatcatggacgctcagcgacgccaaagaccatatgtagtaacattttgcggtgtcaatggagttggcaagtcaacaaacctagctaagatcagtttttggctgctggaaaacgggttcagtgtgctgatcgcagcttgcgataccttcagagccggtgccgtcgagcagctgaggacccacactcgtcggctcagtgctttgcacccgccagagaagcacggagggcgcacgatggtgcagctctttgagaaaggatatgggaaggatgcggccggtattgccatggaagccattgcctttgcccgcaatcaaggattcgacgtagtgttagtggatacagccggtaggatgcaggataatgccccactgatgacagcactcgctaagttgattaccgtgaacactccggacctggtattgtttgttggcgaggccctcgtgggcaacgaagccgtcgatcaattggttaaatttaaccgggccttggcagaccacagcatggcccaaacgccacggctgatcgacggtatagttcttactaaattcgacaccattgacgacaaggtgggcgcagctattagtatgacctacatcacctcaaaacccattgtcttcgtaggcaccggtcagacttattgcgacctgcggagccttaatgcgaaggcagtcgtggccgctctaatgaaggcctag

SEQ ID NO: 134363 - DNA, 552 bp, synthetic construct
  misc_feature 1..552: note = Description of Artificial Sequence: Synthetic coding sequence
  source 1..552: mol_type = other DNA
atgagactactgagcttcgttgtacttgctctattcgcagtgacacaggccgaggagggggcacggttgctggcctctaaaagcctcctgaatagatatgccgtggagggaagagatctgaccctgcaatataatatttacaacgtgggatcctccgcggccctggacgtggaactgtcggacgatagctttcctcccgaggatttcggcattgttagcggcatgctgaacgtcaaatgggataggatcgcgccagcttccaatgtttcccacaccgttgtgctcagacccctgaaggctggctattttaacttcacaagcgccactatcacatatttggcccaagaggacgggcctgtggtaatcgggagtacctccgctcccggtcaaggaggcattctggcacaaagggagttcgataggaggttttctcctcacttcctcgactgggctgcgtttggcgtgatgacactgcctagtatagggatccctctcctcctttggtattcaagcaaacgaaagtacgacacaccaaaaaccaagaaaaattag

SEQ ID NO: 134364 - DNA, 552 bp, synthetic construct
  misc_feature 1..552: note = Description of Artificial Sequence: Synthetic coding sequence
  source 1..552: mol_type = other DNA
atgcgactgttgtcttttgtggtccttgcactgtttgcagttactcaggctgaagaaggcgcaagactcctggcctccaaatcgctgctcaacagatacgccgtggagggccgcgacctgacccttcagtataacatttacaacgtggggtcatcagccgcactcgatgtagaactgagcgatgactcttttcctcccgaagacttcggaatcgttagtggaatgctcaacgtaaagtgggatcgaatagccccagctagtaatgtgtcacatactgtcgtacttcggccactgaaagccggatacttcaatttcacctctgccacaattacctacttggcccaagaggacgggcccgtggttataggttccacatctgctccaggccaaggaggcattctcgcacagagggagttcgatcgcagattttcaccacatttcctcgattgggctgcgttcggtgtgatgaccctaccaagtatcggaattccgctactgttgtggtatagttcaaaacggaagtacgatacccccaaaacaaagaagaactag

SEQ ID NO: 134365 - DNA, 258 bp, synthetic construct
  misc_feature 1..258: note = Description of Artificial Sequence: Synthetic coding sequence
  source 1..258: mol_type = other DNA
atgcgcctattatcattcgttgttctcgcactgtttgcagtcactcaggccgaggagggagctcggctccttgccagcaagtcacttctgaatcgatacgctgtagagggacgcgaccttacattacagtataacatctacaatgtaggctctagtgctgctcttgacgtcgagctttccgatgattcattcccccccgaggacttcggaattgtcagcggcatgctgaatgttaagtgggacagaatcgccccctag

SEQ ID NO: 134366 - DNA, 444 bp, synthetic construct
  misc_feature 1..444: note = Description of Artificial Sequence: Synthetic coding sequence
  source 1..444: mol_type = other DNA
atgcgattgttgtcttttgtagttctggcactgttcgccgtgacacaagctgaggagggagctcgactcttggcaagtaaatctctgctcaaccgatatgccgttgaagggagagacctgacgctgcaatataatatttacaatgtggggtcaagtgcagctctggatgtggaattaagcgatgattcattcccaccggaggatttcggcattgtgtctggcatgttaaatgtgaagtgggataggatcgcgcctgcaagtaacgtgtcccatacggtggttttacgcccattaaaagcaggttatttcaacttcaccagtgccaccatcacgtaccttgctcaggaagacggcccggtcgtcatcgggtctacatctgcgccgggtcagggtggcattctcgcccagagagaatttgatcgtagattttcaccccatttttag

SEQ ID NO: 134367 - DNA, 522 bp, synthetic construct
  misc_feature 1..522: note = Description of Artificial Sequence: Synthetic coding sequence
  source 1..522: mol_type = other DNA
atggcggcaatggccagtcttggggctctggctttgctgctcctcagcagcctgagtcgctgctccgccgaggcctgcttggagccccagatcaccccgtcctattatactacctccgacgctgttatttctacagagactgtgttcatcgtcgaaatcagtctgacttgtaagaatcgggtgcagaatatggcgctctacgcagacgtggggggcaaacagttcccagtcacgagaggccaagatgtgggaaggtaccaggtctcctggtcactggatcataaatccgcacatgccggaacatacgaggtgcgatttttcgacgaggagagctattctctgctccgaaaggctcagcgaaacaatgaagatataagtatcattcccccactgtttacagtcagcgtggaccaccgggggacctggaatggcccctgggtgtctacagaggttctggccgctgcgatcggactggtgatatattatctagccttctccgcgaaatctcatattcaggcctag

SEQ ID NO: 134368 - DNA, 447 bp, synthetic construct
  misc_feature 1..447: note = Description of Artificial Sequence: Synthetic coding sequence
  source 1..447: mol_type = other DNA
atggcagcaatggcctcactgggggccctggccctcttgctactaagttcattatcccggtgtagtgctgaggcatgcctggaaccacagataacgccatcgtactatactacctctgacgctgttattagcaccgagaccgtttttatcgtagagatttctctgacctgtaagaaccgcgttcaagtatcctggagcctggaccacaagagcgctcacgccggtacatacgaagtaaggttctttgatgaggaatcttatagcctgttaaggaaagctcagcggaacaatgaggatatttctataatcccacccctgtttaccgtgtccgttgatcaccggggcacttggaacggcccttgggtttctaccgaagtgcttgccgccgcaatagggcttgtcatatactacctagctttcagtgccaagtctcatatccaagcctag

SEQ ID NO: 134369 - DNA, 522 bp, synthetic construct
  misc_feature 1..522: note = Description of Artificial Sequence: Synthetic coding sequence
  source 1..522: mol_type = other DNA
atggccgcaatggccagcctcggggctctcgctctactattactcagcagcctcagccgctgcagcgctgaggcctgcttagaaccgcagatcactcctagttactatactactagcgacgccgtgattagcaccgagaccgtgttcatagtcgaaatctccttaacctgcaagaatagagttcagaacatggcactttacgccgatgtcggcggcaaacagttcccagtgactcggggacaagatgtcggtcggtatcaggtgtcatggagcctggatcacaagagcgctcacgccggaacttatgaggtgaggttttttgacgaagagagctactcccttctgcgtaaggcccaacgcaataacgaagacatttctatcattcccccattgttcactgtgtcagtcgaccacagagggacctggaacggaccttgggtgtccactgaagtgctggccgccgccatcgggctcgttatttactatctggcgtttagcgcaaagtcccacattcaggcttag

SEQ ID NO: 134370 - DNA, 522 bp, synthetic construct
  misc_feature 1..522: note = Description of Artificial Sequence: Synthetic coding sequence
  source 1..522: mol_type = other DNA
atggcggccatggcatctctgggtgccctcgccctgctgctgctctctagcctatccaggtgttcggccgaagcctgtctggaaccccagataactccatcctattacaccacttcagacgccgttattagcacagagacagtttttattgtggagattagtcttacatgcaagaaccgagttcaaaacatggctctgtacgcggatgtgggtggcaaacagttcccagttacgcggggacaggacgtcggcaggtaccaggtttcctggagcctggatcataaaagcgcccatgctggcacctacgaagtcaggtttttcgacgaggaatcctacagccttctgagaaaggcacagaggaacaacgaagacatcagcatcattccaccactgtttacagtttctgttgaccacagaggtacctggaacggcccatgggtgagcactgaggtgttggccgccgcaatcggactcgtgatctactacctcgcatttagcgctaagtctcacatccaggcctag

SEQ ID NO: 134371 - DNA, 363 bp, synthetic construct
  misc_feature 1..363: note = Description of Artificial Sequence: Synthetic coding sequence
  source 1..363: mol_type = other DNA
taggtggggtctgggtgccgtagcgcagcagtcagcgcactggtcgtgagggtggcaccaccatgccccctctgtccccactccgcccagcatcccacacaggtcagctggtctctggatcacaaaagtgctcatgcgggtacgtacgaggtccggttttttgacgaagaatcatacagtctcttgaggaaggcccagcgcaacaatgaggacatctcaattattccccccctctttactgtctccgtggatcatcgcggcacttggaatggaccgtgggtatcgacagaggtgctcgctgcggctattggtctggtgatttactacctcgccttctcagcaaagtctcacattcaggcatag

SEQ ID NO: 134372 - DNA, 2544 bp, synthetic construct
  misc_feature 1..2544: note = Description of Artificial Sequence: Synthetic coding sequence
  source 1..2544: mol_type = other DNA
atgagcctgtgggggttagtttccaaaatgccccccgagaaagtacagagactgtacgtggatttccctcagcatctgagacaccttctaggcgactggcttgagagccagccgtgggaattcctagtgggcagtgatgccttttgttgcaatctcgccagcgccctgctcagcgacacggtccagcacttacaagccagtgttggcgagcagggagagggctctaccatcttacaacacatctccacactggagagtatataccagcgcgatcctctgaagctcgtggctacattcagacagatactacaaggagaaaaaaaggccgttatggagcagtttagacatttacctatgcccttccactggaagcaagaagagcttaagttcaagaccgggctgagaagattgcagcaccgcgtgggggagattcacctcctgagagaggcactccaaaaaggagccgaggctggccaggtcagcctgcacagcctgatagaaacacctgccaacggcaccggcccaagcgaggcgctggctatgcttttacaagaaaccactggcgaactggaagccgccaaggcactggtactgaagaggatacagatttggaaaaggcagcagcagctggctggtaatggagcccctttcgaggagagcctggcccccctgcaggagaggtgtgagagtctggtggatatctactcgcaacttcaacaggaggtgggcgctgccggtggcgaactggaacctaagacaagggctagcttaacagggcgactggatgaagtactgagaaccctggtgacttcatgttttctggtggaaaagcagccccctcaagtcctgaagacacagaccaaattccaggccggagtaaggtttcttctggggctccgttttctcggcgccccagccaaaccccccttggtgcgggctgatatggtaaccgagaagcaagcccgcgaactttccgtaccacaggggccaggagccggtgcagagtccacaggcgaaatcatcaataatacagtgcccctggagaacagtatccctgggaactgttgttccgccctctttaagaacttactgctcaaaaagatcaaaagatgcgaacggaaaggcaccgaatctgtgaccgaagagaagtgtgcagtcctgttcagcgcgtcattcacgttgggacctgggaagctgccaattcaactccaggccctgtctctcccactggtagtgattgtgcacggtaaccaggacaataatgcaaaggcgacaatactgtgggataatgccttttccgagatggaccgtgttccctttgtggtggcagagcgcgtcccgtgggagaagatgtgcgagaccctgaatctgaagtttatggccgaggttggaacaaacagaggcctgctgcccgagcatttcctgttcttggcccagaagatctttaatgacaactctttgtccatggaggcttttcagcaccgcagtgtctcgtggtcacaattcaataaagagattctgctgggtaggggattcacattctggcaatggtttgatggtgttctggatctcaccaaacgctgtctaaggtcttactggtctgaccgcctgattatcggattcatttctaagcaatatgtgacctctcttttactcaatgaaccagatggaactttcctgttgcgcttctctgacagcgagatcgggggtatcacaattgctcacgtgatcagggggcaagatggctcccctcagatcgaaaacattcagccattttccgctaaagatctgtcaataagatcgttgggcgaccgcataagagacctggctcagctgaagaacctgtaccccaaaaaacctaaagacgaggcctttaggtcacattataaacccgagcagatgggaaaagacggtcgcggctacgtgccggccacgatcaagatgacagtggagagggaccaaccgctaccaaccccggaactacagatgcccacaatggtccctagttacgacctgggaatggctccagacagctccatgtcaatgcaactgggacccgatatggtcccacaggtgtatcccccccactcgcattcgattccaccttatcagggactcagtcctgaagagagcgttaatgtgctctccgcctttcaggagccccaccttcaaatgcctccgtcacttgggcagatgtcacttcctttcgatcaaccccatccacaggggctgctgccttgccaaccccaagagcatgcagtttcatcccctgaccccttgctatgcagtgatgtcacgatggtagaagattcatgtcttagtcagcctgtcaccgcctttccccagggtacgtggatcggagaggatattttccctccgctgctgcccccaaccgaacaggacctcacgaaattgctactggaaggccagggagagagcggtggcggctccctgggcgctcaaccgctgctgcagcctagccattacgggcagtctgggatcagtatgtcccacatggacctcagagccaacccatcatggtag

SEQ ID NO: 134373 - DNA, 2544 bp, synthetic construct
  misc_feature 1..2544: note = Description of Artificial Sequence: Synthetic coding sequence
  source 1..2544: mol_type = other DNA
atgagcctgtggggactggtgtcgaaaatgccacctgaaaaggttcagcggctatatgttgactttccacagcaccttagacatttattgggcgattggctggagtcccagccgtgggagttcctcgtcggaagcgacgccttttgttgtaacctggcttccgcgctcctgagcgacaccgtgcagcacctgcaggcaagcgtaggagagcagggggagggtagtactatactgcagcatataagcaccttggaaagtatctaccagcgcgaccccttgaagctggtggcgacattccggcagattctgcaaggagagaagaaggcagttatggagcagttccgccatctgccgatgccatttcactggaagcaagaggagctgaagttcaagacaggtctccgccggctgcagcatagagtgggggagatacacctcctccgagaggcgttacaaaaaggcgccgaggcaggtcaggtctccttacacagtctgatcgagaccccggccaacggcaccggaccttcggaggccctggccatgctgttacaggaaaccacaggggagctagaagcagccaaagcactagtccttaaacgcatccagatctggaaacgacagcagcaattggcgggtaacggagctcctttcgaggaaagtctggcccccctgcaggagcgttgtgagtccctggtcgacatatacagccaactccagcaagaggttggagcggcagggggcgagcttgagcccaagacccgggcctccttaaccggccgcctggatgaagtcctgaggactctggtgacctcttgtttcctggtggagaagcagcccccgcaggtgctcaagacgcaaaccaaatttcaggccggtgtgcgatttctgctgggacttaggttcttaggggcacctgcaaagccccccttagtgagagccgacatggtaactgaaaaacaagcacgggaactctcagtgccccaaggccccggcgccggcgcagagtctactggggagataataaacaacactgtgcccctggaaaattccatccctggcaattgttgttctgccttatttaagaacttgctgctaaaaaagatcaaacgctgtgagagaaaaggaacggagtccgtgactgaggaaaaatgtgctgtacttttttctgcatcattcaccctgggccccggcaaactgccgatccagttgcaggccctgagtctgcccctggttgttattgtgcatggcaaccaggacaataatgccaaggcaactatactctgggataatgccttttccgaaatggatcgagtcccttttgtagttgctgaacgggtcccatgggaaaagatgtgtgagactctgaacctcaagtttatggccgaagtcggtacaaacagaggactgttgcccgagcactttttatttctggcgcagaaaatctttaatgacaatagcctgtctatggaggctttccagcacaggagcgtaagttggagccaatttaacaaggaaatcctcctcggtaggggattcacgttttggcagtggttcgacggcgttctcgatctgacaaagcgctgtctgcgctcctactggagcgatagactgattatcggcttcatttctaaacaatacgtgacatcattactgctaaacgagcccgatggtacattcctgcttcggtttagtgattcagagattggcggtataaccattgcccatgtaatcagggggcaggacggcagcccgcagattgaaaacattcagccatttagcgcaaaggacctgagcatacgaagcctgggtgacaggattcgcgacctcgcccagctcaagaatttataccctaaaaagccaaaagacgaggctttccgctcgcattacaaacctgaacaaatgggcaaagatggtaggggatacgtaccggccacaattaaaatgactgtggagcgggatcagcctctgccaaccccggaactgcagatgcctaccatggttcccagttacgaccttggcatggctcccgattcatctatgagtatgcagttggggcccgatatggtgccacaggtttatccgcctcactcacacagcatccccccttatcagggtctgtctccagaagagtctgtgaacgtgctgagtgcttttcaagagcctcatcttcagatgcccccgtctctgggtcaaatgagcctacccttcgaccagccacacccgcaagggctgttgccttgtcagcctcaagaacatgcggtcagtagccctgaccctcttctgtgcagtgatgtgacaatggtggaagactcatgcttatcacagcctgtgacagcatttccgcaagggacttggatcggagaagacatcttcccccctcttctcccccctactgagcaagatcttactaaattactgctcgagggacagggcgaatccggtggagggtcattgggtgcccagcctttgttgcagccctcacattacggacagtccgggatcagcatgtcacatatggatcttcgggcaaacccttcttggtag

SEQ ID NO: 134374 - DNA, 2214 bp, synthetic construct
  misc_feature 1..2214: note = Description of Artificial Sequence: Synthetic coding sequence
  source 1..2214: mol_type = other DNA
atggagcagttcaggcatctccctatgccctttcactggaagcaggaagagcttaagtttaaaacaggattaaggcgtctccagcatagggtaggcgaaattcatctcctccgggaggctttacagaagggagcggaggccggtcaggtgtcactccattccctgattgagactcctgccaatggaacaggccccagcgaggcattggcgatgttactacaggaaacaacaggcgaactcgaggccgcgaaagcattggtgctgaagcgcatccagatctggaaacgacaacagcagctcgctggcaatggcgctcccttcgaggagagcttggcccctctccaggagaggtgcgagagcctggtcgacatttatagccagttgcagcaggaggtgggagcagctggcggggagctggaaccaaaaacacgagccagtctgacaggaagactcgatgaagttcttagaactctcgtgacttcctgttttcttgttgagaagcagccaccacaggtacttaaaacccagacgaaattccaggcaggtgttagattcctcctaggcctcaggtttctcggggccccagccaagccacctctggtgcgtgctgatatggtgacagaaaaacaagccagagagctgagtgttccacagggaccaggcgctggcgcggaatcgacaggagagattatcaacaacaccgtacctcttgagaacagcatcccagggaactgctgctccgctttattcaagaatctgctgttaaagaaaatcaaacggtgtgaacggaaaggtacagagagcgtgaccgaggagaaatgtgcagttctgttttcggcaagctttacacttggtccaggaaagctgccaatccaactgcaagccctcagtcttcccctcgtcgtgattgtgcacgggaatcaggataacaatgctaaggccacaatactgtgggataacgctttcagtgagatggaccgggttccatttgtcgtggctgagagagtcccttgggaaaagatgtgtgagactcttaacctgaaatttatggccgaggtcggaacgaataggggcctcctgcctgaacatttcctcttcctggcccagaagatcttcaatgacaactccttgtccatggaggcctttcagcatcggagcgtctcatggtctcaatttaacaaggagatcctgcttggtcgcggattcacattctggcagtggtttgatggtgtacttgacctgacgaaaaggtgtctccgaagttattggtctgacaggctgattatcggttttatctcaaaacaatacgttacatcattattacttaacgagcctgacggtactttccttctacgcttcagtgactccgaaatcggggggataaccatcgcccacgtgatccgaggccaggacggtagcccccaaatcgagaatatccagcccttctctgcaaaggacctgtctatccggtcactaggcgataggatacgcgacttagctcagctgaaaaacctatatcctaaaaagcctaaggatgaggccttcagatctcactacaaaccagaacagatgggaaaggatggccgggggtacgtcccagccaccatcaagatgacagtggaacgggaccagcccctgcctaccccggagctacagatgccaaccatggtgccctcttatgacttgggtatggcccccgatagctccatgagcatgcagctgggcccagatatggtgccccaggtgtacccgccccattctcactcaatccccccgtaccagggactgtctcccgaagagtccgtgaatgtgttaagtgctttccaagaaccacatctgcagatgcctccaagtcttggacagatgtctctgcccttcgaccagccacaccctcaaggcctgcttccttgtcaacctcaggagcatgccgtgagcagccctgaccccctcctgtgttctgatgtgactatggtcgaggactcttgtcttagtcagccagtgacggccttcccccagggcacctggataggcgaagacatattcccccccctgctacccccgacggagcaggacttaaccaaattgctcttggaaggacagggcgaatcgggtgggggatctctgggagcacagccactgctacaaccttcacactatggacagtccggcatctcgatgagtcacatggacctacgggccaatcctagttggtag

SEQ ID NO: 134375 - DNA, 2214 bp, synthetic construct
  misc_feature 1..2214: note = Description of Artificial Sequence: Synthetic coding sequence
  source 1..2214: mol_type = other DNA
atggaacagtttaggcacctccctatgcctttccattggaagcaggaagagcttaaattcaagacagggcttcggcggctgcaacatcgagtaggagagatccacctgttgcgtgaagcacttcagaagggagcggaggccggccaggtgagcctgcacagtctgattgagacccctgcgaacggtacgggaccgagtgaagctctggcaatgctattgcaagaaacaacaggggagctggaggcagccaaagccttggtcctgaaaagaatccagatctggaagcggcaacagcagctggctggtaatggagccccatttgaggagagccttgcgccgctacaggaacggtgtgaatcgctggttgatatctattcccagctgcaacaggaagtcggggctgcaggaggagagctggaaccaaagaccagggcctcactcaccggccgcttggacgaagtgctgcggaccctggttacatcttgcttcctggtcgagaagcagccaccgcaagtgttaaaaacacaaaccaaattccaagccggcgtgagatttttgctgggattaagattcctgggagcccctgccaaaccccccctcgtgcgtgctgacatggtcacggaaaaacaggctcgggaactgtctgtaccccagggaccaggcgcgggagctgaaagcaccggcgagattatcaacaacacggtgcctctggaaaactctattccgggtaattgttgctcagccctttttaagaacctcctgctgaagaaaattaagcggtgcgagagaaaggggacagaaagtgtgacagaagagaagtgcgctgtgctgttctccgcttcttttaccttggggccgggcaaactgccaatacaattacaggcattaagcttaccactggtcgttattgtgcacggcaaccaggataacaatgctaaggccaccatcttgtgggacaacgcgttcagtgaaatggatagagtacccttcgtggtggcagagcgggtcccatgggagaagatgtgtgaaacactgaacctgaagtttatggcagaggtgggaaccaatagaggtcttcttcccgagcacttcctgtttctggcacagaaaatcttcaacgacaattcgctgagcatggaggcttttcagcatcggtccgtcagctggtcccagttcaacaaagagatcttattgggaagaggcttcaccttctggcagtggttcgatggagttctggatcttaccaagcgatgtttgcgaagttattggagcgacaggctgatcatcgggtttattagcaaacagtatgtgacttccctgctgctgaacgaacccgatggtacgttcttactaagattttccgactctgagattggcggtatcactatcgcccacgtcattcgggggcaggacgggagtcctcagatagagaatatacaaccgttttccgctaaagacctgagcattaggagtcttggtgatcgcataagagatctcgcacagctgaagaacctctatcccaaaaagcccaaggatgaagcctttagaagccactataagcccgaacagatgggtaaggacggccgggggtacgtccctgctactataaagatgacggttgagagggatcagcctctgccaactcctgaactccagatgccaactatggtccccagttacgacctcggaatggcccccgatagttccatgagcatgcagcttggcccagacatggtaccgcaggtataccccccccattcacacagcatccccccctaccagggcttgtctcctgaggaaagtgtgaatgtcctgtcagcttttcaggagccccatctccaaatgccccctagtttagggcagatgagtctgcccttcgatcagcctcaccctcagggcctcttaccatgtcagcctcaagagcatgccgtgagcagcccagatccactcctttgctccgacgtcaccatggttgaggactcatgcctgtctcagccagtgaccgcctttccccagggtacttggattggcgaagatatcttccccccgcttcttccacctacggaacaggatcttaccaaacttctgttagagggccagggagaatcaggagggggatccctgggagctcagccgctcctgcaaccttcacattacggccagagtggcatatccatgtcccacatggaccttagggccaatccaagctggtag

SEQ ID NO: 134376 - DNA, 2214 bp, synthetic construct
  misc_feature 1..2214: note = Description of Artificial Sequence: Synthetic coding sequence
  source 1..2214: mol_type = other DNA
atggagcagtttcgccacctcccaatgccctttcattggaagcaagaagagctgaagtttaagaccggtttaagaaggctacaacaccgtgtgggcgagatacacctccttcgagaagccttgcagaagggagccgaagcaggccaggtaagcctccactctctgatcgaaacccctgcaaacgggactggtccttcagaagccttggcaatgcttctgcaggaaaccacaggagaactggaagcagctaaggccttagtgctgaagcggattcaaatttggaagcgacagcagcagcttgccggtaatggtgccccgttcgaagaaagcctggcccccctccaagagcgctgtgaaagcttggtggacatttattcccaactacagcaggaagtcggggccgcaggaggcgagctcgagcctaagacgcgggcctctctcactggcaggttggatgaagtgctgaggaccctggtgacatcctgtttcttggtggagaagcagccccctcaggttttgaagactcagacaaagtttcaggccggtgtgcggtttttgctgggcctgaggttcctcggcgctccagctaaacctcctctcgtgcgggctgacatggttacagaaaagcaggctagggagttatccgtgccacaggggccaggcgccggtgctgagtctaccggggagatcatcaacaacaccgtgccactggaaaattcaatcccgggaaattgctgctcagccctgtttaagaatctgctacttaaaaagataaaacgctgtgaacggaaaggaacagagtccgtgacagaggagaagtgcgctgttctatttagtgcatctttcacactgggacctggcaagttgccgattcagctgcaagctttgagccttcccctggtggtcatcgtgcacggcaatcaggacaacaatgctaaggctactatactttgggataatgcattcagcgagatggaccgagtgcccttcgttgtggccgagcgagtgccttgggaaaagatgtgcgagacactgaacctcaaatttatggccgaggtcggtaccaacagagggttactacctgagcattttctcttcctggcccaaaagatctttaatgataattccttatccatggaggcctttcagcaccgatccgtgagctggtctcagttcaacaaagaaatcctcttagggagggggttcactttctggcagtggttcgacggcgtgttagatctgactaaacgctgcttgcgatcctattggtcagaccgcctcatcatcggatttatcagtaagcagtacgttaccagcttactcctgaatgagccagatggaacttttttattacgtttctccgattccgagatcggtgggattacaattgcccacgtcatacggggtcaagatggatcaccccagatagaaaatatacaacccttctctgccaaagacctgtccataaggtccctgggcgaccgaatccgcgatttggcccagttgaaaaatttatatccaaagaagccgaaggatgaggccttccggtctcactataagcctgagcagatgggtaaagacggtcgtggttatgtcccagctactatcaaaatgacagtggaacgcgatcagcctttaccgacccctgagctccaaatgccaacgatggtgccgagctacgacctggggatggcccccgatagttcgatgtccatgcagcttggcccagatatggtaccacaggtgtaccccccgcatagccactcgattcctccttaccagggcctgagtcccgaagagagcgtcaatgtgctgagcgctttccaggaacctcacctccagatgcccccaagtctaggacagatgtcattaccctttgaccagcctcacccacaggggctgctgccctgccagccacaggagcacgccgtcagctctcccgatcccctgctctgctccgacgtcacgatggttgaggattcctgtttgagtcagccagtgactgccttcccacagggcacctggataggcgaggacatcttcccaccactcctgccccctacagaacaggatcttactaagctactcttagaaggacaaggagagagcggcggaggttctttgggcgctcagcctttactccagcccagccattacggtcagagcggaatctcaatgtcccatatggatctccgggcaaacccgagctggtag

SEQ ID NO: 134377 - DNA, 2040 bp, synthetic construct
  misc_feature 1..2040: note = Description of Artificial Sequence: Synthetic coding sequence
  source 1..2040: mol_type = other DNA
atgagtctttggggcctggtctccaagatgcctcctgagaaagtacagaggctctacgtggatttccctcagcatctgagacacctcttgggcgattggctcgaatcccagccatgggagttccttgtggggtccgacgctttctgttgcaaccttgctagtgccctgctgtctgatacagtgcaacacctgcaagctagcgtgggggagcaaggcgaaggcagtactatcctgcagcatatctccacactggaatcaatctatcagagggaccccctgaaattggtggcaacgttcaggcaaatactgcaaggagaaaagaaggccgtcatggagcagtttaggcatctgcctatgcccttccattggaagcaggaggagctgaagttcaagaccggactacggaggcttcaacaccgtgttggcgagatacatttgcttcgcgaggctttgcagaaaggagccgaggcaggccaggtaagtcttcatagcctcattgagaccccagccaatggaacgggaccctctgaggcactggcaatgctgctgcaggaaacgacgggcgaactggaggcagccaaagcgctagttttaaagcgcatccagatttggaagcgccagcagcagctggctggaaacggcgcaccattcgaagagtctttagctcccctgcaggagcgatgcgaaagtttggtcgacatctacagtcagttacaacaggaggtaggggcagccgggggagagttggaacctaagacgagagcctctttgacaggtagactcgacgaagtactgcgcactttagtgacatcctgcttcttggtagagaagcagcccccgcaggtgctcaagacacaaacaaagttccaggctggggtaaggttcctcttggggctaaggtttctcggcgctcctgccaaaccacccctggtgcgagctgacatggtgacagagaaacaagcccgcgaactctctgtgccccagggtccaggtgcaggtgccgagagtacgggggaaattatcaacaacacagtgccacttgagaattccattccaggtaattgttgttccgcgcttttcaagaatctgctgctcaaaaagataaagcggtgcgaacggaaaggcaccgaatcagtgacagaagagaagtgcgccgttctgttctccgcgtccttcacactcgggcctggcaaactgcctattcagctccaggctctcagcctgccactcgtggtcatagtccatggcaaccaggataacaatgcaaaagccacaatactctgggataacgcttttagcgagatggaccgcgtcccatttgtggtcgctgaaagagtaccatgggagaagatgtgtgagactctgaatctgaagtttatggctgaagtgggtacaaaccgggggctgttgcctgaacacttcctcttcctggcccagaagatttttaatgacaactccctgagcatggaagctttccagcatcggagtgtctcctggagccagttcaacaaagagatcttgctaggccgcgggtttacattttggcaatggtttgacggtgtcctggatctaaccaaacgatgcctcagatcctattggtccgataggcttatcataggtttcatatctaagcagtatgtaactagtctgctcctcaacgaaccagacgggaccttcctgctgcggttctccgactccgagatcggaggcattaccattgcccatgtcattaggggccaggatggtagccctcagatagagaatatccagcccttttccgccaaggacttatctataagaagcttaggcgatcgtatacgggatctcgcccagctgaagaacctgtaccccaagaaacctaaagatgaagcttttcgctcccattataagcccgaacagatggggaaagatggtcgaggatatgtgcctgcgactattaaaatgaccgtggagagggatcaacctcttcccacgcccgaattgcaaatgcctaccatggtcccatcctatgacctgggtatggctctgatccccccttag

SEQ ID NO: 134378 - DNA, 2193 bp, synthetic construct
  misc_feature 1..2193: note = Description of Artificial Sequence: Synthetic coding sequence
  source 1..2193: mol_type = other DNA
atggagcagttccgacatctgccaatgcctttccattggaaacaggaagagttgaagttcaaaaccggactcaggaggctacagcacagagtgggagaaattcaccttcttcgagaggctcttcagaagggcgccgaggctggccaggtctctctccacagtctaatcgagactcctgccaatgggacggggccttccgaagctctggccatgctgctgcaagaaaccacgggagagctggaagctgcaaaggctctggtgttaaagaggattcagatatggaaaagacagcagcaactggccggcaatggcgcaccattcgaagagtcattggccccattgcaagagcgctgcgaatccctagtggacatctactcacagttgcagcaggaggtgggggcagccggcggagaactggagccaaagacgagagcgtctttaaccgggaggcttgacgaggtactccggacactcgtgacaagctgtttcttggtggaaaagcagcctccacaggtgttgaagactcaaactaaattccaggctggtgtgcggttccttctcggcttgcgtttcctgggggcacctgcgaagccaccactggtgagggccgatatggtgacagaaaagcaggctagggagctaagcgtcccgcagggacctggggccggggcggaaagtacaggggagataattaacaacacggtccctttggagaactctatacctggcaactgctgctcagccctgttcaaaaatttgctgctaaagaagatcaaacggtgcgagcgcaaaggcactgagagcgttactgaggagaaatgcgctgttctcttctccgcttctttcactctcgggcccggaaagcttccgatccagctgcaggccttgagtctacctctcgtggtcatagtacacggtaaccaggacaacaacgccaaagccacaatcctgtgggacaatgctttcagtgagatggatagggtgcccttcgtggtggccgagcgggtgccttgggagaaaatgtgtgagacgctgaacctcaagttcatggccgaagttggcacgaaccggggactgctgccagagcattttctgttcctggcacagaaaatcttcaatgataatagcctgtcaatggaggcttttcagcaccggtcagtgtcatggtcccagttcaataaagagatcctcctgggaagaggtttcacattctggcagtggttcgacggtgtcttagatctgacaaagcgttgtctccgttcctattggtcggacagattaattatcggcttcatctcaaagcagtacgtgacatcactcctgttaaacgaaccagacggcacttttctcctccgtttttcagattcagaaattggaggcatcaccatcgcacatgtgataaggggccaggacggctctcctcaaatcgaaaacattcagcccttctctgccaaagatttgagtattagaagcctcggggatagaattagagatctcgctcagcttaagaatttataccccaagaagcctaaagatgaagccttccgcagtcactataagcctgagcagatggggaaggatgggcgggggtatgtgccagccaccattaaaatgactgttgaaagagaccagcccctgcctaccccagaactgcagatgcccacaatggtcccttcctacgatctgggaatggctcctgattctagtatgtcaatgcaactcggacctgacatggtaccgcaggtgtatcctccccatagccactcaatccctccctatcagggactctcaccagaagaaagcgtaaacgttctgtccgccttccaggagcctcatttgcagatgccccccagtctaggtcagatgtcactccccttcgaccagccccatccccagggacttctgccatgtcagcctcaggagcacgcagtgagtagtccagaccccctgttgtgttcagatgttaccatggtggaagacagttgccttagccagcccgttactgcttttccccaaggaacctggattggcgaagacatttttccacctttactcccccccacagaacaggaccttacgaagttactgttggaaggacagggtgaaagcgggggcgggtctctgggtcactcacctagttgttcaccaccgactatgggaaatttggggtctcaatgtcccacatggacttag

SEQ ID NO: 134379 - DNA, 2544 bp, synthetic construct
  misc_feature 1..2544: note = Description of Artificial Sequence: Synthetic coding sequence
  source 1..2544: mol_type = other DNA
atgagcctgtggggtctggtttctaagatgccacccgagaaggtacaaagactatatgtcgactttccccagcacttgagacacctgttaggagattggttagaatcccagccctgggagtttttggtgggttctgatgccttctgctgcaatctggcctctgctctgctttcggataccgttcagcatctccaggcttcagtgggagaacagggggaaggcagcaccatattgcaacatattagtacactcgagagcatctaccaaagagaccccctcaaactggtagctacttttcgccaaattctccaaggggagaaaaaggccgtgatggaacaattccgccatctgcctatgcccttccattggaaacaggaagaacttaaattcaagactgggctgaggaggctgcagcatagagtgggggagatacatttgctgcgtgaagccttacagaaaggcgctgaggctgggcaggtgtctttacattctctcattgagacgcctgctaatggcactggcccctccgaggcactggccatgctgctgcaggagacaaccggagagcttgaagcggctaaggcactagtgttgaagcggatccagatctggaaacggcagcagcagctcgcagggaacggggctccttttgaagaaagtctagcaccattacaggagaggtgtgagtcactcgttgatatttactcccaactccagcaagaagtcggcgcggccgggggagagctcgaacccaaaacccgggcctccctcactggacgactggacgaggtactccgcacgctcgtgacttcgtgcttcctggtcgagaagcagccaccccaggtgttaaagacacagaccaagttccaggccggagttaggtttttgctgggactcagattcctgggcgcaccagcaaagccgccattagttcgcgctgatatggttacagaaaagcaggcacgggaacttagcgtgccccaagggcccggggccggcgccgagtctacaggcgagataattaacaacactgtccctctcgagaattcaatccccgggaattgttgctctgctctgttcaagaacctcctgctcaagaaaattaaacgttgcgaacgcaaggggactgaatctgttactgaggaaaaatgcgctgtgctcttttctgcgagctttacgttaggacccgggaaactacccattcagttgcaggcactcagtctgccccttgtggtgatcgttcacggaaatcaggataataatgccaaggctaccattctatgggacaacgctttctcagaaatggatagggtgcctttcgttgtcgcagagcgcgtgccatgggagaaaatgtgcgaaacccttaacttgaagttcatggctgaagttggaactaatcgggggctccttccggaacactttttgttccttgcgcagaaaattttcaacgacaatagcctcagcatggaggcgtttcagcataggagtgttagctggtctcagttcaacaaggaaatcctcctcggtagaggctttacattctggcagtggttcgacggagttctggacctgaccaagagatgccttaggtcctactggtcagatcgcctgatcattggctttatctccaagcagtatgtcacttctcttctcctcaatgagccggatggcaccttccttctgaggtttagcgactcagagatcggcggaattactattgctcacgttattaggggtcaggacgggtctcctcagatcgagaatatccaaccatttagtgctaaagatctgtccattcggagcctcggagaccgtattagggacctagcccagctgaagaatctgtaccctaagaagcccaaagatgaggcattcagaagccattacaagccggagcaaatgggaaaggacggacgaggttatgtgccggcaaccataaagatgaccgtggagcgggaccagcctttaccaacccctgaactgcagatgcccacgatggtgccatcctacgacctgggaatggcccccgactcatctatgagcatgcagctaggacctgacatggttccacaagtgtacccaccccacagtcattctattcccccctatcagggcctctctccagaagagtccgttaatgttctgagtgccttccaagagcctcacttacagatgcccccatccctcgggcagatgagcctcccttttgaccagccacacccacaggggcttctgccctgccaacctcaggagcacgcagtgtcctcccccgaccctctgttatgcagcgacgtcacaatggttgaagattcctgtctctcacagccggtgactgccttcccccagggcacttggatcggtgaagacatatttccccccctgctacccccaacagagcaagatctgaccaaactgctcctggaaggccagggcgagagcgggggaggatctctcggtgcacagcctttgctgcaaccaagtcattacggccagtctggcatctccatgtcacatatggatcttagggctaacccgagttggtag

SEQ ID NO: 134380 - DNA, 195 bp, synthetic construct
  misc_feature 1..195: note = Description of Artificial Sequence: Synthetic coding sequence
  source 1..195: mol_type = other DNA
atgagcctctggggcctagtttcaaaaatgccacctgaaaaggtgcagcgcctttatgtcgattttccccaacacctcaggcacctgcttggtgattggctagagtcacaaccatgggaattcttggttggtagtgacgccttttgctgcaatctcgcaagtgccctattgagcgacacggtccaacatctgtag

SEQ ID NO: 134381 - DNA, 435 bp, synthetic construct
  misc_feature 1..435: note = Description of Artificial Sequence: Synthetic coding sequence
  source 1..435: mol_type = other DNA
atgtctctctgggggctggtgtcaaaaatgcctccagagaaggtgcaacgcctctacgttgacttcccgcagcaccttcgccatctactgggcgactggctggagagccagccctgggaattcctggttggtagcgacgccttctgctgcaacctcgcttccgccttattaagcgacacagtgcagcatctccaggcttcagttggggaacagggggagggttccactattctgcagcacatcagcaccctggagagcatctaccagcgagacccattaaaactggttgctacctttaggcagatccttcaaggagaaaagaaagctgttatggaacagtttcgacatctaccaatgccattccactggaaacaggaggagctgaagtttaaaacaggactccggagacttcagcacagagtgggagaaatttag

SEQ ID NO: 134382 - DNA, 465 bp, synthetic construct
  misc_feature 1..465: note = Description of Artificial Sequence: Synthetic coding sequence
  source 1..465: mol_type = other DNA
atgtccctttggggactggtgagcaaaatgccccccgagaaagttcagcgtctttacgtagacttcccccagcacctgagacatttactgggagactggctagaaagtcagccatgggaattcctagttgggagtgacgcattttgctgcaacctcgcctcagctctgctgagtgacacggttcagcatctccaagccagtgtgggtgagcagggagaaggtagcacaatcctccagcacataagcacgctcgaatctatttaccagcgcgatcctctgaaactagtggccacctttcggcagattttacagggcgagaaaaaagccgtgatggaacaattccggcatttacctatgcctttccactggaagcaggaggaactaaaattcaaaacaggcctgcgtagacttcagcatcgagtgggcgaaatccatctcctgagggaagctctgcaaaaaggatag

SEQ ID NO: 134383 - DNA, 318 bp, synthetic construct
  misc_feature 1..318: note = Description of Artificial Sequence: Synthetic coding sequence
  source 1..318: mol_type = other DNA
atgagcctgtggggccttgtctccaagatgccccccgagaaggtccagcgcctctatgtcgattttccacagcatctcagacacctgttaggggattggctggagagccaaccctgggagttcctcgttggatcagacgctttctgctgcaacttagccagcgcactactctcagataccgtccagcatctgcaggcctcggttggtgaacagggagaaggctccaccatcctgcagcacatcagcaccttggaatccatctatcagagggacccactcaaacttgtagccacgtttcgccagattctccaggggtag

SEQ ID NO: 134384 - DNA, 312 bp, synthetic construct
  misc_feature 1..312: note = Description of Artificial Sequence: Synthetic coding sequence
  source 1..312: mol_type = other DNA
atgtccctttggggtttagtgtctaaaatgccccctgagaaagtgcagcgattgtatgtagacttcccgcagcacctgcgacacctactgggagactggctcgagtcccagccctgggagtttctggtaggctctgacgcattttgctgcaacctggcgagtgccctgctctccgacaccgtacagcatctgcaagccagcgtgggcgagcaaggtgagggctctactatcctgcagcatatttctaccttggagagcatctatcagagggaccctctgaagctggtggccacgttccggcagatcctgtag

SEQ ID NO: 134385 - DNA, 480 bp, synthetic construct
  misc_feature 1..480: note = Description of Artificial Sequence: Synthetic coding sequence
  source 1..480: mol_type = other DNA
atgtctctgtggggcttggtgagtaaaatgccaccagaaaaggtgcagcgtctctacgtcgacttcccacagcaccttcggcatcttctgggcgactggctagagtcccagccatgggagttcctggtggggtctgatgcattttgctgcaatctggcatcagcactgttgtctgatacagtacagcacttacaggctagtgtgggcgaacagggagaaggatccaccatcctccagcacatctctacactggagtctatctaccagcgcgacccactgaagctggttgctacctttagacaaatattacagggcgaaaaaaaggcagtgatggagcagttcaggcacttgccgatgccttttcactggaagcaggaagaattgaagtttaaaaccggcctacggaggctgcagcaccgtgtcggggagattcacctgctacgggaggctctgcagaaaggggctgaggcggggcagtag

SEQ ID NO: 134386 - DNA, 2544 bp, synthetic construct
  misc_feature 1..2544: note = Description of Artificial Sequence: Synthetic coding sequence
  source 1..2544: mol_type = other DNA
atgagcctgtggggcctcgtatctaaaatgcctcccgagaaggtgcagcgcctgtacgtggactttccccaacacttaagacatctcttgggggattggctcgagagccaaccttgggagtttctggtgggctccgacgcattttgctgcaacttggcaagcgctctgctatcagacactgtgcagcatctgcaggccagcgttggcgagcagggggaaggtagtaccatccttcagcacatctccactctggagtctatatatcagagagaccctctcaagctagtggccacatttaggcaaatcctgcagggggaaaaaaaggcagtcatggagcagttccggcaccttcccatgccattccattggaagcaggaggagctgaagttcaagactggactaagacggctgcagcacagggtgggagaaatccatttgcttagggaggccctacaaaagggagccgaagctggccaggtctccctgcacagcctaattgaaacccccgccaatggcaccggaccatccgaggcactggccatgctgctccaggagacaacaggggaactggaagccgcaaaggccttggtgctgaaacgaattcagatttggaaaaggcaacagcaactcgctggaaacggcgctccatttgaagaaagcctggccccactgcaggagagatgcgaatctctggtcgatatctatagccaactgcaacaagaggtgggcgccgctggcggcgagttggaaccaaagacccgggccagtctgaccggcagactggacgaggtccttcgaactctcgtcacttcttgtttcctggtggagaagcagccgccacaggtgctgaaaacccagacgaaattccaggcaggagtcagattcctgctcggccttagattcttaggagcccccgccaagccacctctggtacgcgccgatatggtcaccgagaagcaagcccgcgagctatcagttccccagggcccaggcgctggtgccgaaagtacaggcgaaattattaacaacaccgtcccccttgagaatagtattcctggaaattgttgctccgctctgttcaagaatctcctgttgaaaaagatcaaaaggtgcgagaggaagggaactgaaagcgtaacagaagagaagtgtgccgtcctgttcagtgcaagtttcactctgggccctggaaaactcccaatccagctacaggccctttctctccctttagtcgttattgttcacggcaaccaggacaacaatgccaaagcaaccatcttgtgggacaacgcattttcagaaatggatcgcgtgccctttgttgtggctgaaagggtgccctgggagaagatgtgcgagactttgaatttaaaatttatggctgaggtgggaacgaaccgcgggctgctccccgaacactttctctttttggctcagaagattttcaacgataatagtctgtccatggaagcttttcagcatcgctctgttagctggagccagtttaataaggaaattctgctgggccgcggcttcacgttctggcagtggttcgatggtgtgctggatcttaccaaaagatgcctccggtcttattggtcagacaggctcataatcgggtttatctccaagcagtatgtgacatctctcctcctaaatgaaccagacggaacttttctgctgcgtttctctgacagcgagatagggggcatcaccatagcccacgttatcagaggccaggatggaagccctcagatagaaaatatacagcctttttctgccaaggaccttagcatcaggagcctgggggatcgcatccgggacttggcccagttaaaaaatttgtatccaaagaaacctaaagatgaggctttcaggtcccactacaagcctgagcagatgggcaaagacggccggggttacgttcctgccactatcaaaatgacggtggaaagggatcagcccctgccgactccagagctgcagatgcccacaatggtaccaagctatgatttggggatggcgccggactccagtatgtccatgcagcttggccctgatatggttccccaggtgtaccccccacactctcactcaattcctccttaccagggactgtcgcctgaagaaagtgttaatgtgctgtccgccttccaggagccccatcttcagatgcctccttctctgggccagatgtctttaccattcgaccaacctcaccctcaaggtctgctgccttgtcagcctcaggaacacgccgtcagctctccggaccccttgttgtgttcagacgtgactatggtggaggattcttgcttgagtcaaccggtgaccgcctttccacagggcacgtggataggtgaggacatcttcccacccctgctaccaccaacagagcaggatctaacaaagttactgctggaggggcagggcgagtccggcgggggcagtcttggagctcagccactgctgcagccctcccattacggtcagtcagggatcagcatgagccacatggacctgcgggctaatccgtcttggtag

SEQ ID NO: 134387 - DNA, 225 bp, synthetic construct
  misc_feature 1..225: note = Description of Artificial Sequence: Synthetic coding sequence
  source 1..225: mol_type = other DNA
atgagcttatggggtctcgtgtcaaaaatgcctcccgaaaaggtccagcggctctacgtggactttcctcaacatcttagacatctgctgggggactggcttgaatcccagccatgggaattcctcgtcgggtccgatgccttctgctgtaacttagcctcagcattgctgtcagacacagtccagcatctccaggctagcgtcggagagcagggcgagggctag

SEQ ID NO: 134388 - DNA, 564 bp, synthetic construct
  misc_feature 1..564: note = Description of Artificial Sequence: Synthetic coding sequence
  source 1..564: mol_type = other DNA
atgctggggcaccccaaggtgtgcgagaagctgaaagccttaatggtcgagtggacagatgaatttaagaatgaccctcagctgtcgctgatcagtgccatgatcaaaaatcttaaagaacaaggtgtgacctttcccgccattgggagccaagccgccgagcaagccaaggcatctcccgccctggtagctaaggaccctggaacagtcgccaataagaaggaggaggaggatctcgcgaaggctatcgaattatccctgaaagaacaaagacagcagtccacaacattaagcactctgtacccttccacctcaagtttactgaccaaccaccagcatgaaggtcgcaaggtgcgagccatttatgattttgaggcggcagaagacaatgaactaactttcaaggccggcgagataatcactgtgctcgatgactccgaccctaactggtggaaaggcgagacgcaccagggtattgggctgtttccttccaattttgtgaccgcggatctgaccgccgagcctgagatgataaaaaccgagaaaaagaccgtgcagttttag

SEQ ID NO: 134389 - DNA, 1623 bp, synthetic construct
  misc_feature 1..1623: note = Description of Artificial Sequence: Synthetic coding sequence
  source 1..1623: mol_type = other DNA
atgcctctcttcgctactaaccccttcgatcaggatgtagaaaaagccaccagcgagatgaacaccgcagaggactggggtctgattctcgacatttgtgacaaggtcgggcagagcaggacaggccccaaggactgtctgcgctccataatgcggcgagtaaaccataaggatccccatgtcgcaatgcaagccctgaccctgctgggcgcgtgtgtctccaattgtggaaagatctttcacttggaagtctgctcaagggacttcgctagcgaagtgtccaacgtgctcaataagggacaccctaaagtgtgcgaaaagttgaaagctctaatggtggagtggacagatgaattcaaaaatgacccccagctgtcattaatctcggccatgataaaaaacctgaaggagcaaggagtcacattccctgcaatcggaagccaagccgccgaacaagctaaggcgagccccgcactggttgctaaagatccaggaaccgtcgctaataagaaggaggaggaagatctcgccaaagcgatagaactgagcctgaaggaacaaaggcagcaatccacaaccttaagcactctgtatccgagtaccagttccttgctgactaaccatcagcatgagggaagaaaagtcagggcaatctacgatttcgaagcagctgaggacaatgagttaacgttcaaagccggcgagataatcaccgtgctggacgattcggaccccaattggtggaaaggcgaaacacaccaggggataggcctgttccccagcaactttgtgaccgccgacctgacggcagaacctgaaatgattaagacagaaaagaagaccgtgcaattctcagatgacgttcaagtggagaccatcgaacctgagccagaaccagcattcatagatgaggacaagatggaccaattgctgcagatgctccagagcacggatccctcagatgatcagcctgacctgcctgagcttctgcaccttgaagccatgtgccaccagatgggccctctgattgatgagaaacttgaagacatcgataggaaacattctgagctctcggagctaaatgtgaaggtaatggaggcgctttctctgtatactaaacttatgaacgaggatcctatgtacagtatgtacgccaagctccagaaccaaccatactacatgcagtcatccggcgtttccggctcccaagtgtacgctggaccacccccgagtggggcttacctggtggccggcaacgctcagatgtcccacctgcagtcctacagcctacccccagaacaactgtcgagcttgagccaggcagttgttccgccttccgctaaccccgcactgccgagccaacagactcaagccgcctatcctaataccatggtgagctccgtgcagggaaatacataccccagccaggctcccgtctactccccaccgccagccgccacagctgcggcggccaccgcagacgtgacactgtatcagaatgccggtcctaacatgccccaagtgccgaattacaatttgacgagctccactttaccccaacctggagggtcccagcagcctccacagcctcagcagccctatagtcagaaggcactactctag

SEQ ID NO: 134390 - DNA, 357 bp, synthetic construct
  misc_feature 1..357: note = Description of Artificial Sequence: Synthetic coding sequence
  source 1..357: mol_type = other DNA
atgcggagggtaaatcacaaagacccccacgtggccatgcaggcgctgactttacttggtgcttgtgtgtcgaactgtggcaagatcttccacctagaggtatgcagtcgggactttgcctcagaagtttccaacgtccttaataagggccatcccaaggtctgcgagaagttgaaggcgctcatggtggaatggactgatgagtttaagaatgatccgcaactctcccttatttccgccatgatcaagaacttgaaggaacagggcgtgacattccctgcaatcggttctcaagcagcagaacaggcaaaggcaagccccgccctggtagctaaagatccgggcaccgtggcctag

SEQ ID NO: 134391 - DNA, 1290 bp, synthetic construct
  misc_feature 1..1290: note = Description of Artificial Sequence: Synthetic coding sequence
  source 1..1290: mol_type = other DNA
atggtggaatggacagacgagttcaaaaacgatcctcagctgtcactcatttccgcgatgattaagaatttaaaggaacaaggggtgaccttccccgcaataggcagtcaggccgctgagcaggccaaggctagtccagccttggttgccaaggacccgggaaccgtcgcaaataagaaagaagaagaggaccttgctaaggccatcgagctgagtcttaaggaacaaagacagcaatccactactctatcaacactttatccatccactagcagcctcctgaccaaccatcagcacgagggtaggaaagtacgggctatttacgatttcgaggctgctgaagacaacgagctaaccttcaaggctggagaaatcattacagtgctggacgactcagaccctaactggtggaagggcgaaactcatcaggggatcggcctcttccccagcaattttgttacggcggatttgaccgccgagcctgaaatgattaaaactgaaaaaaagaccgtgcagttttcggatgatgtgcaggtcgaaacaatagaacccgagcctgagcctgcgttcatcgatgaggacaaaatggaccaactgttgcaaatgctgcaaagcaccgaccctagcgacgatcagcccgatctccccgaattacttcacctggaagcaatgtgtcaccagatgggacccctgatcgacgagaagctcgaggacattgatcgtaagcattcagagcttagtgagctgaatgttaaggtgatggaggctctgtcactctacacgaagttgatgaatgaggatccaatgtattcaatgtacgctaagttacaaaaccagccttattacatgcaaagctccggggttagtggatcgcaggtgtatgcaggtccaccgccaagcggtgcctatctcgtagcaggaaatgcacagatgtcccatctacagtcctacagcctcccgccagagcagctatcttcacttagccaggctgtggttcccccatccgccaacccggctctgcccagtcagcaaacacaggctgcttaccctaacactatggtgtccagcgttcaaggtaacacatacccatctcaggcaccggtttattctccccctccggcggctaccgccgcggcagccaccgccgacgtgaccctctatcagaacgcaggtccaaatatgcctcaggtcccgaactataacctcacatcaagcacattgccccagccaggcggcagccagcagcccccccaacctcagcagccttacagccagaaggctctgctgtag

SEQ ID NO: 134392 - DNA, 1578 bp, synthetic construct
  misc_feature 1..1578: note = Description of Artificial Sequence: Synthetic coding sequence
  source 1..1578: mol_type = other DNA
atgcctctctttaccgctaacccctttgaacaagatgttgagaaggctactaacgaatacaacacaactgaagattggagcctgatcatggacatctgtgataaggtgggctccacaccgaacggcgcaaaagattgcctaaaggcaattatgaagcgagtcaaccataaggtgccccatgtcgccctgcaagccctaaccctgctcggcgcttgtgttgctaattgcggaaaaatttttcacctggaggtgtgttccagagatttcgctacggaagttagagctgtgattaaaaacaaagctcatcctaaggtgtgcgaaaaactaaaatcactcatggtggagtggtctgaagaattccaaaaagacccccagttcagcctcattagtgccacaattaagagtatgaaggaggaaggcatcacgttcccgccagccggctctcagaccgtttctgccgcagccaagaacggaaccagctctaacaaaaacaaggaagatgaggatattgcaaaagctatcgagctttccctccaggaacaaaaacagcagcacacggagacaaagagtctgtacccctcttccgagatccagttgaacaacaaggttgcaaggaaggtcagagccctatatgactttgaggctgttgaggacaacgagctcacattcaaacatggcgagatcattattgtgctggatgactccgacgctaattggtggaaaggggagaaccatcggggcattggtctttttccaagcaatttcgtgacgactaacctgaatattgagacagaggcagccgctgttgacaagctgaacgtaatagacgacgacgtggaggaaattaaaaagtcggagcccgagccagtgtatatagatgaggataagatggatcgcgcactgcaagtgttacagtccattgatcctacagattccaagccagacagccaggatttgctagaccttgaggacatttgtcaacagatgggacccatgattgatgagaagctggaggaaatcgataggaaacactcagagcttagcgaactgaacgtgaaggttcttgaagccctggagctgtataataagttagtcaatgaggctcccgtgtattccgtctactctaagcttcatccccccgcacactatccaccggccagcagtggcgttccaatgcagacctacccagttcaatctcatggggggaattatatgggtcagagcatccaccaggtgacagtggctcagtcatactcactgggacccgaccaaattggaccattgagaagcctgccacccaacgtgaatagttctgtgacagcgcaacccgctcaaacctcctatctgtccactggacaagacacagtttctaaccccacatacatgaatcagaactcgaacttgcagtcagctactggcaccaccgcctatacacaacagatgggcatgtccgtggatatgtcctcttaccagaatactactagtaacctgccacagctagcggggtttccagttacagttccagctcatcctgtagcacaacaacatacgaattatcaccagcaacccctgctttag

SEQ ID NO: 134393 - DNA, 3129 bp, synthetic construct
  misc_feature 1..3129: note = Description of Artificial Sequence: Synthetic coding sequence
  source 1..3129: mol_type = other DNA
atgccgatgtgggctggtggggtgggtagtcctcgccgagggatggccccagcatctactgatgatcttttcgcccgaaaactgcgccagccagcccgccctcccctgacgccccacacatttgagcctaggccagtgcgaggtcctctcctgcgctccggctcagatgccggggaagccaggcctccaacgccagcttccccaagggcccgagctcattcccacgaggaagcctcccgaccggctgccacttctactagactttttacagatccacttgcactgcttgggttgccagctgaggagccagaaccagcctttcctcctgtactagagccccgctggttcgcacactatgatgtccagtcgttactgttcgattgggccccacgcagccaagggatgggttctcactcggaagcgagctccggaaccctcgcatccgccgaagatcaagctgcaagtagcgacctgctgcacggggcccccggctttgtttgcgaattagggggcgaaggggaactgggactcgggggacctgccagtccgcctgtcccacccgcgctgcccaatgccgctgtgtcaattctggaagagccccagaaccgtacaagcgcttactctctggaacacgctgacctcggcgcaggatactacagaaagtacttctatggaaaagagcatcaaaactttttcggcatggatgagtctctgggccccgtggctgtgagcctgcggcgggaagagaaggaaggtagtggcggcgggacactgcacagctaccgtgtcatcgttcgaacaacccagctacgtaccctgcggggaactatatccgaggacgccctccctcccggtcccccacggggactaagccctcgcaagttactcgagcatgttgccccacagttgtccccatcctgtcttcgcctaggatcagcctctcctaaggtacctaggaccttactcacactggacgagcaggtgctcagctttcagcgaaaagtggggatcctctactgtagagctggccagggatccgaagaagaaatgtacaataaccaggaagccggccccgcatttatgcaattcctgaccttattgggagatgtcgtgaggctcaagggcttcgagagttacagagcacagctggataccaaaactgactcgacgggaactcattccttgtatacaacttaccaggaccatgagattatgttccatgtttctaccatgctgccttacacccccaataaccaacagcagctgcttcgtaaacgccacatcggaaacgacatcgtcacgattgtattccaagagcccggatccaagcccttctgtccaacaaccatacgtagccattttcagcatgtcttcttggttgttcgggcacacacaccatgtaccccccatactacatacagggtcgcagtaagcaggactcaggatacccctgcttttggtccagccctgccagcaggaggtggacccttcgcagcaaatgccgacttccgggcatttctccttgcaaaggctcttaatggcgaacaagccgctgggcacgctcgccagtttcacgccatggctaccaggacacggcagcagtatctccaggatctggcaacaaacgaagtcacaaccaccagcctcgattccgcatctagattcggcctgcctagcctcggcgggcgcagacgcgcagcaccgaggggccccggggcggaattgcaggccgcagggtccctggtatggggggtgcgggctgccccgggtgcgcgggtggctgcaggcgctcaagcttctggccctgaaggcatcgaagtaccttgtctgttagggatttcagccgaggcccttgttttagtggccccacgggacgggcgggtcgtattcaattgtgcttgcagagatgtgctggcatggactttctctgagcaacagctggacctgtaccacggccggggggaggctataacactaaggttcgacgggtctccaggccaggcggtcggggaagtcgtggccaggcttcagcttgtttccaggggctgtgagacacgcgagctcgccctaccaagagatgggcagggcagactgggttttgaggtggatgcagagggcttcgtaacccacgtcgaaaggtttaccttcgctgagactgccgggctgagaccaggagctaggcttctccgtgtgtgcgggcagacactgccctcactccggcccgaagctgccgcccagcttctgcggtccgctcccaaagtgtgtgtgactgttcttccacccgatgaaagcggcaggcctcgccgaagtttcagcgagctttatacgctgagcctccaggagccaagtcggagaggagcaccggatccagtgcaggatgaggtacaaggggtgacattactccccactacgaagcagctgctacatttatgtcttcaggatggaggctctccccccggcccgggtgatctcgccgaagagagaaccgagtttctccactctcagaacagcctgagcccgcgcagctccctaagcgacgaagccccagtgctgccaaatacaacgcccgatttgctgctcgccaccaccgctaagccgtctgtcccaagcgccgactccgagacccctctgacgcaggatagacccggaagccccagtggctctgaggacaagggaaatccagctccagaactccgcgccagtttcctcccgcggactctgtcgcttcggaactccatatctcgtataatgagtgaggcaggctcggggaccctagaagacgaatggcaggctatctctgagattgcctctacttgcaacaccattctggaaagcctgagcagagaaggacaacctattcccgagagtggcgaccctaaagggacaccaaagtccgacgccgaaccggagcctgggaacctcagcgagaaggtttctcatctggagtcaatgcttcgtaagctgcaggaggatctgcagaaagagaaggccgatcgcgccgcgctggaagaggaggtcagaagtctgagacacaacaacagacgcttgcaggcagagtcagaaagtgccgccactagactattgttggcaagcaaacagctgggctctcccacagctgatttggcctag

SEQ ID NO: 134394 - DNA, 2823 bp, synthetic construct
  misc_feature 1..2823: note = Description of Artificial Sequence: Synthetic coding sequence
  source 1..2823: mol_type = other DNA
atgcccatgtgggcagggggcgtgggctcgccgcgccgggggatggcaccagcctcaaccgatgacctcttcgccagaaagttgcgacagcctgctaggccccccctgacccctcacactttcgagccgagacccgtgcgaggcccactgctcaggagtggttctgatgcaggggaggctcgtccccccacccctgcatccccacgcgcacgagcacactcccatgaagaagccagccggccagccgctacttccactaggctttttaccgaccctctggccctgctcggcctgccggcagaggaacctgaacctgcgtttccacctgtcctggagcccaggtggtttgcccattacgacgtgcaatccctgctgtttgactgggcgccgcgatcacaaggtatgggctcccacagtgaagcaagcagcggcaccttggcgagtgctgaggaccaggccgcgtcatccgaccttcttcatggcgctccaggcttcgtatgcgaacttgggggcgagggagagcttggccttggagggccagccagtcccccagtccctcccgcgctccccaatgccgcagtgtcgattcttgaagagccgcagaatcgaacaagcgcttacagcctggaacatgccgacttaggagccggatactaccggaaatatttttatggcaaggaacaccagaactttttcggcatggacgagtcactggggcccgtggctgtgtcccttagacgcgaagagaaggaaggcagtgggggcggaacactgcacagctaccgtgtaatagtgcggaccactcaactcagaaccctgcgtgggaccatctcggaagatgcacttccacccggccctcctcggggcctgagtcctaggaagttacttgagcacgtggccccccagttgagtccatcctgtctgcgcttggggagtgcttcgcctaaggttccgaggacactgctcacattggatgaacaggtcctatccttccagcggaaagtcggtatactgtactgtcgcgccggccagggctccgaggaggagatgtacaacaatcaggaagcaggcccagcctttatgcagttcttaaccttgttaggggatgtagtgagattgaagggattcgaatcctaccgcgcgcagctcgacaccaagactgactccactgggactcatagtctgtacacaacttaccaagatcatgaaataatgtttcacgtatcgacaatgctgccttatacgccaaacaaccaacaacaattactacgcaaacggcacatagggaacgacatcgtgacaatcgtgttccaggaacctgggagcaaacccttttgcccaacaactattagatctcatttccaacacgtcttccttgtcgtccgcgcgcacacaccatgcactccccatacaacatacagagtggccgtgtctcggacccaggatacccccgcatttggacctgccctccccgctggcggtggaccatttgcagccaacgcagatttcagagcctttctgttggctaaggcacttaacggcgagcaagccgccggccacgctagacagtttcacgcaatggctacacgcactcgtcagcagtacttgcaggatttagctacaaatgagcagctggatttgtatcacggtagaggtgaggccatcactcttcggttcgatggcagccccggccaggcagtaggcgaggttgtcgcgcgcttgcagctcgtatctaggggatgtgagacaagggaactcgccctgccgagggatggtcaggggcgactcggattcgaggtggatgccgaaggatttgtgactcatgttgaaaggttcacgttcgctgagacagctggactgaggccaggggcccgtttgttgcgtgtgtgcggacaaactctaccctccctgcgaccagaggcggcggctcaactgctgcgctctgccccgaaggtatgcgtgaccgtgctgcctccagatgagagtggcaggccaagacggtccttttctgaactctatacgctgtcgctgcaagaacctagcagacgtggtgcgcctgatcctgtgcaggacgaggtgcaaggcgtcactttgttgcccacaacaaaacagctcctgcacctgtgtctccaggatggcggatctccacccggtccgggggatttggcagaagaaaggaccgagtttcttcactcccagaacagcctgagccccagatcttcattgtcagatgaagcaccggtactgccaaatactaccccagatctgctattggcaacaactgcgaaaccgtctgtgccatctgcggattccgaaactccattaactcaggatcgccccggcagtccttcaggcagcgaggataagggcaaccccgcaccagaattgagagcctctttcctccctagaactctgagtcttaggaacagtatttccagaattatgtccgaagctggatccggaaccttagaggatgagtggcaggctatcagcgagattgcttcaacctgcaacacaatactcgaaagcttgagccgggaaggccaacccatccccgaaagcggggacccgaaaggaaccccgaagtccgacgcggaacctgaacctggaaatctatcagagaaagtgtctcacctggagagcatgctgcgtaagctgcaggaagacttgcagaaagagaaggccgacagagcagcgctggaagaagaagtgcgttctctaaggcacaacaacaggagactccaggcggagtccgagagcgctgcaactagactgctcctggcgagtaagcagctcggtagtcccacagccgatcttgcttag

SEQ ID NO: 134395 - DNA, 21 bp, synthetic construct
  misc_feature 1..21: note = Description of Artificial Sequence: Synthetic coding sequence
  source 1..21: mol_type = other DNA
atgccaatgtgggcgggctag

SEQ ID NO: 134396 - DNA, 312 bp, synthetic construct
  misc_feature 1..312: note = Description of Artificial Sequence: Synthetic coding sequence
  source 1..312: mol_type = other DNA
atgccaatgtgggctgggggtgtcgggagcccacgtcgaggcatggcacccgccagcacagacgatctttttgccagaaaactcagacagccagcgagaccccctctgacacctcacacatttgagcctcgcccggtacgggggcctctcctgcgttctggcagtgatgcaggggaggctaggccgccaaccccagcctcacctcgggcacgagcgcattcccatgaagaagctagtaggcctgcagccacgagcacaagactgttcactgaccccctcgctctcctgggcctccctgccgaggagccttag

SEQ ID NO: 134397 - DNA, 3129 bp, synthetic construct
  misc_feature 1..3129: note = Description of Artificial Sequence: Synthetic coding sequence
  source 1..3129: mol_type = other DNA
atgcctatgtgggccggtggggtgggttctccccggcgcggcatggccccagcaagtacagatgacttgtttgctcgtaaattgcgccaaccagcccgtccgcctctgaccccacatacgttcgaacctcgacccgtcagagggccactccttaggtccggaagtgacgccggcgaggcaagacccccaactccggcctcccctcgtgcaagagcacactcccatgaagaagcctcccgcccagcggcaacaagcacccgactatttaccgacccactagcgctcctgggtctgcctgccgaagagccagagcctgcctttccgcccgtcttggagccccggtggttcgcacactatgatgttcagtccctcctgtttgattgggctcctaggtcccaggggatggggagtcatagtgaagccagttctggaacactggcctcagctgaagaccaggctgcctcaagtgaccttctccatggcgctccgggttttgtgtgcgagttagggggggaaggcgaacttggtctaggcggaccagccagccctcctgtcccgccagctttgccgaacgcagcagtgtctatcctggaggagccacagaaccgcacgtctgcctactcactcgagcacgccgatctcggagccggctattaccgaaagtatttttacggtaaggaacatcagaatttttttggaatggatgagtcgttgggacctgttgctgtaagccttagacgagaagagaaggaggggagcggcggggggaccctgcactcctatagggtgatagtgcggaccacccaattgcggaccctccgcggaaccatttctgaagatgcgctgccacccggcccccctcgcggactgagtccacgtaagctgttagagcacgtggctccacagctctcccccagctgcctgcgcctggggagtgccagccccaaagtgcccaggaccctactcacactcgacgaacaggtactgtcttttcagcgtaaagtcggcattctgtactgtcgagccggtcagggctccgaggaggaaatgtacaataaccaagaggcaggaccagccttcatgcaatttctcacgctcctaggagatgtagtgcggctgaaaggatttgaaagctacagggcccagctagacaccaaaacagatagtaccggaactcactcactttacaccacctatcaggaccatgaaatcatgtttcacgtgtctaccatgctcccatacacccccaataatcaacagcaactgctccgcaaaaggcatatcggcaacgatatcgttaccatcgtgtttcaggaaccgggcagcaagccgttttgccccacaacgatccggtctcatttccaacacgtcttcttggtggtgcgggcacacactccatgtaccccacataccacatatcgcgtcgcggtttctcggactcaggatacacccgcctttggccccgcgctgccagccggaggtggtcctttcgctgcgaacgcggacttcagggcttttctgcttgccaaagccctgaatggcgaacaggctgctggccacgcacgacagtttcacgcaatggcaacgcgaacccgccagcaatatctgcaggatttggcaacaaacgaagtcacaaccaccagcttggacagcgcaagtaggttcggcctaccgtccctcggcggccggaggagagcagctccacgtggacctggcgccgagctgcaggccgctggcagcctggtctggggagttagagccgctcccggtgcccgagtggccgccggagctcaggccagcggccctgaagggatcgaggtcccctgtctgttaggaatctctgcagaagctctagtgctcgtggcccccagggatggcagagtagttttcaactgtgcttgtagagatgtattggcttggactttcagcgaacagcaactggacctctaccatggtcgcggagaagccataacgctgcggtttgacggcagccccggacaggctgtgggtgaggtggtggctagactgcagcttgtgtcaagaggttgcgagactcgcgaactggctcttcccagggacggtcaggggcggctaggcttcgaggttgacgcagagggatttgtcacccacgtggaacggtttacttttgcggagaccgctggtctcagaccaggagccaggctacttcgcgtgtgcgggcaaacgctacccagtctccgccccgaggccgcggcccagttactcaggagcgccccaaaagtgtgcgttactgtgttaccccctgacgaaagcggccggccacgaaggtccttcagcgagctctacactctttctctgcaagagccttctcgccgaggggcgcccgatccagttcaagacgaagtgcaaggagtgaccttgcttcccacgactaaacagctgctccatctgtgtctgcaggacggtggatcgccccccggcccgggtgacctggcagaggagcgaaccgaatttctgcattctcagaattctctgtcccccaggtccagccttagcgatgaagcccccgtcttgccgaacacaacaccagacctcctgcttgcgacaactgccaagccgtcagtgccttcagcggactcggaaacgcccttaactcaggacagacccggatctccgtcgggctctgaggataagggtaatccagctccagagctccgtgcctccttcctccctagaaccctgagtctgcgaaactccatatcccggataatgtccgaggcaggcagcggaacactagaagacgagtggcaggccatctctgagatcgcatcgacctgtaacactattctggagagtctgtctcgcgaaggccaacctatcccagagagcggtgatccgaaaggtaccccgaagagtgatgctgagcccgagcctggaaatttgtcggaaaaagtatcccacctcgaaagcatgcttagaaagcttcaagaggacctacaaaaagaaaaggccgaccgagctgcactcgaggaggaggtgcgctctttacgccataataacagacgcttgcaggccgagtctgagagtgcggctacacggctacttctggccagcaagcagctgggaagtcccaccgctgatctcgcgtag

SEQ ID NO: 134398 - DNA, 5169 bp, synthetic construct
  misc_feature 1..5169: note = Description of Artificial Sequence: Synthetic coding sequence
  source 1..5169: mol_type = other DNA
atgtctgatcctcgtcagtcacaggaagaaaaacataaactcggccgggcctcctccaagttcaaggatccaccgcgcatcatgcaaagtgacgattatttcgccaggaagtttaaagccatcaatggaaacatggggcctaccacctccctgaatgcctctaactctaatgagactggcggcggcggccccgcgaacggtaccccagccgtgcccaagatgggcgtgagagcaagggtatctgaatggccaccaaagaaagattgcagtaaagagcttacatgcaaagcactgtgggagtcccgttcccaaacaagttatgagtcaatcaccagtgtcctgcagaatggacaatctgatcagagcgagggacagcaggatgagcaactggatttagacttcgtcgaggccaagtacaccataggagatatctttgtgcactcaccccagagaggtttgcatcccatccgccagcggagtaactccgacgttactatcagcgatatcgacgccgaagacgtgttggatcagaacgccgtgaacccaaacaccggagcagctctccacagagagtatggttcaacaagcagcatcgaccggcaagggctgagcggcgaaaatttttttgctatgttacgaggctatcgcgttgaaaactatgaccacaaggccatggtgcccttcggatttcccgaattctttcgatgtgacccagctatctcgccatcgctgcatgctgcggcccagattagcaggggcgaatttgttagaatcagcggtttagattacgttgatagtgccctgctgatgggaagggatcgggacaagccatttaagcggagactgaagagcgagagcgttgaaacttcactgtttcggaagctgaggactgtaaagtcagaacatgagacctttaagtttacaagcgagctagaagagagcagattagagaggggtatccggccatggaactgtcagagatgtttcgcccattacgacgtccagtccattctctttaacattaacgaggcgatggcaacaagggctaatgtaggtaaacgtaagaacataactaccggtgccagcgcagcatctcagacacagatgcctactggccagaccggcaactgcgaatctccactgggcagcaaagaggatctgaacagtaaagaaaacctcgatgctgatgaaggggacggcaagagtaatgaccttgtgctgtcatgtccatacttcaggaacgaaacgggcggcgagggcgacagacgtattgccctgagccgggccaactcttccagtttctcaagcggggagtcttgcagcttcgagtccagtctgtctagtcactgtaccaacgctggagtctccgtgctggaggttccccgagaaaaccaaccgatccatcgcgagaaggttaagaggtacatcatagagcatatagatctgggcgcatattactaccgcaagttcttctatggaaaagaacaccaaaactactttggcattgatgaaaatctgggccccgtcgccgtgagcatccggcgggaaaaagtagaagacgcgaaagaaaaagaagggtcccagttcaactaccgtgtggcctttcgtacctctgagctcaccacactacgcggcgcgatacttgaagatgcaattccaagtaccgctcgccacgggacagcacgtggcctccctttgaaggaagtgttagaatacgtgataccagagctgtccattcagtgcctccgtcaagcctctaattcccccaaggtgagcgaacagctgctgaaattagatgaacagggcctgtcctttcagcataagatcgggatcctgtattgcaaggctggacagtctaccgaggaggaaatgtacaacaatgagaccgccggacctgccttcgaggagttcctagaccttctgggacagcgcgtgcgactgaagggcttcagtaaatatcgagcccaactcgataataagacagacagcaccggcacacactcactgtacacaacgtacaaggactacgagctcatgttccatgtctcaaccctgttgccatacatgccaaacaatcggcagcagcttctgcggaaaaggcatatcgggaacgatattgtgacaattgtatttcaggagccaggtgctttaccgtttacccccaagagcatcagaagccattttcagcacgttttcgtgatcgtcaaggtgcataacccctgcaccgaaaacgtttgctattctgtcggcgtgtccaggagtaaggacgtgccaccttttggccctccaatccctaagggtgtaacatttcccaagtcagcggtgtttagggacttcctgctagcgaaggttatcaacgccgagaatgcagcccataaaagtgaaaagtttcgcgccatggctacacgaaccagacaggagtacctgaaagatttggccgaaaactttgtaaccaccgccaccgtcgataccagcgtgaaatttagctttattaccctgggcgcaaagaagaaagagaaagtgaagcctcggaaggacgcccatctttttagcattggcgccatcatgtggcacgtgattgccagagattttggccaatctgcggatatcgagtgcctccttggcatctcaaacgaatttattatgcttattgagaaagacagtaaaaacgtggtgttcaactgcagttgtcgcgacgtaattggatggactagcggacttgtgtccataaaagtgttctatgaacgcggagaatgtgttcttctgagtagcgtggacaattgcgcggaggatatacgcgagatcgtgcaacgattagtgattgtcactcgagggtgtgagaccgtggagatgacactccgtcgtaacgggctcgggcaacttgggtttcacgtgaacttcgagggaattgtcgcagacgtcgagccatttggctttgcgtggaaagccggcctgaggcagggatcaagactggttgagatttgcaaggttgcggttgcaactctgactcatgaacagatgatcgatctcctccgaaccagcgtgactgtgaaggttgttataatccagccgcacgacgatggaagtccgcggaggggatgtagcgaattgtgtcggatcccaatggtcgagtataagctcgacagtgagggaactccctgtgaatacaagaccccgtttcggcgtaatacgacctggcatagagtgcctaccccagccctgcagcccttaagccgcgcgtctcctatcccaggcacgccggatcgtctgccctgtcaacagctcttgcagcaagctcaggccgcgatacctcggagtactagttttgaccgaaagctgcccgatgggaccaggagctctcctagtaaccaatcctcctctagtgacccaggccctgggggctccggcccttggaggccccaagttgggtacgatggctgccaatcgcctctgcttttggaacaccagggatcaggtcctctggagtgcgacggagcccgcgaacgtgaagacacaatggaggctagtcgtcacccagagactaagtggcacggccccccttccaaagtgctgggatcttataaggagagggccctgcagaaggatggcagctgcaaagattctcccaataaactgtcgcatattggcgacaaatcatgttcatcacacagttcgagcaatactctctcctccaacacaagcagcaacagcgacgacaagcattttggaagcggcgaccttatggacccggagttgttgggccttacttacatcaagggggccagtaccgactcaggtattgatactgctccatgcatgcctgccacaatattagggcccgtgcatctcgcaggcagccgcagcctgatacactcgagagccgagcagtgggcggatgcagccgatgtgagcggcccagatgacgagccagcaaaactctatagcgttcacggctacgcctccacaatcagcgccggatccgcagccgagggcagtatgggcgatctgagcgaaatctcatcgcactccagcgggtcacatcattcagggagcccatcggctcattgctccaagagctcaggatcgctcgactctagcaaagtctatattgtatctcatagtagcggccagcaggtgcctggaagtatgagcaagccctaccaccgccagggcgccgtgaacaagtatgtcatcggatggaaaaagagcgaaggcagtcctccccctgaagagcccgaggtgacagagtgcccgggcatgtactcagagatggatgtcatgagcacagctacacagcaccagaccgtggtgggcgacgccgtggctgagactcagcacgttttgtccaaggaggactttctgaaactgatgctgcctgactcaccattggtggaggaaggaagacgcaagttcagtttttacgggaatttgtctcccagaaggtcactttatcgtaccctgtctgacgagtcaatctgctcaaatagaagagggtcttccttcggctcatctcggtcgagtgtgctggaccaggctctccctaatgatatccttttttccacgacacccccttatcattctacactcccacctcgtgctcacccggcaccctctatgggatcactgcgtaacgagttttggttcagcgatggttctctgtccgacaagtccaaatgtgctgacccaggcctcatgccacttccagacacagcaactggcctggactggacccatttggtcgatgccgctagagcctttgaggggttggacagcgacgaagagttgggtcttttgtgtcaccacacaagttaccttgatcagagggtggctagcttctgtacactgacagacatgcagcatggccaggatctggaaggtgctcaggaacttcccctgtgcgtggaccctggaagtggaaaagagtttatggataccactggagagcgaagcccgagcccattaacggggaaggttaaccagcttgagctcatcttgcggcagcttcagactgatctgaggaaggagaagcaagataaagcagtcctgcaagctgaagtgcagcaccttcgtcaggacaatatgcgtctgcaggaggagagccaaacggccaccgctcagcttagaaagtttaccgagtggttctttactacgatcgataagaagtcttag

SEQ ID NO: 134399 - DNA, 2337 bp, synthetic construct
  misc_feature 1..2337: note = Description of Artificial Sequence: Synthetic coding sequence
  source 1..2337: mol_type = other DNA
atgtccccttgctttagtttcatcgggtgtaagttgtgtagcatagtgacaagagggtgcgaaacagttgagatgacacttcgacgtaacggacttgggcagctgggctttcacgtgaattttgaggggatcgtggccgacgtagaaccctttggcttcgcctggaaagctggcctgcgtcagggctccagactagttgagatttgtaaagtcgcagtggcaacactcactcatgagcagatgattgacttgctgaggacttcggtgacagttaaagtggtcatcattcagccacatgatgatggcagtcctcggcggggttgctccgaactgtgtaggatcccaatggtagaatacaaactggattccgagggtacaccttgtgaatataagactcccttcagacgcaacacaacctggcacagggttcctacacctgctctgcaacctctctcccgcgccagtccaatccctggcacccccgatcgcctgccatgtcaacagctgctgcaacaggcccaggctgccataccgaggagtaccagctttgacagaaagctcccggacggcacgaggtccagccccagcaatcagagttcatcctccgacccagggcctgggggctcagggccctggcgtccacaagtcggatacgatggctgtcagtcccccttactccttgagcaccaaggctccggcccactggagtgcgacggcgcacgggaaagagaagatactatggaagcctcacgtcatcctgagacgaagtggcacggacccccaagcaaggttctaggatcctataaagaacgggctttgcagaaggacggatcctgtaaggactcccctaataagctcagtcatattggcgataaatcctgctccagtcattcatcctctaacaccctctcatctaatactagtagcaattctgacgacaaacatttcggttccggcgacctgatggacccagagctccttgggctgacctacattaagggcgcctctacagatagcgggatcgacacagccccatgtatgccagccacaattctggggccagtccatctggcaggatcccgcagtctgatccatagcagggccgagcaatgggcagatgccgccgacgtttctggacccgatgacgagcctgctaagctgtactcagtgcacgggtatgcatccacgatatccgctggatccgcagccgaaggttcaatgggtgatcttagtgaaatcagtagccattcgtccggcagccatcatagtggcagcccatctgcccactgtagcaagtcctccggcagtctggacagcagcaaagtgtacattgttagccatagtagcgggcagcaggtgccaggctctatgagcaagccataccaccggcagggagctgtaaacaagtatgttataggctggaagaaaagcgaagggtctcccccaccagaggagcctgaagtaaccgaatgtccgggcatgtattccgagatggacgtcatgtctaccgccacccagcaccagaccgttgtaggcgacgcagtggccgagacccaacacgtgctgagtaaagaagatttcctgaagctcatgcttcctgatagcccccttgtcgaggaagggcgcagaaaattctcattctacggaaatctgtctcctagacgttcactatatcggaccctcagcgacgagtctatatgttcgaatagacggggatctagtttcggatccagtagatcctctgtccttgaccaagcccttcctaacgacattttattttcaacaactccaccgtaccactctacccttccccccagggcccatcccgcaccctccatgggatcgctgcgtaatgaattctggttctcggacgggagcttatcggataaaagtaaatgcgcagacccggggttgatgcctctgcccgatactgctacgggactcgactggacgcacctggtggacgcagcccgagcctttgaggaccagcgcgtggcatctttttgcaccttgacagacatgcagcacggccaggatctcgagggcgcacaagagttaccgctctgtgtggatccaggctccggcaaggaattcatggatactacgggggagcgttctccatccccgctcacgggcaaggtcaaccagctcgagcttattctgaggcagcttcagacagacctccgcaaagagaagcaggataaagcagtgttgcaggccgaagtgcagcatctgaggcaggataacatgcgcctgcaagaggagagtcaaacagcaaccgcccagcttcggaagttcactgaatggttctttactactatcgacaaaaaatcctag

SEQ ID NO: 134400 - DNA, 5169 bp, synthetic construct
  misc_feature 1..5169: note = Description of Artificial Sequence: Synthetic coding sequence
  source 1..5169: mol_type = other DNA
atgtctgacccccgacagagccaagaagagaagcataaactggggcgggcctccagcaaattcaaggatccccctcggattatgcagtcagacgactattttgcccggaagttcaaggcgataaatggcaacatgggccctactacgagtttaaacgccagtaattcgaacgagacaggcgggggtgggccggccaacggcaccccggccgttcctaagatgggggtgcgcgccagggtgtcggaatggccacctaaaaaagattgttctaaggagctgacttgtaaggccctatgggaatctcgctcccagaccagctatgaaagtattacttcggtactgcagaacgggcagtctgatcagtctgaggggcagcaggacgaacagctggatctagacttcgtggaggctaaatataccataggggacatcttcgttcacagcccacagcgtggactgcaccctattcgacagcgatccaacagtgacgtcactatttccgatatcgatgccgaggacgtattggatcagaatgctgtaaacccaaacactggtgcagctctgcacagggagtatggcagtacatcgtctatcgatcgtcagggattatctggagagaactttttcgccatgctccgagggtacagggtagagaactacgatcataaagccatggttcccttcggctttcctgagtttttcaggtgcgaccctgccataagccccagcctgcatgctgccgcccagatctcccggggggagttcgtacggatctcaggactggactacgtagactcggcccttctgatgggtcgcgaccgggataagccattcaaaagacgcctcaaaagcgaatcagtggagacatcactgttccgcaaattgaggaccgtaaaatctgaacatgaaacgtttaaatttacctcagaattggaggagtccagactagaacgcggaatacgaccgtggaattgccaacgatgttttgctcattatgatgtccaaagcatcctcttcaacatcaatgaagccatggccacacgagcgaacgtgggaaagcggaagaacattacaactggagcatccgctgcttcccaaacacagatgcccacaggacaaacaggaaactgcgagtcccccctggggtccaaggaagacctcaactcaaaggaaaaccttgatgccgatgagggcgacgggaagtctaatgatctggtgctctcttgcccttatttcagaaatgagaccggtggggagggggaccggaggatcgcattgagtagggcgaactcaagctccttctcttccggggagagctgcagcttcgaatcctcattgagcagtcactgcaccaacgctggtgtctctgttctagaagttccacgtgaaaatcagcccatacaccgggaaaaggtaaagaggtacatcatcgagcacatcgacctgggagcttactactatcggaaatttttttacggtaaggagcaccagaattattttggaattgacgaaaacctcggaccggtggcggtgagcatccggcgggagaaggtcgaggacgcaaaggaaaaggagggatcccagttcaattaccgcgtggcattccggacctccgagctgactacactgcgtggcgcaattctcgaagacgccatcccatcaacggctcgacatgggactgctagaggcttgccactgaaggaagtcctggaatatgtcattcctgaactgagtatccagtgcttgaggcaggcgtctaacagccctaaggtaagcgaacaactcctgaagctggatgagcagggcttgtctttccagcataagatcgggattctgtattgtaaagcagggcagtccactgaggaagagatgtacaataatgagactgctggtcctgcttttgaagaattcttggacttgcttggtcaacgcgtgcggttgaaggggttctccaagtatagagcccagctggacaacaaaactgactctactggtacccacagcttgtacaccacctacaaggactatgagctcatgttccacgtgtcgacattgctgccctatatgccgaacaacagacagcaacttctgcgcaaaaggcacataggaaatgacatcgtgacgatagtgtttcaggaacctggagcgctccctttcacccctaagtccattaggtcacacttccaacacgtatttgtcatcgtgaaggtacataacccttgcaccgagaatgtctgttattccgtgggggtgtctcggtcgaaagatgtgccaccatttggtcctcccattccgaaaggcgtaaccttccccaaaagcgctgtgtttcgggatttcctgttggccaaagtcattaacgctgagaacgcggcacataaatctgagaaatttagagctatggcaacacgaacccgccaggaatacttgaaggatctggctgaaaacttcgtgactaccgccaccgtcgatacatctgttaagtttagcttcataaccctgggcgccaagaagaaggaaaaggtgaaaccccgtaaagacgcccaccttttcagcatcggcgcaatcatgtggcacgtaattgccagggactttggccagtctgcagacatcgagtgtctactcgggatatcaaacgaattcataatgttgatagaaaaggacagcaaaaacgtggtatttaattgctcttgtcgcgatgtgattggctggaccagtggcttggtttcaataaaggtcttttacgagcgaggagagtgtgtgctgctgtcctcagtggacaactgcgctgaagacattagggagatagtgcagaggctcgtgatcgtgacccggggctgtgaaaccgtagagatgactctgcgcagaaatggcctgggtcaattagggttccatgtaaacttcgagggcatcgtggctgacgttgagcccttcggcttcgcctggaaagcaggtctgcggcaggggtcccggctggtggagatttgcaaagttgccgtagctactttgacccatgagcaaatgatagacctgctgcgaacctccgttacagtgaaggtggtcataattcagccacacgatgacgggtctccacgccgcggatgtagcgagctgtgccgcatccccatggttgagtacaagttggactctgaagggaccccatgtgaatacaagacgcccttccgcaggaatacaacatggcaccgcgtcccgacccctgccctgcagccactatctcgcgcatcaccaattccgggcacacccgatcgcttgccttgtcaacagctacttcagcaagcccaggctgcaatccccaggtctacctctttcgacagaaaactgcccgacggaaccagatccagtcctagtaatcaatcgtcgtcgagcgatccaggtccaggcggcagcggtccgtggcgccctcaggtagggtacgacggatgtcagtcaccgttactcctggaacatcagggttcaggccccctggaatgtgatggagcgcgggagcgagaagacaccatggaagccagcaggcatccggaaacaaaatggcatggccccccctccaaggtccttggttcatacaaggaacgcgcccttcaaaaggatggctcatgtaaggattccccgaacaagttatcccatatcggggacaaaagttgtagcagccacagtagttctaacacactgtcaagcaacacgtccagcaattccgacgataaacacttcgggtccggagatttgatggaccccgagctgcttggtcttacctacataaaaggtgcaagtacggatagtggtatcgacacagctccatgtatgcctgcaactattctcggtcctgttcacctggccggatcaaggtctttgatccactcacgcgccgagcagtgggccgacgcagccgatgtcagcggtcccgatgacgaacccgcaaagctctactcagtgcacggctacgctagtacaatttcagcggggtccgctgccgaggggagcatgggggacttaagcgagattagcagccacagctcgggttcccaccattcaggcagcccaagcgcgcactgcagtaaatcttccggtagtttagattcaagtaaggtgtacattgtaagtcattcatccggacaacaggtcccaggcagtatgtctaaaccttaccatcgtcagggtgctgtaaacaaatacgtgataggctggaagaaaagcgaaggctctcctccccccgaagagcccgaggtcaccgagtgccccgggatgtattcagagatggatgtcatgtccacggctacccaacatcagacagtggtaggagatgcagtggccgagactcagcacgtgctcagcaaagaggatttccttaagctcatgcttcccgacagcccactggtagaagagggaaggcgtaaatttagtttttacggcaatctatccccaaggaggtctctgtacaggacactgagcgacgaaagcatttgtagcaatcgacgcggttctagctttggctcctcccgctccagcgtcttggatcaggccctgcctaatgacatcctcttctccacaacccccccctaccactccaccctgcctccaagggcacacccagctccaagcatgggcagcctgagaaatgagttctggttcagcgacggtagtctgtccgataagtctaaatgtgccgaccctgggctcatgcccctccctgacaccgcaactggtctggattggacacatctggtggatgccgcacgggcattcgaggggcttgatagtgacgaggagctgggcttactctgccatcacacctcttatctcgatcagcgcgtcgcctctttctgcacattgacggacatgcagcacggccaggacttggaaggcgctcaagagcttcctctatgcgtggatcccggatctggaaaggagttcatggacactacaggtgaaaggagtccttcaccactgacggggaaggtgaaccagctagagctgattctgcggcagcttcagaccgatcttaggaaagaaaagcaggacaaagccgttcttcaggcggaggtgcaacacctgcggcaagataacatgcgcctgcaggaagaatcgcagactgccacagcacaactgagaaagtttacagagtggttctttacaaccatcgataagaaatcttag

SEQ ID NO: 134401 - DNA, 918 bp, synthetic construct
  misc_feature 1..918: note = Description of Artificial Sequence: Synthetic coding sequence
  source 1..918: mol_type = other DNA
atggatcccaaagggcttctcagcctgacgtttgtacttttcttgtcattggcctttggagcatcttatgggaccggaggaaggatgatgaactgtcccaagatactgcgtcaactgggaagcaaggtgctgctccccctgacctacgaacggataaataagtctatgaacaaatctatccacattgtggtcaccatggcaaagagcttagagaactctgtagagaacaagattgtatcccttgacccctcggaggcagggcctcctcgttacctgggagaccgatacaaattctatctggaaaacttgacactggggatccgggaaagccgcaaggaggatgaggggtggtatctgatgacactggagaagaacgtgtcggtgcagaggttctgtttgcagctgcggctgtacgaacaggtgtccacgccagagataaaagtgttgaacaagactcaggaaaacgggacttgcacccttatcctgggttgtaccgtcgagaaaggagatcatgtcgcttattcctggtcagaaaaagcgggtacccaccctttgaacccagctaatagctcgcacctgctaagcctgactttgggcccacagcatgctgacaatatctacatatgcaccgtgagcaatcccataagcaataacagccagacattctccccttggcccgggtgccgaactgatccctccggaaaaacgaaccactaccagaccactgtggaaaaaaaaagcctaaccatttacgcccaagtccagaaaccaggtcccctgcagaagaagcttgattcttttcccgcccaggatccgtgtactactatttatgtggccgcaacagaaccagtacccgagagcgtgcaagagactaattctattaccgtatatgcttctgtgacacttccggagtcctag

SEQ ID NO: 134402 - DNA, 1008 bp, synthetic construct
  misc_feature 1..1008: note = Description of Artificial Sequence: Synthetic coding sequence
  source 1..1008: mol_type = other DNA
atggacccaaaggggttgctgagcctcacatttgtcctcttcttatcactggccttcggggcatcttacggcacaggagggagaatgatgaactgtccaaaaattcttcgccaattagggtctaaggtgctactcccactcacctacgaacggatcaacaagtccatgaacaagagcatacacatcgttgtaaccatggcaaagtccctcgagaactctgttgaaaacaaaattgtttctctggacccatctgaagctggacctcctaggtatctgggtgatcggtataagttctaccttgaaaacttgaccctaggcatcagggaatctagaaaagaggatgaaggctggtatttgatgactcttgagaagaacgtgtcagtccagcgattttgcctgcagctgcgactgtatgaacaggtttccacgcccgagatcaaggtgctcaacaaaactcaagaaaatgggacatgcactctcatcctgggatgtacagtggagaaaggggatcacgtagcctattcatggagtgagaaagccgggacccatccgttaaatcctgccaattcttcacacctgttgtcactcaccttagggcctcaacacgccgataatatttatatctgtacggtgtctaatccaattagtaacaacagccagacgttcagcccctggccagggtgccgcacagaccccagcgagacaaaaccttgggctgtctacgctggcctcctgggcggcgtgattatgattctcattatggtggttattctgcagctgagacggaggggcaaaaccaatcactatcagactaccgtggagaagaagagtctgaccatttacgcccaggtgcagaagccgggccctctgcagaaaaaattggatagtttccccgcccaggatccctgcactacaatatacgtcgccgccacagaaccagttccagaatctgtccaggagactaactcgatcactgtgtacgctagcgtaaccctgcctgagtcttag

SEQ ID NO: 134403 - DNA, 897 bp, synthetic construct
  misc_feature 1..897: note = Description of Artificial Sequence: Synthetic coding sequence
  source 1..897: mol_type = other DNA
atggatcctaaaggcctcctcagtctaactttcgtactgtttctctctttggcattcggcgcatcctacggaactggaggtagaatgatgaactgccctaaaattcttagacagctgggtagcaaagtgcttcttccactaacttatgagcgtataaataaatccatgaataaatccatccacatcgtggtgaccatggccaaatccttagagaactcagtggaaaacaagatcgtgtccttggacccaagcgaagccggtccccccaggtacctcggggacaggtacaagttctatctcgaaaacttaacactgggtatccgggagtcgcggaaggaagacgaggggtggtacctgatgacacttgaaaagaacgtcagtgtacagcgtttttgcctgcagctgagattgtatgagcaggtgtccaccccagagattaaggtgttgaataaaacgcaggagaacggaacatgtaccctcatccttggctgtaccgtggaaaagggcgatcacgttgcttactcctggtccgaaaaggcaggtacccatccactcaaccctgctaactcctcacatctcctgagcctaaccctgggccctcagcacgcagacaacatctacatatgtacggtgtccaatcctatcagtaacaattctcagaccttttccccatggccagggtgtaggactgatccttctgaaactaagccttgggctgtatatgccgggctcctcggtggtgtcataatgatccttatcatggtcgttattctgcagcttagacgcagaggaaagaccaatcactaccagacaacagtcgagaaaaaatccttgaccatttacgctcaggtgcagaagcccggtgattcgcaccatcagactagtgatctgttttag

SEQ ID NO: 134404 - DNA, 435 bp, synthetic construct
  misc_feature 1..435: note = Description of Artificial Sequence: Synthetic coding sequence
  source 1..435: mol_type = other DNA
atggacccgaagggacttctttctctcacctttgtcttattcctgagcctggccttcggggcctcctatggtactggtggtcgaatgatgaattgcccaaagattttgagacagctgggtagcaaagtactcctgccgctgacttacgaaaggattaataaatcaatgaataagtccattcacatagtcgtgactatggctaagagcctagaaaactctgtggaaaacaagattgtgtcactcgaccctagtgaggctgggcctcctcgctatctaggcgaccgctataagttctatctggaaaacctcactcttggtatccgggagtcacggaaggaggacgagggatggtatctgatgaccctggagaagtccctccatttcggatatctgtactttgtcctgggagccgaccatgataatttgcagacttag

SEQ ID NO: 134405 - DNA, 810 bp, synthetic construct
  misc_feature 1..810: note = Description of Artificial Sequence: Synthetic coding sequence
  source 1..810: mol_type = other DNA
atggaccctaaaggcctactgagcctgaccttcgtattgtttcttagcctggccttcggggcctcgtacggtactgggggcaggatgatgaattgtcccaagatcctgcgtcagctgggcagcaaggtgctcttgcctctgacctatgagagaatcaacaaatctatgaataaaagcattcacattgtggttaccatggccaagagtttggagaacagtgtagagaataagatcgtatctctcgatccatctgaagccggacctcctcggtacttgggcgataggtataaattctatctcgaaaaccttactctcgggattcgcgagagtcgcaaagaggacgagggctggtatctaatgaccctggaaaagaatgtcagtgtgcagcgtttctgtctgcagctgcggctgtacgaacaggtgagcactcctgagatcaaggtcttgaacaagacccaggagaacgggacatgtaccttgatcctcggctgcaccgtggagaaaggcgaccacgtggcatactcttggtcggaaaaagcaggaacacacccgcttaatccggccaactcatcacatctgcttagccttacattgggaccgcagcacgccgataacatatatatctgcaccgtgagcaatcctatctcaaacaactctcagacattcagcccatggccaggttgccgtaccgatcctagtgaaacgaaaccatgggccgtttacgcagggctgctcgggggagtgattatgatactgattatggtcgtcatactgcagctgcgtcggagggcctcttcggaagagacttag

SEQ ID NO: 134406 - DNA, 1029 bp, synthetic construct
  misc_feature 1..1029: note = Description of Artificial Sequence: Synthetic coding sequence
  source 1..1029: mol_type = other DNA
atgtgtagtaccatgagcgctccgacctgcctggcacacttgcccccttgtttcttgctgctggcgctcgtcctggtaccatccgacgcgtcaggtcagagtagcagaaacgattggcaggttctgcaaccggagggaccaatgctagtcgccgagggggaaactctgctgctcagatgcatggttgtgggctcttgtacagatggcatgataaagtgggtcaaggtgtccacccaggatcaacaagagatctataacttcaagagaggctctttccctggtgtcatgccaatgattcaaagaacaagcgaaccattaaactgcgactactccatttatatacacaacgtgactcgtgagcatacaggaacttaccactgtgtgcgatttgacggcttaagtgagcattccgagatgaaaagcgatgagggcaccagtgtcctggtgaaaggcgccggggaccccgagcccgatctgtggataatccagcctcaagagctagttttaggcacaacaggcgatactgtgttcttaaactgcacggtgctgggtgacggcccacccggccccatcagatggttccaaggcgccggattaagccgggaagctatttacaatttcggcggaatctctcaccctaaggagactgccgtccaggcatccaataacgactttagcatcctgctgcagaacgtgtcgtcagaggacgcggggacttactactgtgtgaaattccagaggaaaccgaataggcagtacttaagcggccaaggtacctccctaaaggtgaaggctaaaagcaccagtagtaaagaggccgagttcacgtccgagccggccaccgagatgtcacccactggacttctcgtggtgttcgcccctgtggtgctaggcctgaaagctataacactggccgccctgttgctggctctagctacgagccgccgctcaccgggccaggaggatgtgaaaactactggaccagcgggggcgatgaacactcttgcctggtcaaaagggcaagaatag

SEQ ID NO: 134407 - DNA, 624 bp, synthetic construct
  misc_feature 1..624: note = Description of Artificial Sequence: Synthetic coding sequence
  source 1..624: mol_type = other DNA
atgtgtagcacgatgagcgctcctacctgcctcgcccatctacccccctgctttttactgttggcactggtgctggtccctagcgacgccagcgggcaaagttctagaaacgactggcaggtacttcagcctgaggggcccatgttagtggccgagggcgctggtgatccagagcctgacctgtggattattcagccacaagagctggtgttgggtacaactggagatacagtttttttaaattgtacagtcctgggagatggccctccaggccctatccgctggttccaaggcgctgggctgtcaagggaggccatttacaactttggtggtatttcacacccaaaagaaactgcagtgcaggcttcaaacaacgacttttctatcctcctgcagaatgtcagcagtgaggacgccggcacgtactattgcgtgaagttccaaagaaagcctaacaggcaatatctaagcggccaaggcacttccctcaaggtaaaggagcagaacttgcctcttccaaagaggcaaaactctcctgtgaatctccagttgagatgcttgcaacaggtttcggtccctacaagcgtagagtcaatgagcccaccacaggcaagagggccatag

SEQ ID NO: 134408 - DNA, 624 bp, synthetic construct
  misc_feature 1..624: note = Description of Artificial Sequence: Synthetic coding sequence
  source 1..624: mol_type = other DNA
atgtgtagcaccatgtcagcgccgacatgcttggctcacctgccaccatgcttcctgctgctggcactagtcttagtaccgagcgatgcttcgggccagagttctcggaatgattggcaggttttacaaccagaaggaccaatgctggtagctgaaggcgccggggaccccgaacctgacctttggatcattcaaccccaggaactcgtgctgggcaccactggtgacaccgtgtttctcaattgcaccgtcctgggagacggtccacctggacccattcgatggttccagggtgctgggctgtctcgggaagccatttataatttcggaggcatcagccaccccaaggagactgccgtgcaagcgagtaacaatgatttttcaatcctcctgcagaatgtgtcttccgaggacgccggtacatactattgtgtgaagtttcagcgaaaaccaaatagacagtatctctctggccagggcacatctcttaaggtgaaagaacaaaacttgcccctccctaaacggcagaatagccccgtgaacctacagctgagatgcctgcaacaggtgtccgttcctacctctgtggaaagcatgagtcccccacaggcccgcggtccttag

SEQ ID NO: 134409 - DNA, 735 bp, synthetic construct
  misc_feature 1..735: note = Description of Artificial Sequence: Synthetic coding sequence
  source 1..735: mol_type = other DNA
atgtgctctaccatgtccgctccaacatgcctggcacacctccccccttgctttctgctgctcgcactggtgttggtgccaagtgatgcaagcggccagagcagcaggaatgactggcaggtgctgcagcctgagggaccaatgctcgtggccgagggcgctggagaccctgagcccgatctctggattattcagcctcaagaactagtgctcggtacaaccggagacactgttttcttaaactgcaccgttcttggcgatggacccccgggccctattcgttggttccagggggccggcctgtcacgggaagccatttataacttcggcggcataagtcaccctaaagaaacagcagtgcaggccagtaacaacgatttcagcattctgctacaaaacgtctcctcggaagatgccgggacctactattgtgttaagttccagagaaaaccaaatagacagtaccttagtgggcagggtacatccctgaaagtgaaggctaaatctacaagctcaaaggaagcagagttcacttctgaacctgcgaccgaaatgtcccctaccgggctgttggtagtgttcgcacccgtcgttctaggcctgaaagccatcacactggctgccttgcttttagccctggctactagtcggcgctcgcctgggcaggaggatgtcaaaacaacaggccctgctggggcaatgaataccttggcctggtctaaggggcaggaatag

SEQ ID NO: 134410 - DNA, 633 bp, synthetic construct
  misc_feature 1..633: note = Description of Artificial Sequence: Synthetic coding sequence
  source 1..633: mol_type = other DNA
atgaaaagcgacgagggcactagcgtccttgtgaaaggggcgggagatcccgaacccgacctttggatcatacaaccacaggaactcgtgctaggcacgactggggacacagtgtttttgaattgcaccgttctcggggacggaccacccgggcccattcggtggttccagggggccggactctctcgtgaggcaatttacaacttcggtggcatcagccatcccaaggagaccgcagtgcaggcatccaacaacgacttcagcatattgcttcagaacgtcagttccgaggatgccggcacgtattactgcgtgaagttccagaggaaacccaaccgtcagtaccttagcggccaaggaacctccctaaaggttaaagctaagagtacatcctccaaagaagccgagtttacaagcgagcccgcaacagaaatgagtcccactggcgaacgtacacacctcagcggcgtgaacgagtcccctaccgggaaaggtgcaatgaatggcctcgttatgggccgggagcagtcccagaccccgggagcaaacctgccaccgaggatgctgccaggccttcacctcaattgtcgtactaggactcctgaaaaccacgtgattactgcccagctgtag

SEQ ID NO: 134411 - DNA, 2046 bp, synthetic construct
  misc_feature 1..2046: note = Description of Artificial Sequence: Synthetic coding sequence
  source 1..2046: mol_type = other DNA
atgaacgcatcttccgaaggagagtcatttgccggtagcgtgcaaattccaggcggtactaccgtgctggtggaactgacacccgatatccacatctgtgggatctgcaagcaacagttcaacaacctcgatgcatttgtcgcccataaacagtcagggtgtcagctgactggaacttctgctgcagccccctccactgtccagttcgttagcgaagagaccgttcccgccactcagactcaaactactacccggacaataacgtccgaaacacagacgatcacagtttccgctcccgagtttgtcttcgagcacgggtatcagacttatcttccaaccgagagtaacgagaaccagaccgcgacagttattagcctacctgctaagagccgcacaaagaagcccaccacccctcctgcccagaaaaggctcaattgttgctaccctgggtgccaattcaagacggcctatggcatgaaagatatggagaggcacttgaaaattcatacaggagacaagccacataaatgtgaagtttgcggtaaatgtttttctagaaaagacaaattgaagacccatatgcggtgccatactggagtgaaaccatataagtgtaagacttgtgattacgctgctgcggattctagtagtctgaacaagcatctgcggatacactcagacgagcggccatttaagtgccaaatctgcccttatgcatcacggaactccagtcagctgactgtgcacctacgttcccacactggagatgcccctttccaatgctggttgtgctccgctaaattcaagatctcttctgatctgaaaaggcatatgcgggtgcactccggtgaaaagccattcaagtgtgagttctgcaacgtgcgctgtactatgaaaggcaatcttaagtcacatataagaatcaagcactccgggaataatttcaagtgtcctcactgcgacttcttgggagatagcaaggccacgctccgcaaacacagtcgcgtgcaccagagcgagcatcctgaaaagtgcagtgagtgctcttactcctgctcttccaaagccgccctccgtatacatgaacgaattcactgtactgaccggcccttcaaatgcaactactgctcgtttgataccaagcaaccgagtaacctgtctaaacacatgaagaagttccacggtgacatggtgaaaactgaggctctggaacgcaaagacaccgggaggcagagctctaggcaggtcgccaaattggacgccaagaagtcattccattgcgatatctgtgatgccagctttatgagggaggattccctgcgcagccacaagcggcagcattcagaatactccgagtccaagaattcagacgtgactgtgcttcagtttcagattgaccctagtaagcagcccgcaaccccactaacggtgggacaccttcaggtgcctctgcagcccagtcaggttcctcaattcagtgaaggtcgagtgaaaatcattgtcggacaccaggtgccccaggccaatactatcgtccaggccgccgctgctgccgtcaatattgttccacctgcacttgtagcacagaatccggaggaactgcccggcaatagccggttacaaatcttgaggcaagtatctctcatcgcccctcctcagtcctcccgttgtccctctgaagcaggagcaatgacccagccagctgtgctgttgacgacccacgaacagactgacggcgctacacttcaccagaccttaatccccactgcgtcaggaggcccccaggagggtagcggaaaccagacattcatcacaagcagcggtattacatgcaccgacttcgagggcctgaacgcgctgatccaggaagggacggcagaggtcacggtggtgagcgacggaggacaaaacattgccgttgctacaaccgccccccctgtattctcctcctcttctcagcaggagctgcccaagcaaacttacagtattattcagggcgcagcccatcctgcgctgctttgtcctgccgactcaatcccggactag

SEQ ID NO: 134412 - DNA, 1164 bp, synthetic construct
  misc_feature 1..1164: note = Description of Artificial Sequence: Synthetic coding sequence
  source 1..1164: mol_type = other DNA
atgccagtccccgcatcctggccgcaccctccaggtcctttcctgctccttactctcctgttgggactgaccgaggtagctggggaagaagagctgcaaatgatacagcctgagaaacttctactggtcacggtggggaaaactgccaccctacactgcaccgtgacttctctactccctgtcgggcctgtactttggttccgaggagtgggccctgggcgagagctgatatataaccagaaggaggggcattttccccgtgtgaccaccgtgagcgacctgaccaagcgtaacaacatggacttctcaatcaggattagctccatcacaccggcagatgtgggcacgtattattgcgtgaagtttcgcaaggggtccccagagaatgttgagttcaagtccggccctggcactgagatggcgttaggcgccaaacccagcgcgccagtagtgctgggaccagccgcccgcacaacaccagaacacacggtgtcgttcacctgcgaaagccacggctttagcccaagggacataaccctgaaatggtttaagaatggcaatgaactttccgattttcagactaacgtcgaccctaccggccaatctgtagcttactctatccggtcaaccgcccgggtggtactcgatccatgggacgttcgcagtcaggtaatttgtgaagtggcccacgtgacactgcagggagaccccctgcggggtacagctaacctgagtgaggcgatacgcgttccacccactttggaggtgactcagcagcctatgagagttgggaaccaggtcaatgtgacctgtcaggtccgcaaattctatccccaatccctccagctgacctggagtgaaaatggcaatgtttgtcagagagagacagccagtactcttactgaaaacaaagacggcacatataattggaccagctggttcctagtcaatatctccgatcagcgggacgatgtggtgctgacatgtcaagtcaaacacgatggccagcttgctgttagcaaacggcttgctcttgaggtcactgtgcatcagaaggaccagagcagcgatgccacccccgggccggcaagcagccttaccgcgctcctgctgatcgccgtactgttaggcccaatctacgttccttggaaacagaaaacgtag

SEQ ID NO: 134413 - DNA, 513 bp, synthetic construct
  misc_feature 1..513: note = Description of Artificial Sequence: Synthetic coding sequence
  source 1..513: mol_type = other DNA
atgccagttccagccagctggccccaccccccgggaccctttctcttattgacattattgcttggacttacagaggtagccggagaggaggagttacaaatgattcagccagaaaagctgcttctggtaaccgtgggaaagacagccacactacattgtactgtgacatctcttctgcccgtgggcccagtgctctggttccggggggttggccccggcagggagctgatttacaaccaaaaggagggtcacttccctagggttacgacggtgtccgacctgacaaagcgcaacaacatggacttcagcatcagaatttcaagcattactcctgccgatgtgggcacttattattgtgttaagtttaggaaggggtcacctgagaatgtcgagtttaaatcaggccctggcacggagatggctcttggtggccccgcttcctcactaacagcactccttctgattgcagtcttgctagggccgatttatgttccatggaagcagaagacatag

SEQ ID NO: 134414 - DNA, 1065 bp, synthetic construct
  misc_feature 1..1065: note = Description of Artificial Sequence: Synthetic coding sequence
  source 1..1065: mol_type = other DNA
atgattcaaccagagaagctgctgctggtgacagtcggcaaaacagcaaccctgcactgtacagtgacctccttgcttcccgtcggccctgtcctttggttcaggggtgtggggcccggacgcgaactgatctacaatcaaaaggagggacattttccacgcgtcacaactgtgagtgatcttactaagcgcaacaatatggatttctccatcaggatttcttccattaccccagcggatgtgggcacgtactattgcgtcaaattccgcaaaggatccccggaaaacgtggagttcaagtcagggccgggaaccgaaatggccttgggcgccaaaccaagcgcccctgttgtattgggcccagctgctcgaacaactcccgaacacactgtttccttcacctgcgagagccatgggttctcgcccagagacatcactctgaaatggtttaagaacggaaacgaactgtccgatttccaaactaatgttgaccccaccggccagagtgtggcttattctatccgatccactgctcgggttgttctcgacccatgggacgttcgttcccaggtcatatgtgaggtagcccacgtcacacttcagggcgatccactacgtgggacggcaaatctctcagaggcaatccgcgttcctccaacgcttgaagtgacgcaacaacctatgagggtcggaaaccaagtgaacgtcacctgccaggtcagaaagttttacccccagtctttacagctcacttggtcagagaacgggaatgtttgtcaaagggagaccgcctctacacttacagagaacaaagatggaacctataactggacaagctggttccttgtcaatatcagcgaccaacgagacgacgtggtcttaacatgccaagtcaagcacgacggccagctcgccgtgagcaagaggcttgcacttgaagtgactgtccatcagaaggaccaaagttcggacgccacccctggccccgcctcttccttaacggcccttctcctcatcgctgtgctcctggggcccatatacgtgccttggaaacagaagacctag

SEQ ID NO: 134415 - DNA, 831 bp, synthetic construct
  misc_feature 1..831: note = Description of Artificial Sequence: Synthetic coding sequence
  source 1..831: mol_type = other DNA
atgcctgtgcctgccagctggccccatccccctggacctttcctcctcctgaccctcctgttgggtctcactgaggtggccggagaagaggaattgcaaatgatccagccagagaaattactgctggttactgtcggaaagactgcaacactgcattgtactgtgacatctttgctccccgtagggcctgtgctctggtttaggggcgttgggcctgggcgggagctgatatataaccagaaggaaggccactttcctagggtgaccactgtgagcgatctcactaagaggaataatatggacttcagtatccgaatatcatccatcaccccggcagatgtgggcacctattactgtgtcaaattcaggaagggcagtcccgagaatgtggagtttaaaagcggccctggtaccgaaatggccctaggcgctaaaccatcagctcctgttgtacttgggcctgcagcacggacgacgcctgaacacacagtctcttttacctgtgagagtcacggattctctcccagagacatcacgctgaaatggttcaagaacggcaatgaactgtcagattttcagaccaatgtggaccctaccggccaatcagtggcttatagtatccggagcacggctcgggtggtgctggatccttgggacgtaagatcccaggtcatatgtgaagttgcccacgttacactccaaggggaccctctgcggggtaccgctaacttgagcgaggcgatacgggggcccgcgagttccctgactgctctgctgctgatcgcagtgttgctgggccccatttatgtcccctggaagcaaaagacgtag

SEQ ID NO: 134416 - DNA, 1386 bp, synthetic construct
  misc_feature 1..1386: note = Description of Artificial Sequence: Synthetic coding sequence
  source 1..1386: mol_type = other DNA
atggctccccagtctctaccttccagccggatggcgccacttggcatgcttttggggctgctgatggcggcttgcttcaccttctgcctttctcaccagaacctaaaggagtttgctctgaccaacccggagaagagttctactaaggaaaccgagaggaaagagaccaaggcagaggaggagcttgatgccgaggtactcgaggtatttcaccctacgcacgagtggcaggccctccagcctggccaggccgtaccagccggtagccacgttagactcaatctgcagactggggagagagaagccaagttacagtatgaagataagtttcgcaacaacctgaaagggaagcgactggatattaatactaatacctatacatcgcaggacctcaagtcagccctggctaagtttaaagagggagccgaaatggagtcctccaaagaggataaggctaggcaggctgaggttaaaaggctgttccgaccaatagaggaattgaagaaagactttgatgagttaaacgtcgttattgagacagatatgcagatcatggtcaggctgatcaataagttcaacagttcgtcgtcatccttagaggagaaaatagcggcgctgttcgacctcgaatactatgtccaccagatggataatgctcaggacctcctgagctttggtggtttacaggtagttattaacggacttaactccaccgagccccttgttaaggagtatgctgcttttgtgcttggggctgccttctcctccaacccaaaagtgcaggttgaagctatcgagggaggcgcgctgcaaaagctgctcgttatccttgctactgagcagcccctgacggccaagaagaaagttctcttcgcattatgtagcctgctgcgtcacttcccatacgcacagagacagttcctgaaacttggcgggcttcaagtcctgcgaaccctggtgcaagaaaaaggtactgaagtgctagctgtacgggttgtcacattgttgtatgaccttgtgactgagaagatgtttgccgaggaagaagccgagttgacacaggagatgagcccagagaaactgcagcagtacaggcaggtgcatcttctgccgggcctgtgggagcagggctggtgtgagattactgctcacttgttagcacttccagaacatgatgcccgggagaaggtcctgcagacactgggcgtgctgctgactacatgtagggaccgctataggcaggacccacagctcggcagaaccttggcctctctgcaggccgagtaccaagtcctcgcatcactcgaacttcaggacggagaagatgagggttacttccaggagctgcttggttctgtgaactcactgctgaaggagctcagatag

SEQ ID NO: 134417 - DNA, 1386 bp, synthetic construct
  misc_feature 1..1386: note = Description of Artificial Sequence: Synthetic coding sequence
  source 1..1386: mol_type = other DNA
atggcaccacaatcactgccatcttcgaggatggctccgttgggaatgttactgggtctgctcatggctgcttgcttcacattttgtctgtcacaccagaatttaaaggaatttgccctcaccaacccagaaaagtcctcgaccaaagaaaccgagagaaaagagacaaaagccgaagaggaactggatgccgaggttttagaggttttccatcccacgcacgagtggcaagccctgcaacctggccaagctgtccctgcaggctcacatgttcggcttaatctgcagaccggagaacgggaggcgaagttacagtacgaggacaagtttagaaataacctgaaggggaaacggctggacataaataccaacacgtacaccagtcaggaccttaaatccgccctggcgaaattcaaggaaggcgcggaaatggaaagctccaaggaagacaaggcacgacaggccgaggtcaagcggctgtttagaccgatcgaggaacttaagaaggactttgacgagctaaatgtggttatcgaaaccgacatgcagataatggtaagactgatcaacaaattcaattcttctagttcctcgttggaggagaagatcgcagccctcttcgaccttgaatactacgtgcatcagatggataacgctcaggatctgctgtccttcggggggcttcaggtcgtcataaacggcctcaacagcaccgagccattggtgaaggagtacgccgcgtttgtccttggcgcggccttttcaagtaatcccaaagtccaggttgaggctatcgagggcggtgcattacagaaactgttggtcatcttggccacagaacaacctttaactgctaagaaaaaggtattgtttgccctgtgttcgctgctccggcacttcccctacgcacagcgacaattccttaaactcggaggtctgcaggtgttgcggactcttgtccaggaaaagggtacggaggttttagcagtgagggttgtaaccctgctgtacgaccttgtgaccgaaaagatgtttgcggaggaagaagccgagctcactcaggaaatgtcccctgagaaacttcagcaatatcggcaggtgcacctgctcccaggtctgtgggagcagggctggtgcgaaatcaccgcccatcttttagccctcccagaacatgatgcacgcgaaaaagttctgcagacgctcggcgtcctattaactacttgtcgggaccgctacaggcaggacccccagttgggccggaccctcgcctccctgcaggctgagtaccaggtactggcatccctggaactgcaggatggcgaagatgaggggtattttcaggagctcttggggtcagtaaacagcctgcttaaggagctgcggtag

SEQ ID NO: 134418 - DNA, 288 bp, synthetic construct
  misc_feature 1..288: note = Description of Artificial Sequence: Synthetic coding sequence
  source 1..288: mol_type = other DNA
atggccccacagtccctgcccagttctaggatggctcctctcgggatgctgctggggcttcttatggctgcatgttttacattttgcctgagtcaccagaacctgaaagagttcgcccttacgaatcccgaaaagtcttctacaaaggagacagaacggaaagaaaccaaagctgaggaagagttggatgccgaagtgctggaggtgttccatccgacgcatgaatggcaggcactgcagcctgggcaggctgtcccagccggcagccacgtccggcttaacctatag

SEQ ID NO: 134419 - DNA, 492 bp, synthetic construct
  misc_feature 1..492: note = Description of Artificial Sequence: Synthetic coding sequence
  source 1..492: mol_type = other DNA
atggctccacagagtctgccctcttctagaatggctcctctcggtatgctgctcggccttctgatggctgcgtgcttcacgttctgtcttagccaccagaatcttaaagagtttgccctgactaacccagagaagagctccaccaaggaaacagaaagaaaggagacaaaagccgaggaggagctggatgcagaggttctcgaggtcttccatcctacccatgaatggcaagccctgcaacccggccaagcagtacccgcaggatcccatgtccgactgaatcttcagacgggggaacgggaggctaagcttcagtacgaagataagtttcgcaataaccttaagggcaaacgactggatattaatacaaatacatacacctctcaggatctaaaaagcgcactagccaagtttaaggagggagccgagatggaatcgtctaaagaagataaagctaggcaggctgaggtgaaacggctgtttagaccttag

SEQ ID NO: 134420 - DNA, 372 bp, synthetic construct
  misc_feature 1..372: note = Description of Artificial Sequence: Synthetic coding sequence
  source 1..372: mol_type = other DNA
atggcaccacaatctctcccaagctcccgcatggcacccctggggatgttactgggccttcttatggctgcctgttttactttctgcctatcccatcagaacttaaaagagtttgccctcaccaacccagagaaaagcagcaccaaagaaacagagagaaaagaaactaaagcagaagaggagctcgatgccgaggtcctggaggtgtttcatcctacccatgagtggcaggctctacagccaggccaagctgtgcccgctggaagccacgttcgcctgaacctccagacgggcgaaagagaggccaagctgcaatacgaagataagtttagaaacaaccttaaggggaaacgcctcgacataaacacttag

SEQ ID NO: 134421 - DNA, 579 bp, synthetic construct
  misc_feature 1..579: note = Description of Artificial Sequence: Synthetic coding sequence
  source 1..579: mol_type = other DNA
atggcagcatgctttaccttctgcttgtcacatcaaaaccttaaagaattcgccctgacgaatccagagaaatcttccacaaaggagacagagagaaaagagactaaggctgaggaggaacttgatgctgaagtgctggaagtattccaccctactcatgagtggcaagcacttcagcccggtcaggcagttcccgctggatcccacgttagacttaatcttcagactggagaaagagaagcaaaactgcagtacgaggataagtttaggaataacttgaagggtaaacgccttgacattaacacaaatacatataccagccaggatctaaaatccgcccttgctaagttcaaggagggagcagagatggagagttcaaaggaggataaaatggacaatgctcaagacctcctgtccttcggcgggttacaggtggttatcaatggactgaactccactgagccgctggtaaaggagtatgctgccttcgttctgggcgccgccttctcgagtaaccccaaggtgcaggttgaagctatcgagggaggagcactacagaaattactggtgatactttag

SEQ ID NO: 134422 - DNA, 3822 bp, synthetic construct
  misc_feature 1..3822: note = Description of Artificial Sequence: Synthetic coding sequence
  source 1..3822: mol_type = other DNA
atgaagcggcggctggacgatcaggaaagcccggtttatgccgcacagcagcggcggatcccaggaagtactgaggccttcccgcaccagcatagggtgctggcccccgccccgccggtgtatgaagcagtgagtgaaacgatgcagagtgctaccgggatacagtactcagtgacaccatcctaccaggtttccgcaatgccccagagtagtggctcacatggccctgcaatagcggcagtgcacagttctcatcaccatcccacagccgtgcagccacatggcggtcaggtggttcagtctcatgctcacccagctccaccggtggcacctgtgcagggccagcagcagttccagcgattgaaagttgaagacgccctgagttatctggaccaagtcaagctgcagtttggctcacagccccaagtgtataacgacttcctcgatattatgaaggaattcaaatcacagagtattgatacacccggcgtcatttcgagggtgagccagctgttcaagggtcaccccgacttgattatgggttttaatacatttctccctccgggatacaagattgaagtgcagacaaacgatatggtcaacgtgactactccgggccaggttcatcagatccctacccacgggatccagccccagccacagccccccccacaacatccctcacaaccatctgcacagtcagctcccgcccctgctcaaccagcccctcagccaccgcccgctaaagtatccaagccttcccaacttcaggcgcatacccccgcctctcagcagacccctcctctgccaccctacgcctcaccacgatctcccccagtccagccccataccccagtgacaatttcactgggaactgccccatcactgcagaataaccaaccggttgaattcaaccacgctataaactacgtgaataagattaagaacaggttccaaggccagcccgatatttataaggcttttctggaaattcttcacacctaccagaaagagcagcgaaacgcgaaggaggcaggtggaaactacacgccagcactgactgagcaagaagtgtacgcacaggtggccagactgttcaaaaaccaggaagacttactctcagaatttgggcaatttttgccagatgctaacagcagtgttctgctgtctaagactactgccgagaaggtcgatagcgtgcggaacgatcacggtggaacagtcaaaaagcctcaactcaacaataaaccacagcgaccctctcagaacgggtgccagattaggagacatcctaccggaacaactccaccagtaaaaaagaaacccaaactgttaaatctgaaagattcatctatggcagacgcctccaaacacggcgggggcactgaatctctgttcttcgacaaagtgcgaaaggccctgagatctgccgaggcatatgagaattttttacgctgtctcgttatcttcaatcaagaagtgatctcaagagcggaattagtgcaactggtgagcccctttctggggaaatttcccgagctatttaactggttcaaaaacttcctagggtacaaggagagcgtgcacctggagacgtatcctaaggagagggccaccgagggcatcgccatggagatagactacgcctcatgtaagcgccttggtagctcatacagggccctacctaagtcttaccagcagccgaagtgtacaggaaggacccccctttgcaaggaggtcctgaatgatacatgggtgagtttcccctcctggtccgaagattccacctttgtgtctagtaaaaaaacccagtatgaggagcatatttatcggtgcgaggacgaacggttcgagttggacgtggtcctggaaaccaatttagcaacaatccgggtcctggaagcaattcaaaagaagctgtctcgcctctcggcagaagagcaagcaaagttcaggctggataacacactcggaggaacttccgaagttatacaccgaaaggccctgcagagaatttacgcagacaaggcagccgatataattgacggcctccgaaaaaatccgagcatcgctgtgcccatagttctgaagcgactaaaaatgaaagaagaagagtggcgggaggctcagcgtggttttaacaaagtgtggagggagcagaacgaaaagtattatctgaagtctctggatcaccagggtatcaacttcaagcagaatgacacaaaggttctgcgaagcaagagtttgcttaatgaaatcgagtccatctacgacgagaggcaagagcaagccaccgaggaaaatgctggggtgcccgtgggtccccacctaagcctcgcctacgaagacaaacagatcctggaggacgccgctgcccttatcattcatcatgtgaagaggcaaaccggcatccaaaaggaagataagtacaaaattaagcagatcatgcatcattttattccagatctcttattcgcccagcgcggtgacctgagcgatgtggaggaggaagaagaagaggaaatggatgttgacgaggcgactggtgctgtaaaaaagcataacggagtaggagggagccctcctaagtctaaattgcttttctcgaacacagccgctcaaaaactgcgggggatggacgaggtttacaatttattttacgttaataataattggtacatctttatgcgactacatcagattctgtgccttcgattactgcgcatttgctcacaggcagaacgacagatcgaagaagagaaccgcgaacgggagtgggaaagggaggtgctaggcatcaaaagggacaagtccgactcccctgcaattcagctccgactgaaggagcctatggacgtggacgtggaggactattaccctgcttttctggatatggtgcgcagtctactagacggtaatatcgatagctcccagtatgaagacagcctgagggaaatgttcactattcacgcatatatcgctttcacgatggataaacttattcaaagcatagttaggcagttgcaacacatcgtaagcgacgagatctgtgtgcaagtaaccgacctctacttggctgagaataacaacggagccacaggcgggcagctcaatactcagaacagcagaagtcttctggagagtacctaccaaagaaaggcagagcagctgatgagtgacgagaattgttttaaactgatgttcatccaatcacaagggcaggtacagctcaccattgagctgctagacacagaggaggaaaattccgacgatcccgtcgaggcagagcgatggtctgattatgttgaaaggtacatgaatagtgataccacatcccctgagctgagagaacatctagctcaaaaaccagtcttcctgcctcggaacctgcgcagaattcgcaaatgccagcggggccgggagcagcaggagaaggagggaaaggaggggaattctaaaaagacgatggaaaacgttgactctctcgacaagctagagtgcaggtttaaattgaactcatataaaatggtttacgtgattaaatctgaggattatatgtatagacgcacggccctactgagagcccaccagagccacgaacgcgtatctaaaaggctccatcagagatttcaggcatgggttgacaagtggaccaaggaacacgttccaagagagatggcagccgaaacaagtaagtggctgatgggtgagggtctcgaaggactggtgccctgcacgacaacctgcgataccgagactctccactttgtttccatcaacaaatatcgggtcaagtacggtactgtattcaaggcgccatag

SEQ ID NO: 134423 - DNA, 3822 bp, synthetic construct
  misc_feature 1..3822: note = Description of Artificial Sequence: Synthetic coding sequence
  source 1..3822: mol_type = other DNA
atgaagaggcgactggatgaccaagaatcccccgtctacgctgcacagcaaagacgcatacccggatccaccgaggccttccctcatcagcatagagtgctcgcgcctgccccaccagtgtacgaggccgtctctgagaccatgcagagtgcgactggtattcagtactccgtgacaccctcctaccaggtttccgctatgcctcaaagctcgggatcacacggcccagccattgccgctgtgcattcatcccatcaccacccaacggcagtacagccgcacgggggccaggttgtgcagagccatgcccacccagccccacctgtggcacccgtccagggccagcaacagtttcagcggctgaaagtcgaggacgcgcttagctacctggatcaagtaaaattacagtttggcagccagccgcaggtgtacaacgactttctggatatcatgaaggagttcaagtcccagtcaatcgacacacccggcgtaatatcaagagtaagccaactgttcaagggtcacccagacttaatcatgggctttaacactttcttgccacctgggtacaagattgaagttcagactaatgacatggtgaacgtaactactcctgggcaagtacaccagattcccacccacggcattcaaccccagccacagcctccgccccaacacccaagccagcctagcgcccaatctgcaccagcacccgcacagcctgccccacagccaccaccggccaaagtgagtaagccgagtcaactgcaggcgcacaccccagccagccagcagactcccccccttcccccctatgcttctccccgcagccctcctgtgcagccccacacgcctgtcacgatttcactgggcaccgcccccagtttgcagaataaccaacctgtagagttcaatcatgcgataaactatgtaaacaaaatcaaaaacaggttccagggacagcccgatatttacaaggcttttctggagatactccacacctaccagaaagagcagcggaatgccaaggaagctggcgggaactacactccagctttaactgagcaggaagtgtatgcccaagtggctcggctgtttaaaaatcaagaggacttactgtctgagtttggacagttcctcccagatgccaactcgtctgtgctgttaagcaagacgaccgctgaaaaagtggactcagtcagaaatgatcatgggggcactgtcaagaagccacaactgaacaacaaacctcagagaccctcccagaatggctgtcagatcaggcgccatcccacgggaaccactccaccagtgaagaagaagccaaagctgttgaatctgaaggattcctctatggctgacgcttctaaacacggcggaggcactgaaagcttattcttcgacaaggtgaggaaagcgctgcgtagcgctgaagcttatgagaactttctacgatgcctcgtcattttcaaccaggaggtaattagccgagccgagctcgtccagcttgtctccccctttcttgggaagttccctgagctctttaattggtttaaaaattttctaggctacaaggaatcagttcatctggagacttacccaaaagagagggccaccgaaggcatcgccatggaaatcgactacgcttcctgcaagaggctgggcagctcctatagggccctgcccaagagctaccaacaacctaaatgcacaggaagaactccactgtgcaaggaagtcctgaacgatacatgggtatcctttccaagctggagcgaagacagcacatttgtgtccagcaagaagactcaatacgaggagcatatatacagatgtgaggacgaaagatttgaactggacgtggttctggaaaccaacctggctaccatccgagtgttggaggctatccagaaaaagctgagtcgtctctctgcagaagagcaggcaaagtttagactagacaatacgctcggcggaacctcggaggtgatccatagaaaggcattacagcgtatatatgcagataaagccgcagacataattgacggtctgagaaagaatccgagtatcgctgtccctatcgtgcttaaaagactcaaaatgaaggaggaggagtggagagaggcccagcgcggattcaataaagtttggcgtgagcaaaatgaaaagtactatttgaaaagtcttgaccaccaaggaataaatttcaagcagaatgataccaaagtgctacgctccaagtctctcctgaacgaaatcgagtcaatatatgatgaaaggcaggagcaagctacagaggagaatgcaggcgttcctgtcgggcctcacctgagtctggcctacgaagacaaacagattttggaggacgccgctgccttaatcatccatcacgtgaaaaggcagactggcatccagaaggaggataagtacaaaataaaacaaatcatgcatcatttcattccagatcttttgtttgcgcagaggggggatctgtcagatgtggaagaggaggaagaggaggaaatggacgttgacgaagccaccggtgcagtcaaaaagcacaatggagtggggggctctcctcccaagtccaaactgctctttagtaataccgccgctcagaaactgcggggtatggatgaagtgtacaatctcttttatgtgaataataattggtacatcttcatgaggcttcatcagattctgtgccttcggctcctgcgcatttgcagccaagccgaaagacaaattgaggaggagaaccgggagagggagtgggaaagggaagttctaggtatcaagcgggacaagagtgactcccccgcgatccaactcagactgaaagagcctatggatgttgatgttgaggactactatcctgccttcttggatatggttaggagcctcctcgacggcaatattgactcctcccagtacgaagactccctccgtgagatgtttacgatccacgcatacattgcatttaccatggacaagcttatccagtctattgtgagacagctccagcacatagtgtccgacgagatctgtgtacaggtgaccgatctgtacctggctgagaataacaatggggcaacgggcggccagctgaatacgcagaatagccgctccctgctggaatcaacatatcagagaaaggcggagcagctgatgagtgatgaaaattgctttaagcttatgtttattcagagccaggggcaggttcaactgacaattgaacttctggatactgaggaggaaaatagcgatgaccccgttgaagcggaacgttggagtgattatgttgaacggtatatgaatagtgatactacatctcccgaattgcgggagcacctggctcaaaaaccagtattcttgccgcggaacttacgacgcatcagaaaatgtcagcgcgggcgcgagcagcaggagaaagagggaaaagaagggaacagtaaaaaaactatggaaaacgtagattccctggataagcttgaatgtcggtttaaactgaatagctacaagatggtgtacgtaataaagtctgaagactatatgtaccggcgaaccgccctgctgcgtgcacaccagtcacacgagagggtgagtaaacggctgcaccagaggtttcaggcttgggttgataagtggacgaaggaacacgtcccacgggagatggccgccgaaacgtctaagtggctcatgggcgaagggctcgaaggcctggtgccatgcaccaccacttgtgatacagaaaccctgcattttgtgagtattaacaaataccgggttaaatatgggacagtttttaaggcgccttag

SEQ ID NO: 134424 - DNA, 3822 bp, synthetic construct
  misc_feature 1..3822: note = Description of Artificial Sequence: Synthetic coding sequence
  source 1..3822: mol_type = other DNA
atgaagaggcgcttagacgaccaagaatccccagtttacgccgctcaacagaggcgaattcccggctcaacggaagctttcccacaccaacaccgcgtgttggcacctgccccgccagtctacgaggctgtttcagagactatgcagtcagccaccgggattcagtacagtgtcactcccagctaccaggtgagcgctatgccacagtcaagtggcagtcatgggccagcgatcgccgcggtacattcttcccatcatcatcccacagccgtccagccacacggaggtcaggtggtccagtctcacgctcatcccgctccccctgttgccccagtccagggtcagcagcagtttcagcggctcaaggtcgaggatgctctttcatacctagaccaagtaaagctgcaattcgggtcacagccccaggtctataatgatttcctagatattatgaaagagttcaagagccaaagcatcgacaccccaggagtgattagccgggttagccaattgttcaagggccatcctgacctcattatggggtttaacactttcctaccacccggctacaagatcgaggtccagactaacgatatggttaacgttacaacacccggtcaggtgcaccaaatccccacacatggtatccagccccagccccaacctcccccccaacatcctagccaaccctcggcccagagtgctcctgctcctgctcagcctgctccccagcctccaccggctaaggtgtcaaaacctagccagctgcaggcacacacccctgccagccagcagacgccgccattgccaccctatgcttccccgagaagccctccagttcagccacatactcccgtgactatcagccttggcactgccccatccctacagaacaatcagcccgttgagtttaaccatgcaatcaactacgtcaacaaaattaaaaataggttccaagggcagcctgatatatacaaggcatttctggagatcctgcatacataccaaaaagaacaacggaacgctaaagaagccggtggtaactacacacccgccctgacagaacaagaggtctatgcacaggttgcccggctgtttaagaaccaggaggatttactcagtgagtttggccagttcctgcctgacgcaaactcctcagtgcttctgagcaaaactaccgcagagaaggtagattctgtacgcaatgaccacgggggcacagtcaagaagccccaattgaataataaaccacagaggccgagccagaacggatgccagatccgcagacatcccaccggcacaacaccaccagtgaaaaagaaacctaagttgctgaacttgaaggattctagcatggcggatgcctctaagcatggtggcggcaccgagtctctgtttttcgataaagtgcggaaagctctcagatctgcagaggcctatgagaacttcttgagatgtctagttatatttaaccaggaggtgatttctagagccgagctcgttcagctcgtttctccattcctaggcaaatttcctgaactttttaattggttcaagaacttcctgggatataaggagtcggtccatttggagacctatcccaaagagagggccacggagggtattgccatggaaatcgattacgccagttgtaagaggcttgggtcctcttatagagccttacccaagagctaccagcagcctaaatgtacaggtagaaccccactgtgtaaggaggtcctaaatgacacctgggtctcgttcccaagctggtccgaggatagtaccttcgtgtcttcaaaaaagacacaatacgaggaacatatctacagatgtgaagatgaacggttcgagctcgatgtggtgctggagacgaacctcgccacgatccgcgttctggaggcaattcagaagaagctttcaaggctgtcggccgaggagcaggcaaagttcaggctggacaatacactgggaggcacttcagaagtgattcatcgcaaggccttgcaacgaatctatgctgataaagcggccgacattatcgacggcctgcggaaaaacccttctatagctgtccccatcgtgttaaaacggcttaaaatgaaagaggaggagtggcgagaagcacagagagggttcaacaaggtatggcgggaacagaatgagaagtattacttaaagtccctggatcaccaggggatcaatttcaagcaaaacgataccaaggttcttcgctcaaagtccctgctgaatgaaatcgagagcatttacgatgaacgtcaggaacaggcaaccgaggaaaatgcaggggtgcctgttggcccccacctgtccctggcatatgaagacaaacagattctcgaagatgcagccgccctgatcatccaccatgtcaagaggcaaaccggcatacaaaaggaggacaaatacaaaataaagcagataatgcatcacttcattcctgacctcctgttcgcacagcgaggtgatctgtccgacgtggaggaagaagaggaggaagagatggatgttgacgaagctacgggggcggttaaaaagcataacggggtgggcggaagtccccctaaatcaaaattactattcagcaacacggccgctcagaaacttagaggcatggatgaagtatataatctcttctatgtgaataacaattggtacatcttcatgagactgcatcagatcctgtgtttacgactgctgcgaatctgttcccaagcggagcggcagatcgaggaggaaaacagagaaagggaatgggaacgggaagtgctgggcatcaagcgtgacaagagtgattccccagcaatacagctgcgcctcaaagaacccatggatgttgacgtggaggattactacccagccttcctcgatatggtgcgcagcctgctggacggcaacatagacagctcacaatatgaagatagcctcagagaaatgtttactattcacgcctacatcgcttttaccatggacaagctcatacagtcgattgtgcggcagcttcaacacattgtctctgacgaaatttgcgtccaggtcacggacctgtatcttgctgaaaacaataacggtgccactggcggccaactgaatacccaaaactctcggtccctacttgagagcacgtaccaacgtaaggctgagcagttaatgagtgacgagaattgtttcaagctcatgtttatacagtctcagggacaagtgcagctgaccatagagctgctggacaccgaagaggaaaactctgatgatcctgtagaagcagagcgttggagcgactatgtggaacgttatatgaattcggataccacaagcccagaactgcgagagcacttagctcaaaagccagtcttcctacctcgaaacctgcggcggatacgaaagtgccagagaggaagggagcaacaagagaaggaagggaaggagggtaatagtaagaaaacaatggagaacgtggattctctagacaagttagagtgccggtttaagttgaattcctacaagatggtctacgtcatcaaatcagaggattacatgtaccgccgcactgcgctgctcagggcccatcaaagccacgaaagagtgtccaaaaggctgcatcagagattccaggcctgggttgacaagtggacaaaggagcatgttcccagggaaatggcggccgaaacatctaaatggcttatgggcgaaggattggagggcctggtgccctgcaccactacctgtgacacagagacacttcacttcgtgtctatcaataagtacagggtgaagtatgggactgtcttcaaggccccttag

SEQ ID NO: 134425 - DNA, 3393 bp, synthetic construct
  misc_feature 1..3393: note = Description of Artificial Sequence: Synthetic coding sequence
  source 1..3393: mol_type = other DNA
atggcgcacgccggtggtggatctggggggtccggggccggtggtcctgctgggcgcggcctgagcggtgctcggtggggacgctccgggtcggccggacatgagaagctgcccgtccatgtggaggacgcactcacttacctagaccaggtgaagatccggttcggatctgacccagctacttataacggatttctagaaatcatgaaggaattcaaatcacagagtatagatacgccaggcgtgatcagaagggtgtcccagttgttccacgaacatcccgaccttattgtgggattcaatgcgttcctgccactaggataccgaattgacatccccaagaatgggaaactgaatatccagtctccgctgaccagtcaggagaactcccataatcacggagacggtgcagaggacttcaagcagcaggtcccttataaggaggataagccacaagtacctcttgagtccgatagcgtcgaatttaataatgccatttcatatgttaacaagataaaaacccgatttcttgatcatcccgaaatctatcgaagttttcttgagattctgcatacgtatcagaaagagcagctaaataccagggggcgcccattccgagggatgagcgaagaggaggtgttcaccgaagttgcaaacctgtttcgtggccaggaagaccttttgtccgagttcgggcagtttctgccggaggctaaaagatctttgtttacaggcaacggcccttgtgaaatgcactccgtgcagaagaacgaacacgacaagacaccggaacattcccggaagagatcgaggccaagcttgctgagaccggtgagtgcgcctgcgaaaaaaaagatgaaactgcggggaacaaaggacttatcaatcgcggcggtcggcaaatacggcacactgcaggaattctcgttctttgacaaggttcgcagggtgttaaaatctcaggaggtctacgagaacttcttgaggtgcattgcgttattcaaccaagagctcgtgagcggatctgaactgctccaactggtttctccattccttggaaaattccctgagctgttcgcccagttcaagtccttcctgggagtgaaagagctgtcattcgcaccaccaatgagcgacaggagtggcgacggcatatcccgcgaaatcgattacgcgtcgtgtaagcgcataggcagctcctaccgggccctgcccaagacctatcagcagccaaagtgttccggacgtaccgcgatctgcaaagaagtgctgaatgacacttgggtgagcttccctagctggtctgaggattctacattcgtttcttctaaaaaaacaccatatgaagagcagctgcatcgctgtgaggatgagaggttcgagctcgacgtggtgcttgagaccaacctggccacgattagagtcttggagtccgttcagaaaaaactgagccggatggcccctgaagaccaagaaaaatttagactcgacgactccttgggtgggacgtccgaagtgatccagcgccgggccatatatcggatctatggtgacaaagcgccagagatcatcgaaagtctgaagaaaaatcctgtaaccgccgtgcccgtggtcctgaagagattgaaggcgaaggaggaggaatggagggaggcccagcaggggtttaacaagatctggcgcgaacagtacgaaaaggcctatttgaagtcacttgaccatcaggctgtgaactttaaacagaacgacaccaaggctctccgctcaaaatcgctcttgaacgaaattgaatcagtgtatgacgaacaccaggagcagcattctgaaggaagaagcgctcccagcagcgaacctcatttgatttttgtatatgaggacagacagatccttgaggacgcggccgcactgatcagctattatgtgaagcgacagcccgccatccagaaggaggatcaaggcaccattcaccagctcctccaccagtttgtgcccagtttgtttttcagccagcaactggatctgggtgcttcagaggagagcgcggacgaggacagagactctccacagggtcaaacgacagatccgtcagaaagaaaaaagcctgcccccggaccccactctagcccacctgaggaaaagggagctttcggcgacgctcccgcaacagagcagccccctttgccacccccagcgccgcacaaacctctcgacgatgtctactctctgttcttcgccaataataactggtatttctttctacggctgcaccaaaccctgtgtagccgcctgttaaaaatttaccgccaggcgcagaagcagctgctggagtacaggactgaaaaagaaagagaaaagctgttatgtgaagggcgaagagaaaaggggtcggaccctgctatggagttgcggctgaagcagccctccgaagtggaactggaggaatactatccagcattcctggacatggtcaggtctctacttgaagggtcaatagatcccacccaatatgaggacaccttaagagaaatgttcaccattcatgcctacgttggctttaccatggataaactcgttcaaaacattgccagacagttgcatcatctcgtctccgacgacgtgtgtttaaaggtagttgagctctatttaaatgagaaaaagcgaggtgctgccggagggaatctgagctccagatgcgtcagagctgcacgggaaacgtcctatcagtggaaggccgaaagatgtatggcagacgagaattgtttcaaagtgatgttccttcagcggaagggacaggtcattatgacaattgagctgctagacactgaagaagcgcaaacagaagatcccgtggaggtccagcacctagccaggtatgtagagcagtacgtcggcacagaaggggcttcctctagcccaaccgagggttttctgttaaagcctgtgttcttgcagcgaaacctaaagaaattccggcgcagatggcagtccgagcaagcccgtgccttgagaggcgaggcccggagcagctggaaacggcttgtgggcgtagaatcagcctgtgacgtcgattgtcggttcaagctttccactcataagatggtatttatcgtcaattcagaagattacatgtatcgtaggggcacgctgtgtagagccaagcaagtgcagcccctagtcttgctgcgacatcatcagcattttgaagaatggcattctcggtggttagaagataacgtgaccgtggaggctgcaagcctcgtgcaggattggctgatgggcgaagaagatgaagacatggtgccttgcaagacactgtgtgaaacagtgcacgtccacggtcttcctgtcacacgttaccgtgtgcagtactcccgtaggcctgcatccccttag

SEQ ID NO: 134426 - DNA, 3489 bp, synthetic construct
  misc_feature 1..3489: note = Description of Artificial Sequence: Synthetic coding sequence
  source 1..3489: mol_type = other DNA
atggctcacgcaggaggcggctcaggggggtctggggccggagggccagctggtagaggattgagtggcgcccgatggggaagaagcggctctgccggccacgaaaagttacctgtgcacgttgaggatgcgcttacctatctcgatcaagtgaaaataagatttggctccgatcccgccacgtataacggtttccttgaaatcatgaaggaattcaaaagtcaatccattgacacacccggggtcattagaagggtgagccaactatttcacgagcacccggatctcattgtgggctttaatgcttttctgccccttggttatcgtatcgacattccaaaaaacggtaaactgaacatccagagccctctaacatctcaggagaattcccataatcatggcgatggagcggaagacttcaaacagcaagttccctacaaggaggacaaacctcaggttcccttagagtccgattcagttgagttcaataacgccatatcttacgttaataaaatcaaaacccggttcctagaccacccagagatctaccgcagctttcttgaaatcctgcacacctaccagaaggaacaactcaatacaagagggcgccctttccgagggatgtctgaggaagaagtgtttactgaggtggctaatctgtttagggggcaggaggatctgctaagcgagttcggccagttcctacctgaagccaagagatccctgttcaccgggaacggcccatgcgagatgcactccgtgcagaaaaacgagcacgataagaccccagagcacagtcgtaaacggagcaggccatccctgctccgcccggtgtccgcccctgccaagaaaaagatgaaactgcgggggaccaaagatctgtcgattgcagcggtgggtaaatacggcactctgcaagaattctccttcttcgacaaggtgcggcgcgtcctgaagagccaggaggtctacgaaaattttctgcggtgcattgccttattcaatcaagaactcgtcagcggtagcgagctcctccaattagttagtcctttcctggggaagttccctgagctgtttgctcaattcaaaagctttcttggggtaaaggagctgtcttttgcccccccaatgagtgatcggagtggagacggcatatctagagaaattgattacgcctcctgcaaacgtattgggtcgagctacagggccctgccaaagacctatcaacagccgaaatgttcggggcgaactgccatatgtaaagagcttgaccattggacgttactgcagggctcatggactgatgactactgcatgagtaagttcaaaaacacctgctggatccccggatattctgccggagtgcttaatgatacctgggtgagtttcccatcatggagcgaggacagcactttcgtctcgagtaaaaagaccccctatgaagagcagttacatcggtgcgaggacgagcgtttcgagctggatgtcgtcctcgagacaaacctggccactatccgtgtcctagagagcgtgcaaaaaaagctgtctcggatggctcctgaagaccaggaaaagttcagactggatgactctttggggggcacgtcagaggtgatccagcggagggcaatctaccgtatctatggagataaggctccagaaattattgaaagcctgaagaagaatcctgtgactgccgtccccgtcgtcctgaagagattgaaagctaaagaggaggagtggcgggaggcccagcagggcttcaacaagatttggcgagagcagtacgagaaagcctaccttaagtcccttgatcaccaggctgtgaactttaaacagaatgacacaaaagcccttcgctctaaatctctgttgaatgaaattgaaagtgtatatgacgaacatcaagagcaacactcagaaggccgaagcgctccctctagtgaacctcacttgatttttgtgtatgaagatcgccagatcctagaagatgcagcagctcttattagctactacgttaagaggcagcccgcaatccagaaagaggaccaaggcacaatacaccagcttctgcaccagttcgtgccatcactgttcttctcccagcagctggacctcggggcaagtgaagagtccgcggatgaggaccgggattctccccaggggcaaacaactgatccttccgagaggaaaaagcctgcaccgggccctcattcctcacctcctgaggaaaagggagcttttggagatgcccctgccaccgagcagcctccccttcccccacctgctccccataagcccctcgacgacgtttattctctgttttttgctaacaataactggtatttttttcttaggttgcaccagacgctgtgttctaggttactcaaaatctacaggcaggcccagaagcaattgctggaatacagaacagagaaggaacgcgaaaaactcctgtgcgagggtcgccgagaaaagggctcagatcctgctatggaattgcgacttaaacagccttcagaagtggaactggaagagtattatccagctttcctggacatggttagatctctgctggaaggctcaattgacccaactcagtatgaggataccctcagagagatgtttactattcacgcttatgttgggttcaccatggataagctggtgcagaatattgcaagacagttgcaccatcttgtgtctgacgacgtctgtctcaaggtagtcgagttatacctgaacgagaagaagcgaggggccgccggcggtaacctaagttcacgctgcgtgcgggcagcaagagagacttcataccaatggaaagctgagaggtgtatggccgatgagaattgtttcaaggttatgttcctgcagaggaagggacaggtgatcatgacgatcgagctgctggacacagaagaagcccagacggaagaccctgtggaagttcagcatctggccaggtacgtcgaacagtatgtagggactgagggagccagtagcagcccaacagaggggttcttgttaaagcctgtatttctacaaaggaacctgaaaaaatttagacggaggtggcaatccgaacaggccagagcactgaggggcgaggcacggtcttcctggaaacgcctggttggggtggagagtgcatgtgacgtggactgcagattcaagctttcaacacataagatggtgtttatagttaactctgaagactacatgtacagaagaggcactttgtgcagagccaaacaggtgcagccactggtgctgctcagacatcaccaacattttgaagagtggcatagtcggtggctcgaggacaacgtaacagttgaagctgctagtctggtgcaggactggctgatgggggaggaggacgaagacatggtgccatgtaaaacactgtgtgagacggttcatgttcacgggctccctgtcacccgctaccgtgtccagtattccagaaggcccgctagtccctag

SEQ ID NO: 134427 - DNA, 3171 bp, synthetic construct
  misc_feature 1..3171: note = Description of Artificial Sequence: Synthetic coding sequence
  source 1..3171: mol_type = other DNA
atgtctagccagcaatttccacgattaggagccccatctacaggtctgtcacaggcgcctagccagatcgcaaattcaggctcagccggcctgataaatcccgcggcgactgtgaatgatgaaagcgggcgggactccgaggtctccgcccgcgagcacatgagcagctctagctctctccaaagtagggaagagaaacaagagcccgtggtggttcgaccctaccctcaggttcagatgttgtccactcatcacgcagtggcctcagctactcccgttgccgtgacggccccaccagcacacctaacccctgctgtcccactttccttttctgagggactgatgaaaccgccgcccaagcctaccatgccctctcggccaatcgctcccgcccctccatccacactgtcattgcctcctaaagtgcctggacaggtgacagtaacaatggaatccagcatcccacaggcatctgcaatcccagtggccacaatctccggtcaacagggtcacccgagcaacctgcaccatattatgacaaccaatgtccagatgtcaattatcaggagcaacgctccagggcctcccttgcatattggtgccagtcatcttccacgcggtgccgcagccgccgcagtgatgtctagcagcaaggtgaccacagtcctcagacccaccagtcagctgccgaacgctgctaccgcacagcccgccgtccagcacatcatccaccagccaatccaaagtcgcccgcccgtcaccacttctaatgcaatcccgccggccgttgtagccaccgtctccgccactagggctcagagtcccgtgatcacgacaaccgctgcccatgccacagacagcgcactcagcagacccaccctgagtatacagcacccccctagcgctgccatttccattcagcgcccggcccaaagcagagatgtgaccacccgaatcaccctccctagccaccctgcgctggggacccccaagcagcagctgcacaccatggctcagaaaacaatcttctccaccggtactccagtggctgcagctaccgtcgcccccatcttggccaccaacaccataccatccgcaaccaccgcaggctccgtgagtcacacccaggcgccgactagcaccatagtcactatgaccgtaccgagccattcaagccatgccacagctgtgaccacatcaaacattcccgtggcaaaagtggtcccccaacagatcacccacacatcgccgagaatacagcctgactaccctgcagagaggtcttctttgatccctatcagcggccaccgtgcatcccccaaccccgttgccatggaaacacgctctgacaataggccttctgtccctgtgcagtttcagtactttctgccaacatacccgccttctgcatacccactggcggcacatacatacacacctattacttccagcgtctccactatccgccaatatcctgtttctgctcaagccccaaatagcgctatcactgcccaaactggggtcggtgtggcctcgacagttcatctgaacccgatgcagttgatgacagtcgacgctagccatgctcgacacatccaaggcatacagcccgcaccgatatcgactcagggcatccagcctgctcccattggcactcctggtatacagcctgctcccctgggtacgcagggcatccacagcgctactcccataaacacccagggcctgcagcctgcacccatgggtacccagcaacctcaacccgagggtaagacttctgtcgtccttgctgatggcgccaccatagtggcaaatcccattagcaatccattttcagctgctcccgccgctaccacagtggtgcagactcatagccagtctgcttcaaccaacgctcccgcacaaggaagcagtccccggccatctatcctaaggaaaaagccagccactgacgggatggcagtgcggaagaccctcatccctccccaaccccctgacgttgcctcccctcgagttgagagtagcatgcgctcaacatctggaagcccaagacccgcaggagcgaaacctaagtcggagatccacgtttctatggctactcctgttactgtgagtatggagactgtgtcgaaccagaacaacgaccaacccactatcgcagtgcccccaaccgcccagcagccgccacccacaattcccactatgatcgcagcggcttcacctccttcgcagcctgctgttgcgctgtcaaccatccctggggccgtccctattaccccaccgatcactacgattgctgcggcccctccaccctctgttaccgtgggcgggtctctctcatcggtgttggggccccccgtccccgaaataaaggtcaaagaggaagtagaacctatggatatcatgcgacccgtttctgctgtgcctcccttggcgaccaacacagttagtccctcactggccttattagctaacaatttgtccatgccaacatcagacctccctcccggagcgtccccacgcaaaaaacccagaaaacagcaacacgtcatctcaaccgaggaaggcgacatgatggagaccaattctactgacgacgaaaagtcaacagcgaagagcctgctcgtcaaggccgagaagcggaagagcccacccaaggagtatatcgacgaggaaggggtgcgatatgtaccagtacgtccgcggccccctatcacgctgttacgccattaccggaacccctggaaggctgcctaccaccacttccagcgctactcggatgttcgggtgaaagaggaaaaaaaagccatgctacaagaaatcgctaatcagaagggcgttagctgtcgggctcaaggctggaaagtccacctctgtgcggcccagctgctgcagctgactaacttggagcatgacgtgtatgagcgcctgaccaatcttcaggaaggcatcattcccaagaagaaagcagctactgatgatgatttgcaccggatcaacgagctcattcaggggaacatgcaaaggtgtaagctggttatggatcagatctccgaagcaagggatagtatgctgaaagtcctggatcacaaagacagggtgttgaaattgctgaacaaaaacggcactgtgaaaaaagtttccaaattaaaaagaaaggagaaggtgtag

SEQ ID NO: 134428 - DNA, 3147 bp, synthetic construct
  misc_feature 1..3147: note = Description of Artificial Sequence: Synthetic coding sequence
  source 1..3147: mol_type = other DNA
atgggcccacctcgacatcctcaagcaggcgagattgaagccggcggggcaggcggagggaggaggctccaggtcgaaatgtccagccaacaatttccgaggctcggcgcaccatccaccggactgagtcaggcacccagccaaatagccaattccggctcggccggactgataaaccccgccgcaacggtcaacgatgagtctggcagagactctgaggtttcagcccgagagcacatgtcaagcagcagctctctgcaatctcgagaggagaagcaagaacctgttgtagtacggccctaccctcaagtgcagatgctaagtacccatcatgcggtcgccagcgctaccccagttgctgtgaccgccccaccggcacacttgacacctgccgtgccgctctcattcagcgaaggtctcatgaaaccccctccgaagcctactatgcctagtcgccctatagctcccgccccccctagcaccttatctcttccacccaaagtacccggccaggtcaccgttactatggaatcctctatcccgcaggccagcgcaattccagtggccacaatctccggacagcagggccaccccagtaacttgcatcatattatgaccaccaatgtacaaatgagtatcatccgtagcaatgcgcccggcccccctctccatattggagcttcccacctgcccagaggggccgcagctgccgctgtgatgtcatcttctaaggttacaacagtacttcgacccacgtctcagctgcctaacgctgctactgcccagcctgccgtgcagcacattattcatcaacctattcagtctaggcctcccgttactacttcgaacgcgatacctccagccgtggtcgccacagtaagtgcaaccagggcgcagagccccgtgatcacaacgacagccgcccatgctactgatagtgctctcagtcggcccacccttagtatccaacacccgcccagcgctgccatttccatccagaggccagctcagagtagagacgtgactacgcgcatcacgctgcccagccatcctgccctcggcacaccgaagcaacagttgcataccatggcccagaaaacaattttcagtaccggtacaccagtcgctgctgcaaccgttgcccctattctggcaactaacactattccgtcagcaaccactgccgggtcagtgagtcacacccaggcccctacgagtacaattgtgaccatgaccgttccatcacattctagccacgctactgccgtgacgacatccaatataccggtggccaaggttgtccctcagcaaatcactcatacgagccccagaattcaacccgactatcccgctgaaagatcgtctcttattccgatttccggccaccgtgcctctccgaatcctgtggccatggaaacgcgatctgacaacagaccttcagttccagtccagtttcagtactttcttccaacttaccccccttcagcctacccgctcgctgcgcatacatacactccaatcacttcctcagttagcacaatacggcaatacccagtgtccgctcaggcccctaactcagccatcactgcccagactggcgtgggtgttgctagcacagtccatctgaatccgatgcagttaatgacagttgacgcttcacatgctaggcacattcagggaatccagccggcccctatctccacacaggggatccagccagccccaataggtacgcctggcattcagccggcccctctcgggacccagggcattcactcggcaacacccattaatacccaagggcttcagcccgccccaatgggcacccaacaaccgcagcctgagggaaagacatctgctgttgtgttggcggacggcgccactatcgtagccaatccgatcagcaacccctttagcgcagctccagccgcaacaacagtcgtgcagacacactcccagagcgctagcactaacgctcctgctcaaggctctagtccccgacctagcatcctgcgtaaaaagcctgcaactgatggggctaaacccaagtctgagattcatgtgagcatggctacgcccgttacagtttcaatggagacagtgtcaaatcagaacaacgatcagccgacaatcgcagtgccaccaactgcacagcagcctccaccgacaatccctaccatgatcgcagcagcctctcctccatcacagccggccgttgccctgagtactatacccggagctgtgcctattactccacctattaccaccattgcggccgctccacccccaagtgtcaccgtgggtgggtcactgtccagcgtgctgggacctcccgttcccgagatcaaagtcaaagaggaagttgagccaatggatattatgcggcccgtatcggcagtcccgcccctggccacgaatactgtcagcccctctctggctctcctggcgaataacctgagcatgcccacctcagatctcccgccaggggcgtctccgcggaaaaaacctcgcaagcaacaacacgttataagcaccgaagaaggggacatgatggagactaatagcacggatgacgagaaatctaccgcgaagtcccttctggtaaaggcagaaaaacgtaaatccccccccaaggagtatatcgacgaagaaggcgtcaggtacgtcccagtgcgccccagaccccccatcaccttgcttaggcattataggaatccgtggaaagcagcgtatcaccatttccagaggtactctgatgtgagagtcaaggaggagaagaaggctatgttgcaggaaatcgctaatcagaagggcgtttcctgtagagcacagggatggaaagttcatctgtgtgcggcgcagctgcttcaattaacaaacttggaacacgacgtgtatgaacgcttgaccaacctgcaagaagggatcatcccgaaaaaaaaggccgccacagatgatgacttacatcgaataaatgagctgatacaaggaaacatgcaaaggtgcaagctcgtgatggatcagattagcgaagctagggatagtatgctaaaggtcttggaccacaaggacagggtactcaagttactgaacaaaaatggaacagtgaagaaagtgtcaaagcttaaaaggaaagaaaaggtctag

SEQ ID NO: 134429 - DNA, 3252 bp, synthetic construct
  misc_feature 1..3252: note = Description of Artificial Sequence: Synthetic coding sequence
  source 1..3252: mol_type = other DNA
atgggtccccccagacatccccaggccggtgaaatagaggctggtggtgcaggcggaggcagacggctgcaggtggagatgtctagccagcaattccctcgcctgggcgccccctctactggcctgtcccaggctccatcacaaatagctaatagcggttccgctggtcttatcaatcctgctgcaaccgtgaacgacgagtcaggaagagattcagaggtctccgccagggagcatatgtcatcaagcagttcacttcagtcccgcgaggaaaagcaggagcctgtggtagttcggccatatcctcaggttcagatgctcagtactcaccatgctgtggcatcggctacgcctgtggccgtgactgcaccccctgcgcatcttacgcccgctgtaccactctctttttcagagggcttgatgaaacctccccctaagccaaccatgccatcacgtcccatcgctcccgccccaccttcaacactctcactgccgccgaaagttcctgggcaggtgaccgtgaccatggaatcctccattcctcaggccagcgctatccctgtggctactatctcgggacagcagggacatccctctaacctgcatcatattatgaccaccaacgtgcagatgtccattattcggtctaatgcacctggcccacctctccacatcggggccagtcatcttcctcgcggagctgctgccgcagcagtaatgagcagcagcaaagtgacgaccgtattacgcccaacttcccaactgcctaacgccgcaacggctcaaccagctgtacagcatatcatccaccagcccatccaatctcggccacccgtgaccacatcaaatgctatcccaccggccgtcgtcgctaccgtgagcgcaactagagcccagtctcccgttataacgactacagctgcacatgcgacagactcggcactgtcacgccctaccctatctatacagcaccccccgtccgctgctatcagcattcagcgccccgcacagtcccgggacgtgactacacggatcactctgccatcgcacccagctcttggtaccccaaagcagcaactgcacaccatggcccagaaaaccatttttagcaccggcacccctgtggctgccgccaccgtggcccctatcctggccactaatacaatacccagcgcaacaacagcaggatcagtttcacatacacaagcccccactagcaccatcgtgaccatgactgttccatctcacagctcacacgcaacagccgtaacaacaagtaatatacccgtggctaaagtggtgccccaacaaattacccacaccagtccacgcatccagcccgattacccggccgagagatcatcgcttatcccgatttcaggccatcgcgcttcccctaacccagtggcgatggaaacccgctccgataatagaccatcagtcccagtccagttccaatatttcctccccacctacccccccagcgcatacccactcgctgcccacacatacactcctattaccagttctgtgtcaacaatccgccaataccctgttagcgcgcaggccccaaattcggccatcacagcccagacaggcgtgggtgtcgcttcaactgttcatttaaatcctatgcaactgatgaccgttgacgcatctcatgccagacacatacaagggatccaacctgcacccatttcgacacagggcatccagcccgctccaatcggcacacctggtattcaaccagctccccttgggacccagggtattcattcagccacccctatcaatacccaaggcctgcagcccgcccctatgggtactcagcagcctcaacctgaaggtaagacgtcagccgtggtactcgcagacggtgccaccatcgtggccaacccgatatccaatccttttagcgccgcacccgctgctacgaccgtcgttcagacacactcccagtcagcaagcaccaacgcacccgcacagggctcaagtccccggccctctattctgcgtaaaaaacctgcaaccgatggcatggccgtcaggaagacactgattccgccacagccacctgacgtagcgtctccacgcgtggaatcgagcatgcgcagcacaagcggttcaccgaggccagccggtgcgaaaccaaagagcgagatacacgtgagcatggcaacccctgttacggtaagtatggaaacagtaagtaaccagaataacgaccagcccacaatcgccgtacctccaacagcccagcagccccctccaacaatccctactatgattgctgccgcatcacctccaagccagcccgccgtggccctcagcaccatcccgggtgctgtgcctatcacccctccaatcactaccatcgccgcagcacctcctccgtcggttacggtcgggggcagccttagctcagtcctggggccccctgttcccgaaattaaggtcaaggaagaggttgagcccatggacataatgcgccctgtgagtgctgtcccccccctcgcgacaaacaccgtgagccctagtctagcgctattggccaacaacctttcaatgcctacctctgatttgccacctggggcatccccacgcaaaaaaccacgcaaacagcagcatgtgatcagcactgaagagggcgacatgatggagaccaactcaaccgatgacgaaaagagtacagccaaatcgcttttggtcaaggccgaaaagcgtaagtcgcccccaaaagaatatatagatgaagaaggcgtaaggtatgtgccagtgaggccccggccaccaattaccctgctaaggcactaccgcaacccctggaaagctgcataccatcatttccagcgctattctgatgttagagtgaaagaggaaaagaaagcaatgctccaggagattgccaaccagaagggtgtgtcttgcagagcccaggggtggaaggtccacctttgtgccgcgcagttactccagctgaccaatctggaacacgacgtgtacgagcgactgactaaccttcaggaggggattattccaaagaagaaagcagcaacggacgacgatttgcaccgcattaatgaattgatccaggggaacatgcagaggtgtaaactcgtgatggaccagatctccgaggcccgcgattccatgcttaaggtcctggaccacaaggaccgtgtgctgaagctcctgaacaaaaacgggacggtgaagaaggtgagcaaactaaagaggaaagaaaaggtctag

SEQ ID NO: 134430 - DNA, 789 bp, synthetic construct
  misc_feature 1..789: note = Description of Artificial Sequence: Synthetic coding sequence
  source 1..789: mol_type = other DNA
atgtctagccagcagtttcctcggctcggagctccctctaccgggctgagtcaggctccatctcagatcgcaaattcgggctccgcagggctcataaatccagcagccactgtgaacgatgagtccgggcgggacagcgaagtcagtgctcgcgagcacatgtcaagcagctcttcactacagtccagggaggagaagcaggaacccgtggtcgtgaggccgtacccacaagtgcagatgctttctacacatcacgccgtggcgtcagcaaccccagttgccgtcacagcaccacctgcccacctaacccccgcagtacctctcagctttagcgagggcctaatgaagccgccccctaaaccaactatgccttcacgtccaattgcacctgctccacctagcacactctctctgcctcccaaagtgcccggccaggtgacagttaccatggaatcaagcattccacaagcaagcgccatccctgttgcaacaatcagtgggcagcaaggccacccttccaacctgcaccacatcatgacaacaaatgtgcagatgtccataatccggtcgaatgctccgggcccacctttacacatcggagcgtcccatctccccaggggggctgctgccgcggccgtgatgtcttccagtaaggtcacgacagtgctgagacccacgtcacagttgccaaatgcagcaaccgcccaacctgccgtccagcatattatccatcagcctattcagagtagaccacccgtgacaacatccaacgctatccctcccgcctag

SEQ ID NO: 134431 - DNA, 630 bp, synthetic construct
  misc_feature 1..630: note = Description of Artificial Sequence: Synthetic coding sequence
  source 1..630: mol_type = other DNA
atgaacccgtctatgaagcagaagcaagaggagattaaagaaaacatcaagaacagctctgttccacgcagaacactaaaaatgattcagccgtctgcaagcggcagtttggtgggcagagagaatgagctgtcagcgggcctctccaagcgaaagcatagaaatgaccacttaacttccacaacttcttccccaggcgtcattgtgccagagtcatctgagaataagaatctcgggggtgtgacacaggagtcatttgacctcatgatcaaggagaaccccagcagtcagtactggaaagaagttgctgagaagcgcagaaaagccctctatgaggcactaaaggagaacgaaaagctgcataaagaaattgagcagaaggacaatgagattgctcgactgaagaaggagaacaaggagctcgcggaagtggctgaacatgtgcagtatatggcagagttgatagagagactaaacggcgagcccctggataactttgagagtctggataatcaggagtttgatagtgaagaggagactgtggaagattccttggtcgaagactcagaaataggcacctgcgcagagggtaccgttagctcttctactgacgctaaaccttgtatctag

SEQ ID NO: 134432 - DNA, 2622 bp, synthetic construct
  misc_feature 1..2622: note = Description of Artificial Sequence: Synthetic coding sequence
  source 1..2622: mol_type = other DNA
atggccgaaatggagaaggaaggacgtcccccggagaacaagaggagcaggaaaccggcccaccccgtgaagcgagagatcaacgaagagatgaaaaactttgcagagaataccatgaacgagttgcttggctggtatggctatgacaaagtcgaactgaaagacggagaggatatcgagttcaggtcttaccctacagatggcgagtcgaggcaacacatcagtgtgctgaaggaaaatagcctgccaaaaccaaaattgcctgaggacagtgtcatttctccctataatatcagcaccggctactctgggctggctactgggaacgggttgagtgattccccagcgggctccaaggaccacgggtcagttccaattatcgtgccgttgatcccccctccctttattaagcctcctgccgaagacgatgtgtccaatgtgcagataatgtgtgcatggtgtcagaaggtggggatcaagaggtacagtctgtcaatgggcagtgaggtcaagtccttttgctctgagaagtgttttgccgcgtgccgtcgggcgtattttaagagaaacaaagctagagacgaggacggtcatgccgagaatttccctcagcaacattatgcgaaagaaaccccgcgtctggcctttaaaaacaactgtgagctgctggtgtgcgattggtgcaagcacattcggcacacaaaggaatacctggacttcggcgacggcgaacgtagactgcaattttgctctgccaagtgtttgaatcagtacaagatggacatcttttacaaggagacacaggcaaacctgcccgcaggcctatgctccacgcttcaccccccaatggagaacaaagccgaaggcaccggcgtacagctgctcactcccgactcctggaatatcccgctgaccgatgccaggcggaaagcccctagtcccgtcgctaccgccgggcaatctcaggggccaggtccaagtgcaagcaccacagtgagtccaagtgatacagctaactgctctgttactaagataccaacccccgtgcctaagagcattccaatctccgagactcccaacatcccgcccgtatccgtgcagccacctgcctccattgggccccccctgggcgtaccaccccgaagccctccaatggtaatgaccaatcgaggtccagttcctctgccaatcttcatggaacagcagattatgcagcagatccgacccccatttattcgaggaccaccgcaccacgcttctaatcctaacagccccctgtccaatcctatgttgccgggcatcgggccgcctcccggcgggccacggaacttagggccgacatcaagtcccatgcaccggccaatgttgtctccacacatccatcctccctccaccccaactatgcccggcaatcccccgggactgcttccaccccccccacctggcgctcccttgcccagcctgccttttcctccggtctctatgatgccaaacggacccatgcccgttcctcagatgatgaatttcggactgcctagcttagcacctctcgttccacctccaacgctgctagttccgtacccagtgatcgtgcccctcccagtgcctatccctattcccatccctatcccccatgtttctgacagtaaaccccctaatgggttctcctccaatggcgagaattttatcccaaacgcccctggggacagcgccgcagccggtggtaaaccaagcggtcattccctttctcctcgagatagcaagcaaggctcctctaaatccgctgatagtccaccaggctgcagcgggcaggccctgtctcttgctcccaccccagctgagcacggtaggtcagaagtggtcgatcttacccgccgcgcgggttcccctccaggacccccgggtgccgggggccaactggggttccccggcgtccttcaggggcctcaggatggcgtgattgatctaacagtcggccaccgggcgagactgcacaacgtcatccatagggcactgcatgctcacgtgaaggcagaacgtgaaccctctgctgccgaacgaaggacatgcggcggctgtcgcgatggccactgttccccacccgcggccggcgaccctggcccgggcgctccagcaggtccagaggccgctgcagcgtgtaacgtaatcgttaacggcactagaggcgcagcagcagagggcgctaaaagtgccgagcctccccccgaacagccccccccaccacccccccccgccccccctaaaaaactgctgtcaccagaggagccggctgttagtgaactcgaaagcgtgaaggagaataattgcgcctctaactgccacctcgatggtgaagccgccaagaagctgatgggcgaggaggcgctcgcaggcggtgacaagtcggatcccaacttaaacaaccctgccgacgaagatcacgcttacgcactgcgaatgctccctaagactggctgtgtcattcagcctgtccccaagccagctgagaaggccgccatggccccatgtattatttcttccccgatgttgagtgcaggcccagaggatctggagccaccacttaagaggaggtgccttcggatacgcaatcagaacaaatag

SEQ ID NO: 134433 - DNA, 1233 bp, synthetic construct
  misc_feature 1..1233: note = Description of Artificial Sequence: Synthetic coding sequence
  source 1..1233: mol_type = other DNA
atgccaggcgtgtgtgatagggcccctgactttttgagcccctctgaggatcaagtcctacgccccgctttggggtcaagcgtcgccctcaactgtactgcctgggtcgtgtccggcccacactgctcgctgccaagcgtgcaatggctaaaagatggccttccactcggtatcggagggcattattctcttcacgaatattcctgggttaaagcaaacctgtccgaggtgctggttagcagcgttctcggagttaatgtcacttctaccgaggtgtacggtgcttttacctgttctattcagaatatctccttcagttcatttaccttgcaacgagctggcccgacctcgcatgtggcggccgtactggcttccctgttagttcttcttgcactgctcctggccgccctgctatatgttaagtgccgactcaacgtgcttctgtggtatcaggacgcatatggagaggtggagataaatgacggtaaactctacgatgcctacgtcagttactcagattgccccgaagaccggaaattcgtcaactttattctgaaacctcagcttgagcggaggcggggctacaagctttttctggacgacagggatctgctccccagagccgaacccagtgccgacctgctcgtcaacttaagtcgttgcaggcgcctgatcgtggtgctctcagatgcatttctatcccgagcgtggtgtagccactcattcagggaagggttgtgccgacttctcgagctcacaaggcgccccatttttatcacctttgagggtcagaggcgcgacccagctcaccctgctcttcgcctgttgagacagcacaggcatctggtgacgttgctcctctggagacccgggtccgttacgccaagtagcgacttttggaaggaagttcaactggccctccctcgcaaagtccagtatcgccctgtcgaaggcgacccccaaacgcagctgcaggatgataaagatccgatgcttattctgaggggccgtgtccctgagggtagggctctggattccgaggtagaccccgatcccgagggggacctcggagtgcgaggcccagtctttggggaaccaagcgctcctccccacacgtctggcgtctcactgggcgagtcaaggagctcagaagttgacgtgagtgacttgggatcccgcaattactccgcacgtaccgacttttactgcctagtgtctaaggacgacatgtag

SEQ ID NO: 134434 - DNA, 1515 bp, synthetic construct
  misc_feature 1..1515: note = Description of Artificial Sequence: Synthetic coding sequence
  source 1..1515: mol_type = other DNA
atgcccggtgtatgcgacagagcccctgactttctttcaccttccgaggatcaggtgctgcggcccgcgctagggtccagcgtcgccctgaattgtacggcgtgggttgtgtccggcccacattgttccctgccatctgtccagtggttgaaggacggtctacctctcggcataggaggccactattcactgcatgagtactcatgggttaaggccaacctgtccgaagtcttggttagtagcgtgctgggcgtgaacgtgacatctactgaagtgtatggggccttcacctgctcaatccaaaatattagttttagttcctttactctgcaacgcgcaggtccaacctcccacgtggcggctgtgctcgccagtttactagtgctcctcgccctgttgttggcggccctgctctatgtgaagtgccgcctgaacgtactgctgtggtatcaagacgcctacggtgaagtcgagatcaacgatggcaaactctatgacgcatacgtgtcttattcggactgtcccgaagatagaaaatttgtgaacttcattttaaagcctcagctggagcgccgtcgggggtataagttgtttcttgatgacagggacctgctgcctagggctgaacccagcgccgatctcctggtgaacttgagccggtgtaggcgcttgatagtggtactgtctgacgccttcttatctagagcctggtgctcccattcatttcgcgagggtctgtgccgactacttgaactgacacgacgacccattttcattaccttcgagggacaacgtagagatcctgcccatccagctctgcgcctgctgcgccagcaccgtcatcttgtcaccttgctgttatggcgtccggggagcgttacgccatcaagcgatttctggaaggaggtgcagctcgccctgcctaggaaagtccaataccgacctgtcgaaggtgacccacagacccagttgcaagacgataaagatccaatgttaatcctgagagggcgagtccccgaaggtagagccttggattctgaggtggatcccgaccctgaaggggatctcgggatgccagcccagccacactcccccaccggtgaagcacagcacagagcagaatggggccaggcacagggcacaggccctggcggggctcctggtgtagaggatagcagtcgtcatcgtgaacctttacatggtctatgtcccgggggcgcgcggccttcagtgtgccttggtacaagttgggctagccaggccatcacagccggcggcgagcaggggcaaccgttggccgtgggtctggggcaaggatgcggatggccaccacaagctagcaggagcccccaccctaggtgtccaggagcgtgcttgtggcgtgccatctcctccaccgcacaccaatgggggctcgccggtcgggagccagagcagagaagtggacggttgggttccaggttggctaagctgcagtgtccgcacagactcctgctgcctggcgtgcagggatag

SEQ ID NO: 134435 - DNA, 1233 bp, synthetic construct
  misc_feature 1..1233: note = Description of Artificial Sequence: Synthetic coding sequence
  source 1..1233: mol_type = other DNA
atgcccggtgtttgcgacagggcacctgacttcctgagcccttctgaagatcaggtgctgcgacccgctctgggatcttccgtagcgcttaattgcaccgcctgggtcgttagcgggccccactgttccttaccatccgtccagtggttgaaagatgggttaccgctgggaattggtggacattactcattgcacgagtattcgtgggttaaggccaacttatctgaggtcctggtctccagcgtcctcggtgtaaacgtgacaagtactgaagtctatggcgcgtttacatgttccatacagaatatatccttcagttccttcacgctgcaaagagctgggcccacgagtcacgtggctgcagttctggcctctctgctggttctcctggcactcctcctggccgctctgctgtacgtgaagtgccggctcaacgtgctgctgtggtaccaagatgcctacggcgaagttgaaatcaatgacggcaagctatatgacgcctatgtatcgtacagcgattgccctgaagatagaaagttcgtaaatttcatccttaagcctcagctggagcggagaagagggtataaactgttcttagatgatcgcgatcttctgccccgtgcagaaccatctgctgatttgctggttaacctctcacgatgccggcgccttatcgttgtactgtccgatgcctttctaagtcgcgcctggtgtagtcacagcttccgcgaaggattatgtcgcctgctcgaactcacaaggcggcccattttcattacctttgaggggcagaggcgagatcccgctcacccagccctacggctcctgcggcagcacaggcatcttgtgacgttgcttctctggcgccctggatctgtgaccccatcctctgatttttggaaggaagtgcagctcgctcttccccgcaaggttcaatacagacccgtggagggggatcctcagacccaactacaggatgacaaggacccgatgctaattctgcgtggcagagtgcctgaaggccgcgctctggattccgaagtcgaccccgatcccgaaggtgaccttggcgtgagaggcccggtttttggggagcccagtgcacccccacatacgagtggtgtgagcctcggagaatcaagatcttctgaagtggatgtttcagatttggggtcacggaactacagtgcacgtactgacttctactgtctggtaagcaaggatgacatgtag

SEQ ID NO: 134436 - DNA, 1233 bp, synthetic construct
  misc_feature 1..1233: note = Description of Artificial Sequence: Synthetic coding sequence
  source 1..1233: mol_type = other DNA
atgcccggcgtgtgcgatcgtgctcccgattttctgtctccgtcagaagatcaggtactcaggcccgctttgggatcatcagtagcactgaactgcacagcctgggtggttagcggcccccactgtagcttacctagtgtacagtggctgaaggacggcctgccgctagggataggcggccattattcactgcacgagtattcatgggtaaaagccaatttaagcgaggtattagttagctcagtactaggcgtaaacgtaacatctactgaggtgtatggagctttcacatgctccatccagaacatatccttctcttcttttactctgcagagagcgggccctactagtcacgtggccgctgtgctggccagtctgcttgtattgctcgcactactgctggccgctctgctgtacgtgaagtgcaggcttaacgtactgctgtggtaccaggacgcgtatggggaagtcgaaatcaatgacggcaagctatacgatgcatacgtcagctattcagattgtccggaggataggaagttcgtgaacttcatcctgaaaccccagcttgaaaggcgacgcggttacaagctgttccttgatgatcgggacctgctcccacgggcagagcccagcgcggacctgctcgtgaaccttagtcggtgccggaggctgatcgtggtgctgtcagacgcattcctcagtcgggcttggtgctcacattcattcagggagggactctgtcgtttactggaattgaccaggaggccaatttttatcaccttcgagggccagcggcgagaccccgcacaccccgcactgcgacttctgcggcagcatcgccacctggtcacgctgcttctgtggcggcctggaagcgtaacacccagtagtgatttttggaaagaagtacagctcgcactgccacgcaaggtgcagtacaggcccgtcgagggcgacccacagacacaactccaggacgacaaagaccctatgctgattttaagaggaagagtccccgaaggacgcgcgttggactcagaagttgacccagaccccgaaggagacctgggagtccgcgggcccgtgtttggagagccctctgctcccccacatacttccggcgtgtcattaggggagtctaggagcagcgaggtggatgtttccgaccttggatcccggaattattccgcacgaaccgatttctactgcctcgtgtctaaggatgacatgtag

SEQ ID NO: 134437 - DNA, 1515 bp, synthetic construct
  misc_feature 1..1515: note = Description of Artificial Sequence: Synthetic coding sequence
  source 1..1515: mol_type = other DNA
atgcccggcgtctgcgatagagcgccagattttctgagcccctccgaagatcaagtcctgcgcccagccctgggcagcagtgtggccctgaactgtacagcttgggttgtttctggacctcattgcagtttaccttcggttcaatggctaaaggatggattgccattggggattggaggccattattcactgcacgaatattcctgggtgaaggcaaaccttagcgaagttctggtgagctccgtgctgggtgtcaacgtcacgtctaccgaggtctatggcgccttcacctgctcaatccagaatataagcttttctagctttacgctgcagagagctgggccaacctcacatgtggccgccgtcttggccagcttgttagtgttactggccctgctgctggctgccctgctgtacgtaaaatgcaggctgaacgtcctgctgtggtatcaagacgcctacggagaagtggagatcaatgatgggaaactatacgatgcttacgtttcctacagcgattgtcctgaggatagaaaatttgtcaattttatccttaagccgcagttggaacgccggagagggtataagctctttcttgacgatcgggatttgttaccgcgggccgagcccagcgctgatctgctggtcaatttgtcaagatgccgccggctgattgtcgtcctctcggatgcattcctcagtcgtgcctggtgttcccattcttttcgagaaggtctgtgccgcctgttggagctcacccgccggccgatttttattacttttgagggccagcgtcgcgaccctgctcacccagcattgaggctcctccgccagcacagacacttagtcaccctgttgctgtggaggcctggctccgtcacgccatcatcagacttctggaaagaggtgcagctggcactgcctcggaaagtgcagtaccgaccggttgaaggcgaccctcagacgcagcttcaggacgataaagacccaatgttgatcctccgaggcagggtcccagagggcagggccctcgatagtgaagttgatcccgaccccgaaggtgaccttggaatgccagctcagcctcatagccctacaggagaagctcagcacagggctgagtggggccaggcacaagggaccggcccggggggcgctcccggggtggaggatagtagccgtcacagggagcctctgcacgggctgtgtcctggcggtgccaggccgtcagtatgcctaggaaccagttgggctagtcaggccatcaccgccggaggggagcagggccaaccactcgccgtcgggctgggccagggttgcggctggcccccccaagcaagccgcagtccccatccccggtgtccaggggcatgcctgtggcgtgccatctcgtccaccgctcatcaatgggggctggccgggcgggagcctgagcagcgcagcggccggcttgggagccgactggctaaactgcagtgcccacacagacttctcctccctggggtgcaggggtag

SEQ ID NO: 134438 - DNA, 1107 bp, synthetic construct
  misc_feature 1..1107: note = Description of Artificial Sequence: Synthetic coding sequence
  source 1..1107: mol_type = other DNA
atgtttgccaagggaaagggctcggccgtgccatcagatggtcaagctagggagaagctggctctttatgtgtatgagtacctattacacgtcggggctcagaagagtgcccagacctttctcagcgagatcagatgggagaaaaacataactttgggcgaaccccctggcttcttacattcttggtggtgtgtgttttgggacctgtactgtgcagctccagaacgcagagacacatgcgagcattcatctgaggctaaggctttccacgactacagtgctgccgccgctccatcccctgtgcttggaaacattccacctaacgacggcatgccaggaggtcctataccacccggcttcttccaaggaccccccggcagtcagccatccccacacgcgcagccccctcctcacaatcccagcagtatgatgggaccccattcgcagcccccaggcggcgtccccggcacccaaccgctactacctaatagcatggatccaactcgccaacagggccatcccaatatgggtggctctatgcagcgtatgaaccctcccaggggcatgggtccaatgggccccggaccccaaaattatggaagtggcatgagacctccgcccaatagcctgggtccggctatgcccggcattaacatgggccccggtgctggaaggccctggcctaatccaaattctgcgaattccattccttactccagcagtagtcctggtacctatgttggacccccgggaggtggcggtcctcctggaactcctatcatgccaagccccgccgacagcaccaactcttcggataacatatatacaatgataaatccagtgccacccggtggatctcggtccaacttccccatgggaccaggaagcgatggcccaatgggtggcatgggtggcatggagcctcatcacatgaacggaagtctgggcagtggggacattgatggattgcccaagaattcaccaaacaatatcagcggtatttcaaatcccccaggcactcctcgcgacgacggagagcttgggggtaacttcctgcactcatttcaaaacgataattactcaccgtcaatgaccatgagcgtttag

SEQ ID NO: 134439 - DNA, 1086 bp, synthetic construct
  misc_feature 1..1086: note = Description of Artificial Sequence: Synthetic coding sequence
  source 1..1086: mol_type = other DNA
atgttcgctaaaggaaaaggaagcgcagtgccatctgacggccaagcccgtgagaaactggccctctacgtgtacgaatacctgcttcatgttggagctcagaagagcgcccagacttttttgagcgagatccggtgggagaagaatataacattgggtgagcctccaggattcctgcactcttggtggtgcgtcttctgggacctatattgcgccgctccagagcggagggacacctgcgaacacagtagtgaggccaaggcatttcatgactactctgctgccgccgccccatcacccgtgttgggtaacatcccaccgaacgacggtatgcccggcggcccaatacccccaggtttttttcagccctttatgtcgcccaggtatgccggaggaccacgtccaccaatcaggatgggaaatcaaccacccggcggagtgcccgggacacaaccattgcttcccaatagcatggacccaacccggcagcaaggtcacccgaatatgggtggttccatgcagagaatgaaccctccacgtgggatgggtccaatgggacctgggccacagaactatggatcaggcatgcgccctccgcccaactccctggggccagcgatgccgggcatcaacatgggccccggagcaggtagaccctggcctaatcccaacagcgctaacagcattccatacagtagttccagtccgggcacctacgtggggccccccggggggggaggtcctcccggaactcctatcatgcccagcccagcagatagcaccaacagtagcgataacatctatacaatgatcaatcccgtaccacctgggggctcacgctcaaattttccaatgggccctgggagcgatggacccatggggggtatgggtggaatggagccccatcatatgaatgggagtctaggttctggcgacatagatgggctgcccaagaatagtcccaacaatatatccggaatcagcaacccccctggcacgccaagggatgacggagagcttggcgggaacttcctccattcgttccagaatgataattactcaccctctatgaccatgagcgtgtag

SEQ ID NO: 134440 - DNA, 1167 bp, synthetic construct
  misc_feature 1..1167: note = Description of Artificial Sequence: Synthetic coding sequence
  source 1..1167: mol_type = other DNA
atgttcgctaaagggaaggggtctgctgtgcctagcgatggccaggcacgggaaaaactagccctctatgtctacgaatatctgctccacgtcggggcccagaagagtgcccagacttttttgtctgagatccgatgggaaaagaacatcactcttggggagccccctgggtttctgcactcttggtggtgcgtgttttgggacctctattgcgccgccccggaacggcgcgacacctgtgagcattcttctgaagcaaaggcatttcacgactacagcgctgccgccgccccaagcccagttctgggcaacatcccacccaatgacggtatgcctggcggcccgatcccgcccgggttttttcaaggcccccctggctcacagccgtccccgcacgcacaacccccaccgcacaatccttcaagcatgatgggaccgcacagccagccttttatgagcccccgatacgctggcggaccaagaccacctataagaatgggcaaccagcctcctggtggcgtgcctggaacacaacctctgctgcccaactccatggatcctactagacagcagggccaccctaacatggggggctccatgcagaggatgaatcccccacggggaatgggaccaatgggcccaggtccccagaactatggatccggcatgcggccacccccaaacagtctgggacctgccatgccaggtatcaatatggggcccggcgctggccggccgtggccaaatcctaattctgcaaattcgatcccctatagcagttcaagcccagggacctatgtgggaccccctggtggcggcgggccaccgggaactccaattatgccttctcctgcggattccactaattcatctgataatatctacacgatgataaatcccgttccccccggtggttcccgctccaacttcccaatgggtcccggctccgatggacctatggggggcatggggggcatggagccgcaccacatgaacggctccctcggctctggagatattgatggactgccaaaaaatagtccaaataacatctcaggcatatctaacccccccgggacaccaagagatgacggcgaactgggcgggaactttctgcacagtttccagaacgataactattcaccgtctatgacgatgtccgtatag

SEQ ID NO: 134441 - DNA, 837 bp, synthetic construct
  misc_feature 1..837: note = Description of Artificial Sequence: Synthetic coding sequence
  source 1..837: mol_type = other DNA
atgcccggtggtcccataccacctggtttcttccaggggccccctgggtcacagccttctccccatgctcagccccctccacataatccctcatctatgatggggccccactcacagccctttatgagcccaagatacgcaggaggaccccgcccacccatacggatggggaaccagcctccaggcggggtgccgggaacacagcccctccttcccaattcaatggatcctaccagacaacaggggcacccgaatatggggggttctatgcaacgcatgaacccacctcgcggaatggggcccatgggtcccggaccacaaaactacggatcgggaatgaggccccctcccaacagtctggggccagcaatgccgggcattaacatgggccctggggcagggagaccctggccgaacccaaattctgccaacagtataccatacagttcctctagtcctgggacttacgtcggccctcctggcggaggggggccccccggaacacccattatgccatctccggcagattcaaccaactcttcggataacatctataccatgattaacccggttcccccaggtgggagcagatcgaattttcctatggggccaggcagtgacggccccatgggaggaatgggcggaatggagccccaccacatgaacggatcactcggctccggggatatcgacggtttgcccaaaaacagccccaacaacatcagtggaatatcaaatcccccgggcacaccacgcgatgatggcgaattgggaggaaacttcctgcattcattccaaaatgataactacagtcccagcatgactatgtcagtctag

SEQ ID NO: 134442 - DNA, 471 bp, synthetic construct
  misc_feature 1..471: note = Description of Artificial Sequence: Synthetic coding sequence
  source 1..471: mol_type = other DNA
cctccaggtggggttcctggaacacaacccttgttacccaacagtatggaccctacacgccaacaggggcatccaaacatggggggtagcatgcagcgtatgaacccccctaggggaatgggcccaatgggccctgggccccagaactatgggagtggcatgagacccccaccaaatagtctcggcccagccatgccgggaattaacatgggacccggcgcgggaagaccttggccaaatccaaactccgctaatagcataccctactcttcttcctcacctggcacctacgttgggcctccgggcgggggcggaccaccaggcacacccatcatgccaagtccagctgactcgactaattcgtccgacaacatttacaccatgataaacccagtgccacctggggggtcccgctccaacgtctctctcctgagtaacaacctacacatccgccaccataacaagagctag

SEQ ID NO: 134443 - DNA, 1158 bp, synthetic construct
  misc_feature 1..1158: note = Description of Artificial Sequence: Synthetic coding sequence
  source 1..1158: mol_type = other DNA
atgtacgccaaggggggtaagggaagcgccgtcccatccgactcacaggcgcgagaaaaactggccctgtacgtatatgagtatctgctgcacatcggagcacagaagtctgcccagaccttcctgtctgaaattaggtgggaaaagaatattacactgggtgagcctccagggttccttcatagttggtggtgcgtgttctgggacttgtactgcgccgctcctgaccggcgtgaagcatgtgaacactccggcgaggctaaggcctttcaggattacagtgccgccgccgctccctcacccgtgatgggttctatggctcccggagacactatggccgctggctctatggccgcaggattttttcagggacccccgggatctcagcctagtccccataaccccaacgcccctatgatggggccacacggccagccgtttatgtcccctagattcccggggggtccccgccccaccctgcgtatgccatcacagccccccgctggcttaccagggtctcaaccccttctgccaggggcaatggagccttcccctagggcccagggacacccatctatgggtggaccaatgcagagagtgactccacccaggggaatggcttctgtaggccctcagtcttatggagggggtatgagacctcccccaaattccttggctgggcccggcctacctgcaatgaatatgggacccggcgtgcgcggaccatgggcgagcccgtctggtaactcaatcccttatagtagctcatcccctggttcatacaccgggccccccggcggtgggggacctcctggcacacctattatgccctcccctggtgattccactaatagtagtgaaaacatgtataccattatgaaccccatagggcaaggcgcaggccgggcaaattttcctcttgggccaggcccagaaggaccaatggccgccatgagtgccatggagccacaccacgtcaacggttcattgggttccggagatatggacgggttgccaaaaagttcccctggtgctgtcgccggtcttagcaacgctccggggacaccacgggacgacggagagatggccgctgcgggaacctttctccacccatttcccagcgagagttatagccccgggatgaccatgtccgtttag

SEQ ID NO: 134444 - DNA, 1092 bp, synthetic construct
  misc_feature 1..1092: note = Description of Artificial Sequence: Synthetic coding sequence
  source 1..1092: mol_type = other DNA
atgtacgccaaagggggcaagggcagcgctgtgccaagcgacagccaagccagggagaagctggcactttatgtatatgagtacctactgcatatcggcgcgcagaagagcgcccagacgtttctgtctgaaatcaggtgggaaaagaacattacgctgggagagccccctggatttctgcacagttggtggtgtgtgttctgggatctatactgcgccgctccagatcggcgcgaggcctgtgagcatagtggcgaggccaaggcatttcaggattacagtgcagccgccgcaccatcgccagtaatgggtagtatggcccctggagataccatggctgcaggatctatggcagccggtttctttcagccattcatgtcaccccggtttcccgggggccccaggcctaccctgcgaatgccaagtcagcccccagccggactgccagggtcacagcctctgttgccgggggcaatggagccaagcccacgcgcccaaggacaccccagcatggggggtccgatgcagcgggttacaccccctcggggaatggccagtgttggcccccagtcatatgggggaggaatgaggccaccgccaaactctctggctgggcctgggcttccggccatgaacatgggaccaggcgtccgaggaccctgggcttcaccttccggcaattcaattccctatagtagcagtagcccgggctcatatacaggaccaccgggtggaggaggtcccccgggcactccaatcatgccctcccctggagacagcactaactcctcagagaacatgtacacaattatgaaccctatcggacagggggccggacgtgcaaactttcctctcggaccagggccagagggccctatggcagctatgtcggctatggagcctcatcacgtgaacggatccctgggatccggggatatggacgggcttcccaaatcctcccccggagcggtggcgggattaagcaacgcccctgggacgcccagggatgatggagaaatggccgccgcaggtactttcctgcatccctttccttctgagtcctacagtcctggcatgaccatgtcagtctag

SEQ ID NO: 134445 - DNA, 2301 bp, synthetic construct
  misc_feature 1..2301: note = Description of Artificial Sequence: Synthetic coding sequence
  source 1..2301: mol_type = other DNA
atgaaggaaaaatctaaaaatgccgccagaactagacgggagaaggagaacagcgaattctatgaattggccaagctcctccctcttccgtcggccattacttcacagctggataaagcgagcataattcgccttaccacctcctatctgaagatgagggttgtctttcccgaaggactaggagaagcttgggggcattccagcaggacatcccctttggacaacgtgggtagagagctaggcagccacctgttacagactctcgatggcttcatcttcgtcgtggccccagatgggaaaattatgtacatcagtgaaacggccagtgtgcatctcggcctgtcacaggtggaactgaccggaaattctatttatgagtacatccatcctgctgatcacgacgagatgaccgccgttttgaccgctcatcagccttaccacagtcattttgtccaggagtatgagatcgagcggtccttcttcctgcgaatgaagtgcgtgctcgccaaacgaaatgccgggctcacatgtggtggatacaaggttatccactgtagcggctacctcaagatcagacagtacagcctggacatgtctcctttcgatggatgctaccagaacgtcggccttgtcgctgtgggccacagcttgcctccttccgccgtgaccgaaatcaagctgcatagcaacatgttcatgtttagagccagcctcgatatgaaattaatatttcttgatagcagagttgccgagttaactgggtacgagccacaggacttaatcgagaaaaccctgtaccaccacgtccacggctgcgacacctttcacttgcgatgtgcccatcacctgttgttggttaagggtcaggtcaccacgaagtattatcgcttcctggccaaacacggcggctgggtttgggtgcagtcatacgcgacaatagtccacaattccagatcctcaagaccccattgtatcgtgagtgtcaattacgtcttgaccgacaccgagtacaaggggcttcagctgtccctggatcagatttcagccagtaaacctgccttctcatatacaagctcgtcaacacctactatgacggataatagaaagggggccaagagccggctaagctctagtaagagtaagtcgagaacttcaccctacccccagtactccggtttccacacagaacgttccgagtcagaccacgacagtcagtggggcggtagccccctcaccgatactgcatccccgcaactgctagaccccgctgacaggcccgggtcccagcacgacgctagttgtgcctaccgccagttttccgaccgatcctccttatgttacggcttcgcgctggaccattcgcgtcttgtggaagaacggcacttccacacgcaggcatgcgaaggcgggcggtgcgaggcagggcggtatttcttaggaacaccccaagctggacgggagccatggtggggatcccgcgctgctctgccactcaccaaagcctccccagaatcccgggaggcctatgaaaactccatgccacatatcgccagcgtgcatcggatccatggaaggggtcattgggacgaagatagcgttgtgtcttcgccggatcccggatctgccagtgagtccggtgaccggtaccgcaccgagcagtatcagtcctcaccccacgagcctagcaagatagaaacgttgatccgcgccacccagcagatgatcaaagaagaagagaatagactgcagctgagaaaggccccttctgaccagctggcgtcaatcaatggggccgggaaaaagcattccctgtgttttgcgaattatcagcagcccccacccactggagaagtgtgccatggttcggcactggcgaatacgtctccgtgcgaccacatccagcaacgcgaggggaagatgttgtccccacatgaaaatgattatgacaactctccaacggctctctctcgtatctcatcaccaaattccgatcggattagcaagagctcgttgatccttgccaaggattacctccattctgacatatcaccccaccagactgccggagatcacccaacagtttcccctaattgctttggatcacatcgtcagtattttgacaaacacgcttacacccttacggggtacgcactggagcatctctatgacagtgagaccattcggaattattctctggggtgcaatgggagtcactttgacgtgacatcacatcttcgtatgcagcccgaccccgcgcagggtcataaaggcacttcagtgattatcactaatggctcctag

SEQ ID NO: 134446 - DNA, 2301 bp, synthetic construct
  misc_feature 1..2301: note = Description of Artificial Sequence: Synthetic coding sequence
  source 1..2301: mol_type = other DNA
atgaaagagaaatccaagaacgcagctaggacccggcgagagaaagagaacagcgagttttatgagctcgccaagctactgccattaccctccgcgataacctcacagctggataaggcatccattatccgtttgaccactagctatctgaagatgagggttgtgttcccagagggtctgggcgaagcttggggccattcctctaggacaagccctctcgataatgtgggtcgtgagctaggaagccatctgctgcaaaccctggatggatttatcttcgtagtggcgccagacggaaagatcatgtatatctcggaaaccgcttctgtgcacttaggcttgtcgcaggtggaactaacggggaattccatttatgaatacatacacccagccgatcacgatgaaatgactgcggtgctgactgcccaccaaccatatcactcgcactttgtccaggaatacgagatcgagaggagcttcttcctcagaatgaaatgtgtgctggccaaaagaaacgcggggctgacttgcggagggtataaggtgattcactgctccggctacctgaaaattcgtcaatattcgctggatatgagtccattcgatggctgttatcagaatgtggggctagtggccgtgggtcattcattaccacctagtgccgtgacagagataaaactgcattcaaacatgtttatgtttcgcgcgtctctggatatgaagcttatcttcttggactctcgtgtcgctgaactgaccggctacgaaccacaggacctgatcgaaaagacgctataccatcacgtacacggctgtgacacctttcacctgaggtgcgcccatcacttgctgcttgtcaaagggcaggtgaccaccaagtattataggttcctcgctaagcatggaggatgggtgtgggtccagtcctatgctactatcgtacacaattcacgttcctcaagacctcattgcattgtcagcgtcaattacgttctcacggacaccgaatacaaaggcctccagctgagcttggatcaaatctctgcttccaagcctgctttctcctacacgtcaagctccacacctacaatgaccgataacaggaaaggggcaaagtctcgcctctccagcagcaaatccaagtcccggacttctccttaccctcagtacagcggtttccacacagagcgtagcgagagcgaccatgactctcagtggggtggaagcccccttacagacaccgccagtccacagctccttgacccagccgatagaccgggtagccaacacgacgccagttgtgcctatcgccaattttcagaccggagctcattgtgttatggcttcgcccttgatcacagcaggctggtcgaggagcgccacttccacacacaagcttgcgagggggggagatgtgaagccggaaggtacttcctaggcactccccaagctggccgcgaaccatggtggggttcccgcgccgcacttccattaaccaaagccagtccggaaagtcgggaggcctatgagaactcaatgccccatattgccagcgtacaccggatacatggccggggccactgggatgaggacagcgtcgtgtcttctcctgaccccggcagcgcctcagaatctggtgaccgctatcgcactgagcagtatcaaagctctccccacgaaccttccaagatcgaaactctgatcagagctacacagcagatgatcaaagaggaggaaaaccggctgcagctgaggaaggccccctcggaccagttggccagtattaacggcgctggcaaaaagcactccctgtgttttgccaactaccagcaacctccaccgactggcgaggtgtgtcacgggtcggccttagcgaacaccagcccatgtgatcatatccagcagcgagaggggaagatgctctccccccacgaaaacgattatgacaactctcccacggcactcagcagaatctcctctcctaacagcgacaggatctcaaaatcttctctgattttggccaaggactacctgcactccgacatcagcccacatcaaacagccggggatcaccctactgtaagcccgaactgcttcggctcccacagacagtactttgacaaacatgcctacaccctgacagggtatgctctggagcacttgtatgactctgaaactataagaaattatagcctcggatgcaacgggtcacactttgatgttacttcgcacttgagaatgcagcccgacccagcacagggtcacaaaggtacaagtgtgatcattaccaatggttcctag

SEQ ID NO: 134447 - DNA, 2004 bp, synthetic construct
  misc_feature 1..2004: note = Description of Artificial Sequence: Synthetic coding sequence
  source 1..2004: mol_type = other DNA
atgaaggaaaagagtaagaatgcagccaagacaagaagagaaaaagaaaatggcgaattctacgagcttgccaaactgctgccactgccttccgccattacaagtcaactcgacaaggcttctatcatccggctgacgacatcatatctcaaaatgcgcgctgtatttcccgaagggctgggggatgcttgggggcagccgtctagggccggccctcttgacggagttgcaaaagaactgggatcacacctgctacagactcttgacggattcgtgtttgtggttgcctctgacggcaaaattatgtatattagtgagacagcgtccgtgcacctaggcctaagtcaggtcgaactcaccgggaacagcatctacgaatatattcacccatctgaccacgacgaaatgaccgcggtgctcaccgcgcaccagccacttcatcatcacctgttgcaagaatacgaaatcgaaaggtccttctttttgcgaatgaagtgcgtgcttgccaagcgtaacgctggactgacatgcagcggctacaaagtgatccactgtagcggttatcttaagatccgccagtatatgcttgacatgtccctctacgactcatgctatcagatcgtggggctcgtggcagtcgggcagtcattgcccccctctgccattacagaaatcaagctttatagcaacatgtttatgttcagggctagcctcgacttgaagctcattttcctcgacagtcgggtaaccgaggtgactgggtacgagcctcaagatctgatagagaagacactatatcaccacgtccatggatgtgacgtcttccacctccgctatgctcaccaccttctgctggtcaagggccaggtcacaactaagtattacaggcttctgtccaaacgcgggggatgggtctgggtgcagtcatacgccacagtggtacataacagccgctcctctcgccctcattgcatcgtgtccgtgaactatgtgctcaccgaaatagaatacaaggagctgcagttgtctttggaacaagtttctacagctaagagccaggactcctggagaacagctctgagcacgagccaggagaccagaaaacttgttaaaccgaagaatacgaagatgaagaccaaattaagaaccaacccttatccccctcagcaatacagtagttttcagatggacaaacttgaatgcggccagctcggcaattggcgcgcctcaccacccgcctccgccgctgcacccccagagctccagcctcacagtgaaagtagcgatttgctgtacaccccatcttactccttacctttctcgtaccactacggccacttccctctcgactcccatgtgttttcatccaaaaagccaatgctgcccgccaaatttggacagccacaaggaagcccctgcgaggttgccaggttcttcctgtcaacgctgcccgcttccggcgaatgccagtggcactatgctaatcccttagtcccctcatcctcttccccagccaagaaccccccagaaccacctgccaacaccgcccggcactcattagtgccatcctatgaagcccccgcggccgctgtccgccgattcggcgaggacactgctccaccatcttttccatcttgcggtcactatagggaagagcccgctttggggcctgccaaagctgcaaggcaggcagctcgcgacggagctcggctagcccttgccagggcagctccagagtgttgcgcccctccaactccagaagcacccggggcgcctgcccagctcccctttgtcctgctgaattaccatcgcgtgttagctcggagagggcctctgggcggcgcagccccagcggcctctggtttggcatgtgcaccaggcggaccagaggcagctactggagctctgcggctgaggcacccttctcctgctgctacctcgccccctggagccccactgcctcactacctgggagcatctgtgatcattacgaacggtcgctag

SEQ ID NO: 134448 - DNA, 1713 bp, synthetic construct
  misc_feature 1..1713: note = Description of Artificial Sequence: Synthetic coding sequence
  source 1..1713: mol_type = other DNA
atgaaggagaagtccaaaaacgcagccaaaaccagaagggaaaaggaaaatggtgagttttacgagctggctaaactgctcccattaccttccgcaattacctctcaactcgataaggcttccatcattcgtcttaccactagctatctgaagatgagggccgtcttccctgagggtctgggggatgcttggggccaacccagtagggcaggcccccttgatggtgttgccaaagagctcggttcacatctcctgcagactttagatggcttcgtctttgtagtggccagcgatggcaaaattatgtacatttctgagacagcctcggttcatttaggactctctcaggttgaattaacaggtaattccatatatgagtacattcaccctagcgatcatgacgaaatgactgccgtactgacagcacatcagccgctgcaccaccatctcttacaggaatacgaaatagaaagatcattttttctgcgtatgaaatgcgtgcttgctaaacgtaacgcaggactgacatgctctggttacaaggtgatacattgcagtggatacctgaagattcggcagtatatgctcgacatgagcctgtatgattcctgctaccagatcgtaggtttagtggcagttggacagtcccttccaccttctgctattactgaaattaaactctacagcaacatgttcatgtttcgggccagcctggacctcaaactgatcttcctggattcgagggtgacagaggtcactgggtatgagccacaggatctgatagaaaagacactctatcaccatgtccatggctgtgatgtgttccatctgcgctatgctcatcacctcttattagtgaaaggccaggtaacgaccaagtactacaggctgctctctaagcgcggtggctgggtgtgggtccagtcctatgccacagtggtgcacaactctcgatcatcccggccacactgtattgtctcagtgaattatgtactaacggagattgagtataaggaactgcagctgtccctcgagcaggtatcaactgcaaaatcacaggatagctggaggaccgcactttccaccagccaggagacgagaaagctggtgaagcctaaaaataccaagatgaagaccaaactacgcacaaatccctacccaccgcaacagtatagctcctttcagatggataagttagaatgcggacagctgggcaattggcgggccagtccccctgcaagcgccgcagcccctccagagttacagccccatagtgagagctctgatctcctgtataccccctcttattccctaccattcagttatcattacgggcactttccccttgattcacacgtattctcctccaagaaacctatgctgccggccaaatttggccagccacagggaagcccttgtgaggtggcccgcttcttcctgagtactctaccagcctccggcgaatgccagtggcattatgccaaccctttggtcccttcatcctcctccccagccaaaaaccctccagagccccctgcaaataccgccagacactctctggtgcccagctacgaaggcggatccggtctgctagtgggaaaagttggtggcctccgaacggcgggatctcgctcgtcccacggcggtggatggcaaatggaaacagagccaagtagattcggtcagacctgccctcttagtgccagcaaatag

SEQ ID NO: 134449 - DNA, 447 bp, synthetic construct
  misc_feature 1..447: note = Description of Artificial Sequence: Synthetic coding sequence
  source 1..447: mol_type = other DNA
atgttcagacgccccgtgttgcaggtccttcggcagtttgtcaggcacgagtctgaaacgactacttcactggtgcttgagaggagtctcaatcgggtacatctgttgggcagagtggggcaggatcccgttctcagacaggtggaaggtaaaaatccagtgactattttctcactcgccactaatgagatgtggcggtctggagactctgaggtgtaccaattgggcgatgtctcccagaaaaccacttggcaccgcatcagcgtgttccggccaggacttagagatgttgcgtaccagtacgtgaagaagggctcccgtatctacctcgaggggaaaatcgattacggcgagtacatggataaaaacaacgtgagacgacaggcaaccaccatcatcgccgataacatcattttcctgagcgatcagactaaagagaaagagtag

SEQ ID NO: 134450 - DNA, 366 bp, synthetic construct
  misc_feature 1..366: note = Description of Artificial Sequence: Synthetic coding sequence
  source 1..366: mol_type = other DNA
atgttcaggagaccagtactgcaggtgctgaggcagttcgtgcgacacgagtccgaaaccactacatccctggtcctggagcgcagtctcaaccgggttcatctgctcggacgggttggccaggatcccgtgctacggcaggtggaagggaagaatcctgtgacaatctttagcctagctactaatgagatgtggaggtccggagattccgaagtttaccaattaggggacgtgtcacagaagactacttggcatcgcattagtgtatttcgaccggggttgagagacgtcgcttatcagtatgtgaaaaagggaagccgaatatacctggagggtaaaattgactacggagagtacatggactag

SEQ ID NO: 134451 - DNA, 447 bp, synthetic construct
  misc_feature 1..447: note = Description of Artificial Sequence: Synthetic coding sequence
  source 1..447: mol_type = other DNA
atgttcaggagacctgtgcttcaggttttgagacagttcgtgaggcatgagagtgagacaaccacttctctggtgcttgaaaggagcctgaatagggtccacctcctgggacgtgtgggccaagacccagtgctgagacaggtcgagggcaagaaccctgtgaccatattctccttagcaaccaacgaaatgtggcgcagtggcgacagcgaagtgtaccagctgggagatgtgtcacagaaaactacgtggcaccggatcagcgtgttccgccctggcctgagagatgtggcctatcagtatgtgaagaaagggtcgagaatttacctggagggcaagatcgactacggcgaatatatggacaaaaataacgttcgtaggcaggcaacaaccatcatcgcggacaacatcatcttcctgagcgaccagaccaaagagaaggagtag

SEQ ID NO: 134452 - DNA, 408 bp, synthetic construct
  misc_feature 1..408: note = Description of Artificial Sequence: Synthetic coding sequence
  source 1..408: mol_type = other DNA
atgtttaggcgcccagtcctacaggtgctgcggcagttcgtccgacatgaaagtgaaacgacaacaagtctagtcttggagcggtccttgaacagggtacacctactcggccgggttggccaggacccggtcttgcgacaagtggagggcaagaatccggtcaccatcttctcgcttgccactaatgagatgtggagatccggggatagtgaggtctatcaactcggtgacgtgtcacaaaagacaacatggcacaggattagtgtttttcgtcctggactcagggacgttgcatatcaatacgttaagaagggcagcagaatctacttggaggggaaaatcgactacggggagtacatggacaagaataatgttcgcagacaggccacgactataattgctgactag

SEQ ID NO: 134453 - DNA, 87 bp, synthetic construct
  misc_feature 1..87: note = Description of Artificial Sequence: Synthetic coding sequence
  source 1..87: mol_type = other DNA
atgtttcgcagacctgttctacaagtccttcgtcagttcgtgaggcacgagagtgaaacgaccactagcctggtactcgaacgctag

SEQ ID NO: 134454 - DNA, 447 bp, synthetic construct
  misc_feature 1..447: note = Description of Artificial Sequence: Synthetic coding sequence
  source 1..447: mol_type = other DNA
atgtttcgtcgccctgtattgcaggtgcttcgccagtttgtgcggcacgagtccgaaactactactagccttgtgctggagcggtcccttaacagagtgcatttactgggtagggtgggacaggatcccgtcctgaggcaggtggagggtaagaacccagtgacaatcttttctctggcaaccaacgagatgtggcggagcggggacagcgaggtttatcagctcggcgatgtgagccagaagaccacatggcataggatctccgtattcagacctggactccgagacgttgcctaccagtacgtaaagaagggctcaaggatatatcttgagggtaaaattgattatggtgagtacatggataaaaataacgttcgcagacaagcgactacaataattgcggataacataatctttctgagcgaccagaccaaggaaaaggagtag

SEQ ID NO: 134455 - DNA, 447 bp, synthetic construct
  misc_feature 1..447: note = Description of Artificial Sequence: Synthetic coding sequence
  source 1..447: mol_type = other DNA
atgttcagaagaccagtcctgcaggtgctgcggcagtttgtcagacacgagagcgagactacaacgtctctggtgttggagcgtagccttaacagggtgcacctattgggcagggtgggccaggaccccgttcttcgccaggtggagggcaagaacccagtgacaatctttagcctggcgaccaacgagatgtggcgaagcggcgattccgaggtttaccagcttggcgatgtttcccaaaaaacaacatggcaccggatatcagtcttccggcctggtctccgcgatgtggcttaccagtacgttaaaaaaggtagccggatctatttggaggggaaaattgattatggcgaatacatggataagaataacgtacggcgacaggctacaaccatcatcgctgacaatatcatctttctgagtgaccagacaaaagaaaaagaatag

SEQ ID NO: 134456 - DNA, 447 bp, synthetic construct
  misc_feature 1..447: note = Description of Artificial Sequence: Synthetic coding sequence
  source 1..447: mol_type = other DNA
atgttccgacgccccgtcttgcaggttctgagacaattcgtgcggcatgaatctgagaccacaacatcactggttctcgaacgatccctcaaccgcgtgcacctgttgggaagagttggccaggatccggtgctgcggcaggtggaaggcaagaatcctgtgaccatcttttctctggcaacaaacgagatgtggcgctctggcgactccgaagtataccagctgggggatgttagccaaaagacgacatggcatagaatttccgtcttcagacctggactgagggacgtcgcctatcagtacgttaagaagggaagtcgaatctacctagaaggcaagattgactatggcgagtatatggataagaataacgtgaggagacaagccactacaataatcgcggataacatcatcttcctgagcgaccaaacaaaggaaaaggagtag

SEQ ID NO: 134457 - DNA, 1086 bp, synthetic construct
  misc_feature 1..1086: note = Description of Artificial Sequence: Synthetic coding sequence
  source 1..1086: mol_type = other DNA
atgtatgggaaaggcaaatctaattcctctgcagtgccctctgactcgcaggcaagggagaaactcgccctttacgtatatgagtacctcctgcatgtcggagctcaaaagtccgcccagaccttcctttctgagattcggtgggaaaagaacattaccttgggggagcctcccggatttctccatagttggtggtgcgtgttttgggacctctactgcgctgcccccgaaaggagggaaacttgtgagcacagcagtgaggccaaagcctttcacgattattcagctgcagccgcgcccagtccagtgctgggtaacataccacccggcgatggaatgccagtgggccccgtgccccctggattcttccagcccttcatgtcacctcgttatcccgggggtcctcgacccccactcaggatccccaaccaagccttgggcggtgtccccggatctcagcccctgctcccatctgggatggatcccacacgccagcaggggcatccaaatatgggcgggcccatgcagcgaatgacacccccccgaggcatggtgcctttgggtccccaaaactacgggggagcaatgcgaccccctttaaacgcactgggggggccaggtatgccagggatgaatatggggcctggaggcggcagaccctggccaaacccgaccaacgccaactctatcccctacagctctgcatcaccaggcaattacgtgggtcccccgggcggaggtggaccccctggcactccaatcatgccatccccagccgacagcactaattcaggagataacatgtacaccctcatgaacgctgtgcccccaggcccaaatcgccctaattttcccatgggcccaggaagtgatggccccatgggtgggctagggggcatggaatcacatcacatgaacgggtccctgggatccggcgatatggactccattagtaaaaactctccgaacaatatgtccttatcaaaccagcccggaactcctcgtgatgacggcgaaatggggggcaatttcctcaatccgttccagagcgagtcctactcaccaagcatgacaatgtcggtctag

SEQ ID NO: 134458 - DNA, 945 bp, synthetic construct
  misc_feature 1..945: note = Description of Artificial Sequence: Synthetic coding sequence
  source 1..945: mol_type = other DNA
atggggaagaatataaccttgggggaaccacctgggtttctgcattcttggtggtgtgtcttttgggacctttactgcgcggcccccgaaagaagagagacatgtgaacatagttccgaggccaaggccttccatgattactctgccgccgctgcaccaagcccagtgttagggaatatcccaccgggtgatgggatgccggtgggacctgtgcctcccggtttcttccagccattcatgtctcctcgttatcctggtggaccccggccacccctccgcataccgaaccaggccctggggggtgttccaggatcccaaccgctgctcccatctggaatggatcccacacggcagcaaggtcaccccaacatgggtggccccatgcagcgcatgacccctccacgtggcatggtgccgctcgggccccagaactacggtggagcaatgagacctccactaaacgcactgggaggccctggcatgcccggaatgaacatgggaccaggaggggggcgaccatggcctaacccaacaaacgctaatagtataccttactcctctgcttcccccggaaactatgtgggtcctcctggcgggggtggccctccaggcacccctattatgccgtctcctgcagactccacaaacagtggtgacaacatgtacactctgatgaacgcagtacctccgggccccaaccgcccaaatttcccgatgggacctggatcagacggacctatgggcggattaggcgggatggaatcccaccacatgaacggctccctgggtagtggcgatatggactcaatttccaagaactctccgaataatatgtcccttagtaaccagcctggaacccccagggatgacggggagatgggcggtaactttctgaaccctttccagagcgagtcctactcccctagcatgaccatgtccgtctag

SEQ ID NO: 134459 - DNA, 1026 bp, synthetic construct
  misc_feature 1..1026: note = Description of Artificial Sequence: Synthetic coding sequence
  source 1..1026: mol_type = other DNA
atgtacgggaaggggaagtccaacagtagcgccgtgccctcagactcgcaagctcgggaaaagctggccctgtatgtctacgaatacttgctgcatgtgggtgcccagaagtcagcccagacgttcctgtcagagatcaggtgggagaaaaacataactttgggcgaaccccccggattcctgcattcttggtggtgtgtgttctgggatctatattgcgcagcgcccgagagaagggaaacctgcgaacattcttcagaggcaaaggcctttcatgattattccgcggcggcagcgccctctccagtcctggggaacatcccacctggcgacggaatgccagtgggtccagtccctcccgggttctttcaggctttggggggagttcctgggtcccagcctcttttacctagcggcatggatcctactagacagcagggccatcctaatatggggggtcctatgcagaggatgacacccccacgcggtatggtccccctgggcccccagaactacgggggggctatgaggccaccactcaacgccctcgggggaccaggcatgcctgggatgaatatggggcctggcggcggccgcccctggccaaaccccacaaacgctaactccatcccatatagttcagccagcccgggtaattatgtggggccacccggcggtgggggccccccaggcacacccatcatgcctagcccagccgacagcactaattcaggagacaacatgtataccttgatgaatgctgtgccccctggcccgaaccggccaaactttcctatgggccctggcagtgatggacctatggggggtctgggcggaatggagtcccatcacatgaatggatcactgggatccggtgatatggattccatctctaagaattctccaaataatatgagcttgtcaaatcaaccaggaacacctcgcgacgatggggagatggggggaaattttcttaaccctttccagagtgagtcctacagtccctctatgaccatgagcgtgtag

SEQ ID NO: 134460 - DNA, 1200 bp, synthetic construct
  misc_feature 1..1200: note = Description of Artificial Sequence: Synthetic coding sequence
  source 1..1200: mol_type = other DNA
atggccttctggggatggagggctgccgcagcccttagactgtgggggagagtggttgagcgggtcgaagcagggggaggggtgggaccttttcaggcctgcggatgtagactggtattgggcgggcgggatgacgtgagcgcaggactccgaggctcccacggcgcgcgcggcgagccattagatcctgcacgccctctgcagcgccctccccggcctgaagtgcccagggctttcaggcgtcagccacgggcggccgccccttccttctttttttcaagcattaagggcggaaggcggagcatctcattctcggtgggagcatcatcggtcgttggttcaggagggtcttccgataagggtaagctcagcctccaggatgtcgccgagctgatccgagcacgtgcctgccaacgagtggtagtaatggtgggcgctgggattagcacaccttcaggaatcccagactttcggtctccaggttcaggcctctactccaatctgcagcagtacgatcttccgtacccggaggcgatatttgaactacctttcttcttccacaatccaaagccctttttcacactggcgaaggaactctacccaggcaattacaagcccaatgtgacacattatttcctccgcctgctgcacgataagggcttgctgcttcggctgtatacccagaatattgacggactagagcgtgtgtccgggattccagctagtaaacttgtggaggctcacggcacctttgcatctgccacctgtactgtttgccagcggccattccctggtgaggatattagagctgatgtgatggcggatagggttcccaggtgccctgtttgtactggagttgtgaagcctgacatcgtgttcttcggagaaccgctgccacagaggttcctcctacacgtggtggactttccgatggccgacctactattaattctcgggacctcactggaagtggaaccattcgcctctttgacggaggccgtccgatcctcagtgccccgcctcctcatcaacagggatctggtcggccccttggcctggcacccacgcagccgcgatgtggcgcagttgggagatgtagtgcatggggtggagtctctagtagaactcctcggctggaccgaggaaatgcgagatttggtacagagagagacaggcaaactcgatgggccagacaagtag

SEQ ID NO: 134461 - DNA, 957 bp, synthetic construct
  misc_feature 1..957: note = Description of Artificial Sequence: Synthetic coding sequence
  source 1..957: mol_type = other DNA
atggctttttggggatggagagccgcagctgcgctgaggctttggggccgagtcgtggaacgagtagaagctggggggggggtcggccctttccaagcatgcgggtgccgcctcgtcttgggtggccgagatgatgacgttgctgaactgatccgcgccagggcctgtcagcgggtcgtagtaatggtcggagccggtatctctacaccttccggcatacccgattttcgttctcccgggtccgggctgtacagcaacctgcaacaatatgatctgccctatcccgaggcaatcttcgaacttcccttcttctttcataaccccaaaccatttttcacgttggccaaggaactgtacccaggaaactacaaacccaacgtgacacattactttctccggctgctgcacgataaaggcctgctgctacgactgtatacccagaacattgacggcctggaacgagtgagtggcatcccggcttccaagctcgttgaggctcatggcacgttcgcctccgctacttgtacagtgtgccagaggccatttcccggggaagatattcgtgcggacgtaatggccgacagagtcccaagatgcccagtgtgcacaggagttgtaaagcccgacatcgtcttctttggggagccgcttccacaacgattcctgctgcacgtcgtagacttccccatggcagacttgcttttgatcctcggcacaagtctggaggtggaaccctttgcctctttaaccgaggcagtgcgcagtagtgtccccagattgcttatcaacagagacctggtcggccctctagcatggcaccccaggagccgcgacgtcgcccaacttggcgacgttgtccatggcgtcgagtcattggtggagctgcttggatggacagaagagatgcgggacttggtacagagagaaaccggaaagttggatggccctgataagtag

SEQ ID NO: 134462 - DNA, 774 bp, synthetic construct
  misc_feature 1..774: note = Description of Artificial Sequence: Synthetic coding sequence
  source 1..774: mol_type = other DNA
atggtgggggctgggatctctaccccatctgggatccctgattttagatccccaggctccgggctctacagcaacctccaacaatacgacttaccttatcctgaggccatttttgaactgccgttttttttccacaatccgaagcctttcttcaccctcgctaaggagctctatcccggcaactataagcctaatgtgacgcactactttttgcgcctgctgcatgacaagggactgctcctccggctctatacccagaatatcgacggactcgagcgggtcagcggaatccccgcgagtaaactggtcgaggcgcacggcactttcgcaagtgcgacttgcaccgtctgccagaggcccttccctggcgaggacatcagggccgatgtgatggcagaccgcgtgccgagatgtccagtctgcacaggagtggtgaaaccagacatagtgttctttggcgagcccttgccacagcggttcctgctgcacgtggtggactttcccatggccgacctattgcttattcttgggacgtccctggaggtggagcctttcgcctctctgacggaggctgtcaggtcgagcgttccccgcttacttatcaacagggatttggtgggacccttggcatggcacccaagatccagggatgttgcacagctgggtgacgtggtgcacggtgtagagtctcttgtggagctccttgggtggacagaagaaatgagggacctggtgcagcgagaaactggcaagcttgacggaccagacaagtag

SEQ ID NO: 134463 - DNA, 945 bp, synthetic construct
  misc_feature 1..945: note = Description of Artificial Sequence: Synthetic coding sequence
  source 1..945: mol_type = other DNA
atgaaaatgagctttgcgctgaccttccgaagcgcaaaaggcagatggattgccaatccttcgcagccatgttccaaggcctctatcggattgttcgtgcccgcctcacccccactggatccagagaaggttaaggagcttcaacggttcattaccttgtctaagaggttactggtgatgactggagccggtatctcaactgaatccggaatccccgactacagaagcgagaaggtcgggctctacgcgagaactgatcgaaggccaatacagcacggcgacttcgttcgcagcgctcccatcagacaacgatactgggctcggaacttcgtcggttggcctcagtttagttctcatcagcccaatccagcccactgggcgctatctacctgggagaagctgggcaaactgtactggctggtgacacagaacgtggatgccttgcacacgaaagcagggagtaggcggttgacagaactccacggctgtatggaccgggtcctgtgcctggattgcggagaacagactcctaggggggtgctgcaagagagatttcaggtgttaaatccaacatggtcggctgaggcccacgggttggccccggacggtgatgtcttcctgagtgaagagcaagtgcgttcgttccaggtgccaacctgcgtgcagtgtggaggccacctcaaacctgacgtggtgttctttggagacacagtaaacccagataaagtggacttcgttcacaagagagtgaaggaggcagatagtctgttggtggtaggctcaagcctccaagtctacagcggctataggtttattctaacagcatgggagaaaaagcttccaatcgccattcttaatataggaccgacacgatctgatgacctcgcatgccttaaactcaatagcagatgtggggaactgctaccgctgattgatccctgctag

SEQ ID NO: 134464 - DNA, 879 bp, synthetic construct
  misc_feature 1..879: note = Description of Artificial Sequence: Synthetic coding sequence
  source 1..879: mol_type = other DNA
atgagaccacttcagatcgtgccatcgcgactaatcagccaattgtactgcgggttgaagcctcctgcctctaccaggaatcagatttgcctcaaaatggctcgccccagctctagcatggctgatttccgcaagttctttgcaaaagctaagcacattgtgatcataagtggggccggcgtgagcgcggaatcaggggttccaaccttcaggggtgcagggggctactggaggaaatggcaggcccaggatctcgccacaccactggcattcgcacacaacccaagccgggtctgggagttttaccactatcggcgggaagtaatgggaagcaaggaacctaacgccggccacagggcgatcgccgagtgcgaaacaagattaggcaaacagggaaggcgagtggtggtcatcactcagaatatagacgaactacaccgcaaggctgggacaaagaatctcttagagattcacggatccctgtttaaaacccgatgcacaagttgtggcgtcgtagctgaaaactataagagtcccatctgcccagccctgagtggcaagggctgtgaagaagccggctgcggtggcctgctgcgaccgcacgtcgtgtggtttggcgaaaacctagaccctgccattctggaggaggtggatcgggagctggcccattgcgatctgtgcctggtggtggggaccagctctgtggtgtatcccgccgctatgttcgctcctcaagtggccgcaagaggagtgcccgtagcggagttcaatacagagaccacacctgcaacaaacaggtttagatttcacttccaggggccttgtggaaccacacttcctgaagcgctagcatgccatgaaaatgagactgtgtcctag

SEQ ID NO: 134465 - DNA, 933 bp, synthetic construct
  misc_feature 1..933: note = Description of Artificial Sequence: Synthetic coding sequence
  source 1..933: mol_type = other DNA
atgcgcccgctgcagatcgtgccaagtcgcctgatctcccagctgtactgcggcctgaaaccacctgctagcacacggaaccagatttgcctgaaaatggcccgccccagtagctctatggccgacttcaggaagttctttgcaaaagctaaacatattgtgataatctcaggggcaggcgtttcagccgagtccggagtgccaaccttcaggggcgccggcggatattggaggaagtggcaggcacaggatctcgcaacccccttggccttcgcccataatccatctagggtctgggagttttatcactacaggcgggaagtgatgggttctaaagagccaaacgcggggcaccgggctatcgcagagtgcgagactcgcctgggaaaacaaggcagaagggtagtcgttatcactcagaacatcgatgaactccatcgaaaagccggcaccaagaacctgctggaaatacatggtagtttgttcaagactaggtgcacatcctgtggggtggttgccgagaactataagtcacctatctgccccgccctatctggcaagggtgcccctgaaccgggcacccaagatgcatccatcccggtcgaaaagctccctagatgcgaagaggctggctgcggcggtctcttgcggcctcatgtggtttggttcggcgagaacctcgaccctgcaatcctggaagaggtggatagagaactggcccattgtgacctgtgccttgtggtgggcacctctagcgtcgtgtaccctgccgcaatgttcgctcctcaggtggctgccaggggtgttcccgtggctgagttcaatacagaaacaactccagcgaccaataggttcaggtttcactttcagggaccatgcggcaccactctgccagaagccctggcatgtcacgagaacgagacagtctcatag

SEQ ID NO: 134466 - DNA, 900 bp, synthetic construct
  misc_feature 1..900: note = Description of Artificial Sequence: Synthetic coding sequence
  source 1..900: mol_type = other DNA
atgaggccgctgcagatagtcccgtcaagactcatctcccaactctattgtggcttaaaaccacccgcctctactcgtaatcaaatttgcctgaaaatggcgcggcctagctctagtatggccgacttcaggaagttctttgctaaagcaaaacacatcgtgatcatatctggagcaggcgtctcggccgaatccggcgtccccaccttcagaggagccgggggctattggcggaagtggcaggcccaggatctcgcaacccctttagcgttcgcccacaatccatctcgcgtctgggaattttaccattatcgccgggaggtcatgggctccaaagaacctaacgcagggcatcgtgcaattgccgaatgtgagactcgtctcggaaaacagggcagaagagtggtggtcatcacccagaatatcgacgaactacaccgcaaagcaggcaccaaaaacttactagagatacatggatctctgtttaagacccggtgcacctcctgcggtgtggtggcagaaaactacaagtctccgatttgccctgcactgagcgggaagggcgcgccagagcccggaacacaagacgcgagcattccagtcgagaagctacccaggtgtgaagaggcaggctgtggggggctgttgagacctcacgtcgtgtggttcggggagaacttggaccctgcaatccttgaggaggtcgaccgagagctggcccattgtgatttatgcctagtggtcgggacttcttctgtcgtatatcccgccgccatgttcgcccctcaggttgcagcaagaggggtcccagtagcagagtttaacaccgagaccacacccgcaacgaatcgcttcagtcacctcatttccatatcctccttgataattattaaaaactag

SEQ ID NO: 134467 - DNA, 609 bp, synthetic construct
  misc_feature 1..609: note = Description of Artificial Sequence: Synthetic coding sequence
  source 1..609: mol_type = other DNA
atggggtcaaaagagccgaacgccggccaccgcgctattgccgaatgtgagactaggcttggtaagcagggccggcgggtcgtggttattacccaaaacatagatgaactgcaccggaaagccgggacaaaaaatctgctggagatacacgggtctctgtttaaaacccgctgtacatcctgtggagtggtggccgagaactacaagtctcccatatgtcccgcacttagcggcaaaggcgctccggagcctggcactcaggatgcatccatacctgttgaaaaactgcctaggtgcgaagaggctggatgcggaggactgttgcggccccacgtggtctggttcggagagaatctggatcctgctatcctggaggaggtggatagagagctcgcacattgcgacctctgcctggtcgtgggcacctcttcagtggtttatcccgcagcaatgttcgccccacaagtggctgccagaggtgtgcctgttgctgaatttaacaccgaaacaacacccgccacaaaccggttcaggtttcactttcaaggcccatgcgggaccaccctgcccgaagcgctggcttgccacgagaatgaaacagtttcttag

SEQ ID NO: 134468 - DNA, 1203 bp, synthetic construct
  misc_feature 1..1203: note = Description of Artificial Sequence: Synthetic coding sequence
  source 1..1203: mol_type = other DNA
atggccgcaggtgggttgtcgaggtccgagcggaaagcagccgaacgggtgcgccgactcagagaggagcagcagagggagcgtctgcgccaggtcagtcggatccttcggaaagcagcagccgagagatcagccgaagaggggaggttgctcgctgaaagtgccgatctcgtaactgagctgcagggccgatcccgaagaagggaagggctcaagcggagacaggaagaggtgtgtgacgacccagaggaactacggggaaaagtgcgcgagcttgcttctgcagtgaggaacgctaagtacttggtggtctacactggcgccgggatatctactgcagcatcgatcccagactaccgtggccctaacggggtctggaccctcttgcaaaaggggcgaagcgtctccgccgccgacctgagcgaagccgaacccacactgacccatatgtcaatcacacggctgcacgagcagaagctggtccagcacgtggtttctcaaaattgtgacggtcttcatctgaggagtgggttgccacgaaccgcaatctccgagttacatggtaacatgtatattgaggtgtgcacatcttgtgtgcctaaccgggaatatgtgcgagtgtttgacgtgaccgaacgcactgcactacatcgccaccagacaggccgaacttgccataagtgcggtacccagctgcgagataccattgtccatttcggggagcgaggcacgttgggacagccgttgaactgggaggccgccaccgaagccgctagcagagctgataccatcctttgccttggaagttccttgaaggtactcaagaaatatcctagattatggtgcatgactaaacctcctagccgacgcccaaagctttacattgtcaatttgcagtggacccctaaggatgattgggctgccctaaagctgcatggaaaatgtgacgacgtgatgagacttctgatggccgagttgggtcttgagatccctgcctactcacgctggcaggatccaatctttagcttagccactcccttgcgggcgggagaggaaggttcccacagccgaaaaagcctctgtaggagccgggaggaagccccaccgggtgacagaggtgcacccttgtcctcagctcctattttgggaggttggttcggtcgaggttgcacaaagagaaccaaaagaaaaaaagtcacatag

SEQ ID NO: 134469 - DNA, 963 bp, synthetic construct
  misc_feature 1..963: note = Description of Artificial Sequence: Synthetic coding sequence
  source 1..963: mol_type = other DNA
atgcctggcccacgccggcgctcaccctccgcatgcccacaagtctcacggatcctgagaaaagctgctgccgaacggagtgcagaggagggcaggctgctggctgaatccgctgatcttgttaccgagcttcagggccgatcacggcgaagagaaggtttgaagcggaggcaggaggaggtctgcgacgaccctgaggaactgcgaggaaaggtcagagagctagccagcgccgttaggaatgcaaagtacctagtcgtgtacacgggcgctggaataagcaccgcagcgagcatccctgactatcggggccccaatggagtgtggactttactgcagaaggggcgcagcgtttccgcagccgacctaagtgaagcagagccaaccctgacgcatatgtctatcaccagattgcacgaacagaagcttgtgcagcacgtcgtctctcagaactgcgacggtctgcacctgcgctcgggtctcccccgtactgcgataagcgaactacacggaaatatgtacattgaggtgtgtaccagttgtgttccaaacagggaatacgtgcgcgtctttgacgtcactgaacgaactgcactgcatcgccaccagaccgggcggacctgtcacaagtgcggcacacaactcagggacactatcgtgcactttggcgagcggggcactctcggacaacctctgaactgggaggcagccactgaagccgcttctcgagcagatacaatactatgcctaggcagttctctgaaggtgctgaaaaagtatccccggctatggtgcatgaccaaacccccatccaggaggcccaagctgtatattgttaatctgcagtggactcccaaggacgactgggcagcactgaagctgcacggcaaatgcgacgacgttatgcggcttcttatggctgagctgggactagagatcccagcttactcccgggtgctgtag

SEQ ID NO: 134470 - DNA, 855 bp, synthetic construct
  misc_feature 1..855: note = Description of Artificial Sequence: Synthetic coding sequence
  source 1..855: mol_type = other DNA
atgtcaatgttaccatcgtttggattcacacaagaacaagtagcatgtgtttgcgaagtccttcagcaaggcggaaatctcgaaagactggggcggttcctgtggtccctgccggcttgtgaccatttgcataaaaatgagtccgttctcaaagctaaagccgttgttgcctttcaccggggcaacttcagggagctgtataaaattcttgagtcacatcagtttagcccccataaccatcctaagctccagcagctgtggctgaaagcacactatgttgaggccgaaaaattaagagggcggccgctcggggctgtgggaaaatatagagtgaggcgcaaattccccctgcctcgaaccatttgggacggcgaagaaacaagctactgttttaaggaaaagtcacgaggagtgctgcgagagtggtacgcacataacccataccccagccctcgcgaaaaacgggagcttgccgaagccactgggttgactactacccaggttagcaactggttcaaaaataggagacagagggacagggcagctgaggcaaaagaacgggagaatacagaaaataataatagtagcagcaacaaacagaatcaactgagtccactggaaggcggaaaaccactcatgagcagtagtgaagaggagtttagcccccctcaatcaccagaccaaaactccgtgctgttgctgcagggaaacatggggcatgctcgtagttccaactacagtctgcctggccttaccgcttcacagccctctcacggactccagactcaccaacaccagctccaggattctctgttgggcccactgacctcatctctcgttgatcttgggagctag

SEQ ID NO: 134471 - DNA, 876 bp, synthetic construct
  misc_feature 1..876: note = Description of Artificial Sequence: Synthetic coding sequence
  source 1..876: mol_type = other DNA
atgtccatgctgccgaccttcggatttacacaagagcaggtagcttgcgtatgcgaagtcttacagcagggcggtaatattgagaggctgggccgattcctgtggagcttgcctgcttgcgaacacctgcataaaaatgaaagtgtgctgaaggcgaaagcggtggtagcctttcaccggggcaacttccgggagctgtacaagattctggagagccaccagtttagcccacacaaccatgctaaacttcagcaactctggctgaaggcacattacatcgaggccgagaaattgcgcggcaggcctctaggcgcggtgggaaagtatcgcgtcaggaggaagtttccactaccacgcagtatctgggacggagaggaaactagttactgcttcaaggagaagtctcggagcgttctccgagaatggtacgcgcacaacccctacccgagcccacgggaaaagcgcgagctcgctgaggctaccggtctgactaccacgcaagtttcaaactggttcaagaaccggaggcagcgcgatcgcgcagcagaggcgaaggagagagagaacaacgagaactccaacagcaactctcacaacccgctgaacgggtccggcaaatctgtccttggttccagcgaagacgaaaagactccatccggaacacctgaccactcatcatcttctcctgcgctactgctatccccccctccaccaggtttaccaagtctacactccctgggacatccaccaggaccgagtgcagtacccgttccagtgcccggcggcggaggcgcagacccgctgcagcaccatcacggcctgcaggattcaatcttgaatcctatgagcgctaatctcgttgatctggggtcttag

SEQ ID NO: 134472 - DNA, 999 bp, synthetic construct
  misc_feature 1..999: note = Description of Artificial Sequence: Synthetic coding sequence
  source 1..999: mol_type = other DNA
atggtcttccggagtcctttggacctctattctagccatttcctgctgccaaatttcgcagactcacaccaccgatccatactcctggctagcagcggcggaggaaacggagctgggggtggcggcggcgcgggcggtggcagcggagggggaaatggggcgggaggtgggggcgctggtggcgcaggcggggggggtggcggcggctctagggctccacctgaggaactttctatgtttcaactccctaccctaaatttctctcccgagcaggtggcttcggtgtgcgagacgctggaagaaactggagacatcgagcggctgggacggttcttgtggagccttccagttgctccaggagcttgcgaggccatcaataaacacgaatctattttaagggctagagcggtggtggctttccacacaggtaactttagggacttataccatatcctggagaaccacaaatttaccaaggagtcccatggtaagctgcaagcaatgtggctggaagctcactatcaggaggccgagaagttgagaggccgccccttggggccagtagacaagtatagagtccggaagaagttccccctgcccaggaccatctgggacggagagcagaagactcactgtttcaaggagcggacacgttctctgcttcgggaatggtacctccaggacccttacccaaacccaagtaagaagcgcgagctagcccaagccactggcttaacccccactcaggtcggaaactggttcaagaatcggagacagagagatagggccgctgccgctaagaacaggcttcagcaccaggcaatcggcccatccggtatgagatccctcgccgagcccggttgcccaacacatggcagtgccgaatcaccctccaccgctgcttccccaacaacctccgtgtccagccttacagaaagggccgatactggcacctccatcctctccgtcactagttccgacagcgagtgcgacgtatag

SEQ ID NO: 134473 - DNA, 1020 bp, synthetic construct
  misc_feature 1..1020: note = Description of Artificial Sequence: Synthetic coding sequence
  source 1..1020: mol_type = other DNA
atgaactgggagttgttactttggctcctggtgctgtgtgccctcctgctgctgcttgtccaactgctgcgctttctgcgcgccgacggagacttaacactgctgtgggcagaatggcaaggccggcggcccgaatgggagcttacagacatggtggtttgggtcaccggcgccagcagtggcatcggagaggagcttgcgtatcagctgtccaagctgggggtttcactggtcctgtctgcaaggcgggtgcacgaactggaacgcgttaaacgccgctgcttggagaacggcaacctcaaggaaaaggatattctcgtactccccctcgatctgaccgatacggggagccatgaagcagctacaaaagcagttctgcaggaattcggccggatagacattttggtgaacaatggcgggatgagtcaacgttcactgtgcatggatacgtccctggacgtgtacaggaagttgatcgaactgaattacctgggaactgtgagcttgacaaagtgtgtcctcccccatatgattgagcgcaagcagggaaagattgtgacagtcaactctattcttggtattatctccgtgcccctgagcatcggctactgtgcttccaagcatgccctgaggggatttttcaatgggctccgtaccgaactggctacatatcccggaataattgtgtctaatatctgtccaggaccggtgcagtcaaacattgtagaaaatagtctcgctggcgaagtaacaaagaccattggcaataatggggaccagtctcataaaatgacgacatctaggtgtgtacgcctgatgttgatctctatggctaatgatctgaaggaagtgtggatatccgaacagccattcctgttggtcacatatctgtggcaatacatgcccacctgggcctggtggattaccaacaagatgggaaagaagcgaatcgagaacttcaagtctggagtggatgctgacagcagttatttcaagatttttaagaccaagcatgattag

SEQ ID NO: 134474 - DNA, 2220 bp, synthetic construct
  misc_feature 1..2220: note = Description of Artificial Sequence: Synthetic coding sequence
  source 1..2220: mol_type = other DNA
atggccacactgcctgccgagcctagtgcaggacctgcggctgggggcgaagccgtggcggccgcggccgctacggaggaggaggaggaggaggcgagacagcttctgcaaacattgcaggccgccgagggcgaagctgccgcagcagcgggtgcaggggccggagccgcagctgccggagctgaggggcctggcagcccaggtgtgccggggagcccccccgaggccgcctccgagccccccacgggcctccgtttcagccctgagcaggtcgcctgcgtatgcgaggcgctgctgcaggccggccacgccgggcggctgagccgcttcctcggcgccctgccgccagccgagagactacgaggtagtgacccagtgctgagggcccgggcattggtagccttccagcggggagagtacgctgaactgtaccgtttactcgaaagccgaccctttcccgctgcccaccacgcatttctgcaggatctctacctgagagccaggtaccacgaggctgaaagagccagaggaagagccctcggggctgttgataaatatcgccttaggaagaagttccctcttcccaaaaccatttgggatggcgaagaaactgtgtactgcttcaaggaacggtcccgggctgcgctcaaggcctgctatcgcggcaaccgctatccaaccccagacgagaagaggaggctcgccacgctcacaggactgtctctgacccaggtttcaaattggttcaagaaccgtagacagcgggaccgaacgggagccggcggcggtgctccttgcaaatcagagtctgacggtaacccaactacagaggacgaatcctcccgcagtcctgaagatctcgagagaggagctgcacccgtgtccgccgaggcagcagcccagggtagcattttcctcgctggcaccgggccccccgcaccttgcccagcctcatcttctatactggtcaacggatcttttctggctgcctcaggttcacctgctgtcctgcttaatggaggccctgtcataatcaatggattggcccttggagaggcgtccagtcttgggcctcttctgttaactgggggtggcggtgcgcccccaccacagccgtctcctcagggcgcttcagagaccaagacatccctggtgttggatcctcagacgggagaggtccgtctggaagaagctcagtctgaagcccccgagaccaagggagcacaagtagccgcccccggccccgcactgggtgaagaggtcctcggccccctggcacaggtggtgcccggaccccccacagccgccaccttccccctaccacccggcccggtgcccgctgtggctgccccgcaggttgttcccttgtcacccccccccgggtaccctacaggcttgagtcccactagtccgctgttgaatctcccccaggtggtgcctacctcgcaggtcgtcactctgccccaggctgtcggcccgttgcagctgttagccgcgggacctggcagtccggttaaagtggcggccgccgccgggcctgccaatgtccacttaattaactccggagtgggcgtaactgcccttcagctgccttcagcaactgcaccgggtaactttttattggctaatccggtaagcggatctcccattgtaacaggtgtagcactgcaacagggaaaaattatcctgacagcaacttttcccactagtatgctggttagccaggtgctgccccccgctccaggccttgccctccccctgaagcccgaaactgcgatcagcgttcccgaaggagggctcccagtggcaccctcacctgccctccctgaggctcacgcgctggggacgctgtccgcccagcagcctccccctgcagcagccaccacttctagtacgtcactgcccttcagcccagatagccctgggctcctcccaaattttcccgcaccccctccagagggcctcatgttatcccccgctgctgtgcctgtgtggtcagcaggcctcgagctcagtgcgggaacagagggactgctggaagctgagaaggggctgggtacacaggccccgcatacagtgcttagattgcctgatcccgacccagaaggcctattgctcggcgccactgcaggcggtgaggtggatgaaggcctggaggccgaggccaaggtgcttacccagctgcagtcggtacccgtcgaggagcccttggagctatag

SEQ ID NO: 134475 - DNA, 741 bp, synthetic construct
  misc_feature 1..741: note = Description of Artificial Sequence: Synthetic coding sequence
  source 1..741: mol_type = other DNA
atgtttcaactacccatcctaaattttagtcctcagcaggtagccggcgtttgcgagacactggaggaatcaggcgatgttgaacggctgggcaggttcctctggtcccttccagtcgcccctgctgcttgcgaagctctgaacaaaaacgagtctgtcctgagagcccgagcgatcgtggccttccatggggggaactaccgcgaactgtaccatatactagagaatcacaaatttactaaggagtcacacgctaagctacaggctctttggctagaagcacactatcaggaggccgaaaagttaagaggacgcccactaggtcctgttgataaatatcgagttcggaagaagttccccctgccaaggactatctgggatggggagcaaaaaacacactgtttcaaggaaaggactcgccacttgctgagggagtggtacctccaggatccctacccgaatccaagcaagaagcgagaattggctcaagccacgggcctgacgcccacccaggtgggaaattggtttaaaaatcgccggcagcgcgaccgcgccgctgcggccaagaaccggctccagcaacaggtcctctcacagggcagcggtagagctctcagggctgagggagacggaactcctgaagtgctgggagtggcaacaagccctgccgccagcttatcaagcaaggccgctacttctgcgataagcatcactagctcagattcagaatgcgatatctag

SEQ ID NO: 134476 - DNA, 360 bp, synthetic construct
  misc_feature 1..360: note = Description of Artificial Sequence: Synthetic coding sequence
  source 1..360: mol_type = other DNA
atgacccaacagggagccgctctgcagaattacaacaacgaactggtcaagtgtatcgaggagctgtgtcagaaaagagaggagctttgtcggcagatacaggaggaggaggatgagaagcaaaggcttcaaaatgaggtgcggcaactgactgaaaaactggcccgagtgaacgagaatctcgcccgcaagatcgcgtctcggaatgagttcgatcggaccatcgccgagactgaggccgcctatttgaagatcttggaatcgtctcagacactcctcagcgttctcaagcgggaagctgggaatctgacaaaagcgaccgctccagatcagaagagctcaggtggccgtgatagttag

SEQ ID NO: 134477 - DNA, 666 bp, synthetic construct
  misc_feature 1..666: note = Description of Artificial Sequence: Synthetic coding sequence
  source 1..666: mol_type = other DNA
atgctctggctgtttcagtcccttctgtttgtgttttgtttcggaccaggccagcttcgcaatatacaggtcaccaaccactcacagctgtttcagaacatgacatgcgagctgcatttgacatgcagcgttgaggatgccgacgacaacgtctcgttccgttgggaggccctgggtaacacgctgagctctcagcccaacctaactgtttcctgggatcctaggatatcctccgagcaggactacacctgcatcgccgaaaacgctgtctctaatctctctttcagcgtgtctgcccagaagctctgtgaggacgtgaagatccagtacacagacaccaagatgatcctttttatggtgagtgggatctgcatagtcttcgggttcattatcctgctcctgctcgtgctgcggaagagacgcgattcactatcactgagtacccagcgtacgcaggggcccgcagagtccgccagaaacctcgaatatgtcagcgtctcaccgacaaacaacacagtatatgccagcgtgacgcatagcaacagagagacagagatctggacgccccgagagaacgataccattactatttacagcaccatcaatcacagcaaagagtcgaagcccacgttctctagagccacagccctggacaacgtggtctag

SEQ ID NO: 134478 - DNA, 999 bp, synthetic construct
  misc_feature 1..999: note = Description of Artificial Sequence: Synthetic coding sequence
  source 1..999: mol_type = other DNA
atgctttggctgtttcaatccttgctgttcgttttttgtttcgggcccgggaacgtggtgagtcagtcctcactgacccccctgatggtcaatggaatccttggcgagtccgtgacacttccgctcgaattcccagcaggcgagaaggtgaactttatcacatggctgtttaatgaaacaagcttagcattcatagttccccacgagacaaagagcccggagattcacgtgactaacccaaaacaggggaaacggctgaatttcacccaatcctatagtctacaactgtcgaacctgaagatggaggatactggcagttacagggctcagatttccaccaaaacgagtgccaaactgtctagttacaccctgcgcattctcagacagctgcgtaatattcaagtgaccaaccattcccagttgtttcaaaatatgacttgcgaacttcatttgacttgtagcgtcgaggatgctgatgacaatgtttccttcaggtgggaggcactcggcaatacattgtctagccaacctaacctgactgtgtcttgggatccacggatctcgtcggagcaggactacacttgcattgcagaaaatgctgtttcaaatctgtcatttagcgtatccgcccagaaactgtgtgaagacgtcaagatccaatatactgatacaaagatgatcctgttcatggtctcaggcatctgtatagtcttcgggtttatcatccttctgctgctggtgctgcggaagcgaagagactcattgagcctgtcgacacagcgcactcagggaccggccgagtccgcgcgtaatcttgaatatgttagcgtttcccctaccaataacactgtgtacgcatcagtgacgcatagtaatcgggaaacggaaatctggaccccaagagagaacgatactattacaatctattcaacaatcaaccattccaaagagagtaagcccacattttcacgcgctacagcgcttgataacgttgtgtag

SEQ ID NO: 134479 - DNA, 996 bp, synthetic construct
  misc_feature 1..996: note = Description of Artificial Sequence: Synthetic coding sequence
  source 1..996: mol_type = other DNA
atgctctggctatttcagtctttgctttttgtcttttgcttcgggcctgggaatgttgtgtcccaatcgtcccttacccccttgatggtgaacgggatcctcggtgagtccgttaccctgcctctggaattccctgctggagaaaaggtaaatttcattacttggttgtttaatgagaccagcctcgcttttatcgtgccacacgagactaaatctccagaaatacatgtgactaatcccaaacaggggaagagattaaactttacacagagctactctctacagctatccaacttaaagatggaggacaccggcagctatagggcccagatctccacaaagacctctgccaagctgtcatcctacactttgaggattctgagacagttgagaaacatccaggtgacaaaccattcccagctgtttcaaaacatgacctgtgagctgcatctcacttgctccgtggaagacgcagatgataatgtcagtttcagatgggaagccctggggaacacattgtccagccaacccaatctcactgtgagctgggacccacggatctcctccgagcaggactatacatgtatcgcagagaacgctgtgtcgaaccttagcttctcagtaagtgcgcagaaactttgtgaggacgtcaagattcagtataccgacaccaaaatgatcctctttatggtatcaggtatctgtattgtgttcggcttcattatcctgctgctcctggtgctgagaaaacgaagagattcgttatcgctgtccacccagagaacccagggaccggaaagtgcacggaacctggaatatgtgagcgtgtccccaaccaataacaccgtctacgccagtgtcacacatagcaatcgagaaacagagatttggacaccccgcgagaacgatacgatcactatttactctacaatcaaccatagtaaagagagcaagcctacgttctctcgcgccacagcgctcgataacgtagtttag

SEQ ID NO: 134480 - DNA, 891 bp, synthetic construct
  misc_feature 1..891: note = Description of Artificial Sequence: Synthetic coding sequence
  source 1..891: mol_type = other DNA
atggcagggtcacccacttgcctgacgcttatctatattctttggcagctcacggggtctgccgccagcggccctgtcaaggagctcgtcgggtctgtgggtggggcagtaactttccccctgaagtctaaagtcaaacaggttgacagcattgtgtggacattcaacactaccccgctggtcacaatccagccagagggcggtacgatcatagttacacagaaccggaatcgagaacgagtggactttccggacggaggctactctctgaagttgtcaaaacttaaaaagaacgactccgggatctattacgtaggcatctattcatcatccctccagcaaccctcgacccaggagtatgtcctccatgtgtacgaacacctcagtaaacccaaagtaactatgggactccagagcaacaagaacggaacctgtgtgacgaacctgacctgttgcatggagcacggggaagaagatgtaatctacacttggaaagcgctgggacaggcggccaacgaaagtcataacgggagcatcctgccgattagctggcgctggggcgagagcgacatgactttcatttgtgtcgccagaaaccccgtgtctagaaatttttcgtcccctatcctagcaaggaagctgtgtgaaggagcagccgacgatcctgactcatcaatggtgcttctgtgtctacttttggtcccattattgttatcactcttcgtcctcgggttattcctgtggtttctgaagcgcgaacgccaagaggaaaacaatcccaaaggacgatcgagcaagtacggattacttcattgtggcaacaccgagaaggacggtaagtcacccctcacagctcacgacgcccggcacacaaaagctatctgcctctag

SEQ ID NO: 134481 - DNA, 687 bp, synthetic construct
  misc_feature 1..687: note = Description of Artificial Sequence: Synthetic coding sequence
  source 1..687: mol_type = other DNA
atggcagggtcccccacatgtctgacgctcatctacatcctgtggcagctcacagaacatttatccaaacctaaagtgaccatgggccttcaaagcaacaaaaatggaacgtgtgtgaccaatctaacatgttgcatggaacacggggaagaggacgtgatatacacctggaaagcacttggccaggctgccaacgaatcccacaacggttcaattctccccatttcttggcgctggggggagtcagacatgacgtttatctgcgtggcccgcaacccagtcagtcggaacttttcaagccccatactcgctaggaaactctgtgagggggcggccgacgacccagacagctccatggttctgttgtgtttactgctggtgccattacttctctctctttttgtgctcgggctgtttctctggtttctgaagcgcgagaggcaagaggagtatattgaggaaaagaaacgcgtagacatctgtcgggaaacgcctaatatctgtccacattctggtgaaaacaccgaatacgatacaatccctcatactaatcgtactatcctgaaggaagatccagccaacactgtgtacagcacagtagagatccccaaaaaaatggaaaacccccattccttgctgacaatgcccgatacgcctcgcttgttcgcctacgagaacgtgatttag

SEQ ID NO: 134482 - DNA, 1008 bp, synthetic construct
  misc_feature 1..1008: note = Description of Artificial Sequence: Synthetic coding sequence
  source 1..1008: mol_type = other DNA
atggccggtagcccaacttgtctcacactcatttatatcctttggcagttgaccggatccgccgcttcgggccctgtcaaggagctggtcgggtcagtcggaggagccgtcacatttccccttaaaagcaaggttaagcaagtggactccattgtatggacatttaatacgacaccactggtgaccatccagcctgagggtggtacaattatcgtgactcagaatcgcaatcgagagcgagtcgattttccggacgggggctatagcttaaagctctccaaactcaaaaagaatgatagtggaatctattatgtgggcatatactcctcgtccctgcagcaaccctccacacaggagtacgtcttacacgtatatgagcacttgtctaagccgaaggtaacaatgggccttcaatcaaataaaaatggcacttgtgtgacaaaccttacctgttgcatggagcatggcgaagaagacgtgatctacacttggaaggctctcgggcaggccgcaaatgagagtcacaacggctctatactgcccatctcctggagatggggcgagagtgacatgacctttatatgtgtagccagaaatcccgtgagtcgcaatttctcttcccccattcttgctaggaagctgtgcgagggcgcggcggacgacccagattcgagcatggtcctcctatgcctcttgttagtgccactgctcttatcactgttcgtactcggcttgtttctctggttccttaagcgcgaacggcaagaagagtacatcgaagagaagaagagggtggacatctgccgcgaaacccctaatatctgccctcactcaggtgagaacacagaatatgacactattccacacacaaaccggactatcctgaaagaagacccagccaataccgtgtatagtaccgtggaaatacccaaaaaaatggaaaacccacatagcctactgaccatgccagacacacctcggctcttcgcttacgagaacgtgatctag

SEQ ID NO: 134483 - DNA, 615 bp, synthetic construct
  misc_feature 1..615: note = Description of Artificial Sequence: Synthetic coding sequence
  source 1..615: mol_type = other DNA
atggcaggttctcccacttgtctgactcttatctatatcttgtggcagcttaccgggtcggctgcttccggaccggttaaggaactcgtcggatctgtgggcggggccgtgacatttccacttaagagcaaagttaagcaggttgactccatagtctggacattcaacacaactcctctggtgacaattcagccagagggtggcacaatcatcgttacccaaaatcgaaatcgagagcgcgttgatttccctgacggaggttatagtctgaagctatccaagctgaagaaaaacgactccggaatttattacgttgggatttactccagctcccttcagcagccaagtacccaggagtacgtcctgcatgtctatgagtacattgaggagaaaaaacgcgtcgacatctgccgagagactccaaacatctgcccacatagcggagaaaacactgagtatgacactattccacacaccaaccgaacaattctcaaagaagatcccgccaatactgtgtattcaaccgttgagattcccaagaaaatggagaatcctcacagtttactgaccatgcctgatactccaagactgttcgcgtacgagaatgtgatctag

SEQ ID NO: 134484 - DNA, 498 bp, synthetic construct
  misc_feature 1..498: note = Description of Artificial Sequence: Synthetic coding sequence
  source 1..498: mol_type = other DNA
atggcagggtcccctacctgcctgacgctcatttacatcctgtggcagttgaccgggtctgccgccagtgggcctgtgaaagaactggtgggctccgtggggggggctgtgacgtttcctcttaagagcaaagtgaagcaggtggatagcatagtgtggacattcaacacaacccctctcgtcactattcagccagagggcgggactatcatcgtgactcagaaccggaacagggagcgggtagactttccagatgggggctatagtctaaagctctctaaacttaagaaaaacgattccgggatttattatgtgggaatttatagctcttccttacagcagccctcaacacaagaatatgtccttcacgtctacgaaaataatcctaaggggcggtctagtaaatacggcctcctccactgcgggaatacagaaaaagatggtaaatcccctttaactgctcatgacgctaggcataccaaggccatctgcctatag

SEQ ID NO: 134485 - DNA, 450 bp, synthetic construct
  misc_feature 1..450: note = Description of Artificial Sequence: Synthetic coding sequence
  source 1..450: mol_type = other DNA
atggcgggttctcctacttgtctcaccctgatttacatcctgtggcagttgacagaacatctgagtaaaccaaaagtcacaatgggattacagtcgaataaaaatggcacatgcgtcaccaatcttacttgttgtatggagcatggcgaggaagacgtcatctacacttggaaggctctgggccaagcggctaacgagagtcataatgggtccatcctccccatatcctggcgctggggagaatctgatatgacctttatctgcgtggccagaaacccagtctccagaaacttttccagccccattttggcacggaaattatgcgaagagaataatcctaagggaaggtcaagtaaatacgggctgttgcactgcggaaacacagagaaagacggcaagtccccactgacggcccacgacgccaggcacactaaagccatctgtctctag

SEQ ID NO: 134486 - DNA, 567 bp, synthetic construct
  misc_feature 1..567: note = Description of Artificial Sequence: Synthetic coding sequence
  source 1..567: mol_type = other DNA
atggctggatctccaacctgtctgacactgatctatattctgtggcagcttactgagcatttgtccaaacccaaagtcaccatgggtctacagtctaacaaaaatggcacttgcgtgaccaatctgacctgctgcatggagcacggtgaggaagatgtaatatacacatggaaggcactaggccaggcggctaacgagagccataatggctctatcctgcccatttcgtggagatggggcgaatcagacatgacgttcatatgtgtggccaggaaccccgtgagtaggaacttctccagtcccatcctagctagaaagctctgcgaggagtacatcgaggagaagaagagggtcgatatttgccgggagactcccaacatctgcccccactccggagagaatacagagtatgacactattccgcatacaaatcggaccatcttgaaggaagaccccgcaaatactgtatacagtaccgttgagatccccaagaaaatggaaaatccccactctttactgacaatgcctgataccccccgactgtttgcctatgagaatgtcatctag

SEQ ID NO: 134487 - DNA, 858 bp, synthetic construct
  misc_feature 1..858: note = Description of Artificial Sequence: Synthetic coding sequence
  source 1..858: mol_type = other DNA
atggtgatgcggcccctgtggagcctcttgttgtgggaagccctcctgccaattactgtgacgggggcccaggtgctgagtaaggtcggtggctctgttctcctcgtagctgcccgccctccaggatttcaggtgagagaggcaatttggcgctcactgtggcctagcgaggagctgctggctacttttttcagaggcagtctggagactttataccattctcgctttctgggccgtgcgcagctccacagcaacctgtcactggagttgggaccactagagtccggagactccggcaacttctcagttttgatggttgacacccgggggcagccctggactcagactttgcagcttaaggtgtatgatgctgtgccacgccctgtggttcaagtctttattgcagtcgaaagagacgcacaaccctccaagacctgtcaggtattcctgagttgctgggcccccaatattagcgaaattacctattcctggcgccgggagaccaccatggatttcggaatggaacctcacagcctgtttactgacgggcaggtgctgagcatttccctgggacccggggaccgcgacgtggcctattcatgcatagtgagcaaccccgtctcatgggatcttgccactgtcacaccatgggactcctgtcaccatgaagcggccccgggaaaggccagctataaagacgtgcttctcgtggtagtgcccgtgtcgctcctgcttatgttggtgacactcttctccgcatggcattggtgcccttgttctggaaaaaaaaagaaggacgtccatgctgatcgagtcggaccggagactgagaaccccctggtgcaggacctaccatag

SEQ ID NO: 134488 - DNA, 531 bp, synthetic construct
  misc_feature 1..531: note = Description of Artificial Sequence: Synthetic coding sequence
  source 1..531: mol_type = other DNA
atggtcatgagacctctttggtcactgctgctgtgggaagacgctgttcctcgcccagtagtccaggtatttattgcagtcgagcgggacgcacagccctccaagacctgccaagttttcctctcttgttgggcccctaatatctctgagatcacgtattcatggcgccgtgagacaacaatggacttcggtatggaaccccactctttatttacagatggtcaagtgctgagcattagcttaggtcccggcgacagggatgtcgcctactcttgcatagtttctaatcctgtttcctgggatctggcaactgttaccccttgggatagttgccaccacgaagcagccccgggcaaagcctcttacaaagatgtcttattggtggtcgtgcctgtgtctctgctgctgatgttggtgaccctcttcagcgcttggcactggtgcccctgttccggtaaaaagaagaaggatgtgcacgcagatcgcgtgggccctgagacggagaacccgctcgtgcaggatctaccatag

SEQ ID NO: 134489 - DNA, 444 bp, synthetic construct
  misc_feature 1..444: note = Description of Artificial Sequence: Synthetic coding sequence
  source 1..444: mol_type = other DNA
atgggaggacgccatcatctccaaagacaagtgagtgagtcaatgtcggccctctttcaggcggtgcgactcgagtcagcctgggcagatcgagtgcgatacatggtcgtagtgtacagcagtggcagacaggatacggaggagaatattctattaggggtggatttctccagcaaagaaagcggtttctccgtgtcaactgctggccgtatgcacatttttaaaccggtctccgtgcaagccatgtggtctgcgctgcaggtgctgcacaaagcgtgtgaggtggcacgccggcacaattactttcccggcggcgttgcgctgatatgggctacttactacgagagttgcatcagcagtgagcaatcatgcatcaacgagtggaacgctatgcaggatctagagagcactcggcctgactcaccagccctctttgtagattag

SEQ ID NO: 134490 - DNA, 2112 bp, synthetic construct
  misc_feature 1..2112: note = Description of Artificial Sequence: Synthetic coding sequence
  source 1..2112: mol_type = other DNA
atggctcgcgctcgtcgggccgtggttggtagcgtcagagacgtgtccacagccgccaccaatttattctactttacagacttttgcattttcctgcaacccacacattgtttctgttgccctgaggtgtccagctctaattaccttagtgaatctttcttcatggtgaaaggcgcggccctgtttcttcagcagggtagttcacctcaggggcagcgctctctccagcatccacataagcacgcaggcgatctccctcagcacttgcaggtcatgattaacctgctgcggtgcgaggaccggatcaagcttgcagtgagattagagtcagcgtgggccgatagagttagatacatggtggtggtctattcaagtggaagacaggatactgaggaaaacatccttctgggagtggacttcagctccaaagaatccaaaagctgcacaattggtatggtgcttaggctgtggtccgataccaaaattcacttagacggcgatggcggcttttccgtgtcaacagctggacgaatgcatatatttaaaccggtatcagttcaagccatgtggtcagctctacaggtgctccataaggcgtgtgaagttgccaggaggcataactacttccccggcggggtagccctaatttgggccacttactacgagtcctgcatctcgtccgagcagtcgtgtataaacgagtggaacgccatgcaagacctcgaatcaacaagacccgattcacctgcactgtttgttgacaagcctactgaaggagaacgaaccgagcgactcatcaaagctaagttgcgttcaatcatgatgtctcaggatctggagaacgtgaccagcaaagaaatccggaatgagctcgagaagcagatgaactgcaatctgaaagagctcaaagagttcatcgataacgaaatgctcctgattttggggcagatggacaaacctagcttaatctttgaccatctgtacctggggtctgagtggaacgcctctaacctagaagagctgcagggcagtggggtggactatattcttaatgttaccagggagatagataactttttccctgggctcttcgcctatcacaacattagagtctatgatgaggagaccactgatctgctcgcacattggaatgaagcctaccatttcattaacaaagccaagcggaatcacagtaaatgcctggttcactgcaagatgggcgtgagcagaagcgcatccaccgtaatcgcctacgccatgaaggaatttggctggcccctagagaaagcgtacaactacgtaaaacaaaagcgatctattactcggcctaacgcaggattcatgagacaactgtctgaatacgaaggcatactggatgcctccaagcagaggcataacaaactttggcgtcagcagactgacagctctttgcagcagccagtcgacgaccctgctgggcccggcgatttcctgcccgaaacgcccgatgggactcctgagtcccagctaccctttctggatgatgctgctcagccagggctaggacctcccctgccttgctgtttccggcgcctcagcgacccactgctccctagcccagaagacgaaacagggagcctggtgcaccttgaggacccagagcgtgaggccctcctggaggaggccgcaccacccgctgaagtccaccggccagcacgccagccccagcaggggagcggcctctgtgagaaagatgtcaaaaaaaaactagaattcggctccccaaaggggcgcagtggctcattgctgcaagtagaagaaactgagagggaggaagggctcggagcaggtaggtggggacagctgcccactcagctcgatcaaaaccttctcaactccgagaatctcaacaataacagcaagcgttcttgtccgaatggcatggaggtgggaagggctagacctgctggctggcacactccgagtctcccgtctcacagtaactggcccaccagtgcttccgtagtcggtactactggcacccggcaccacactcagctgatattcttctattgtctactctgggccccgtcaagccatcttcagggccctgaggggtccttcaccggctag

SEQ ID NO: 134491 - DNA, 3150 bp, synthetic construct
  misc_feature 1..3150: note = Description of Artificial Sequence: Synthetic coding sequence
  source 1..3150: mol_type = other DNA
atggcgttggtgactttgcagcggtctcctactccctcggcagcatcgagctcagcatccaactctgagcttgaagccggctcagaagaggacagaaaactaaatcttagcctgagtgaaagtttcttcatggtgaagggggccgccctattcctgcagcagggaagttcgccccagggccagagaagcctgcagcatccgcacaagcacgccggtgacctgccacagcacctgcaggttatgattaacctactgcgttgcgaagaccgcatcaagctggcggtccggttagagtctgcctgggcagatagggtaagatacatggttgtcgtgtacagcagcgggcgccaggatactgaagagaatatcctgttgggggtcgacttttccagtaaggagagtaaaagttgtactatagggatggtgctccggctgtggtccgacacaaagatacacctcgacggcgatggtggcttctcagtctctacggccggccggatgcatatttttaaacctgtttctgtccaggccatgtggtccgcactgcaggtactgcataaagcttgcgaagtcgcgagacgccataattatttccctggaggtgtggcactgatctgggccacctattacgaaagttgcatttcttccgagcagtcctgtattaacgagtggaacgctatgcaggatctggagtccacacgccccgactctcccgccttgttcgtggataagccaaccgagggagagagaactgaaagactgattaaggccaaacttagatctatcatgatgtcccaggaccttgaaaacgtgactagcaaggagatcagaaacgagctggagaaacaaatgaattgcaacctgaaggagctgaaagagttcattgataatgagatgctcctaatcctcggccaaatggacaagccttcccttatcttcgaccatctctatcttgggtcagaatggaatgcctctaacctggaggaactgcagggcagtggcgtcgattatatcctcaatgttacaagagaaatagataactttttcccggggcttttcgcttatcataatatccgagtgtacgacgaggagacaaccgatctcctggctcactggaacgaggcctaccactttatcaataaagctaagaggaaccacagcaaatgcctcgtgcattgcaagatgggcgttagtcgatctgccagtaccgtgattgcgtacgcaatgaaggagtttggctggcctctcgagaaggcctacaactacgtgaagcagaagagatccatcaccagacccaacgccggcttcatgcggcagctgtccgagtacgagggcatcttggatgccagtaagcagaggcacaacaagctgtggcggcagcagacagactcttcactgcagcagcccgtcgatgatccggctggccccggcgactttttacccgagactcccgacggcactcctgaatcacaactgcccttcctggacgatgctgcacagccaggtcttggccctccgctgccatgctgcttccggagactttccgatccattgctaccatccccggaagacgaaaccggaagcctagtgcacctggaagatcctgagcgtgaggcccttctcgaagaggccgcaccccccgcagaggtccacaggcctgcacggcagccccagcagggtagtggactgtgtgagaaggacgtgaaaaagaaactcgagttcggctctcccaaagggaggagcggcagcctcctccaggttgaggagaccgagcgtgaggagggattgggtgccggcaggtggggtcaactgccaactcagcttgatcagaacctcctgaatagcgaaaatttaaataacaatagcaaacgttcatgtcccaatggcatggaagacgatgccattttcggaattcttaacaaggtgaagccctcttacaagtcttgtgccgactgtatgtatcctacggcctccggcgcacctgaagcatctcgggaaaggtgtgaagacccaaacgcgcccgcgatttgcacgcagcctgccttcctgcctcatatcacctcttccccagtggcacacctcgctagccgctcaagagtgccggagaagccagccagtggcccgacagaacctcccccattcctgcctcctgcaggatcccgccgggcggacacaagcggccctggcgccggcgccgccttggagcctccggcatcactgttagaaccctctcgggagactccaaaggttctcccaaagtctctgctgttaaaaaattcccattgcgataaaaatccaccttctacggaggtcgtgattaaagaagaaagttccccaaagaaggatatgaaacccgccaaggatctacgcctgctattctctaacgagtccgagaaacctaccactaactcctacctgatgcaacatcaggagagcataattcaactccagaaggcaggcttagttaggaagcacacaaaagaattagagaggcttaagagtgtcccagccgatccggcaccgcccagcagagatggtccagcttcaagacttgaggcctcaattccagaagagtcgcaggatccggccgcacttcatgaactagggcctctggtcatgccgtctcaggctggctctgatgaaaaatcggaagctgcccctgcctctcttgagggtggcagtcttaagagccctccacctttcttctatcgtctggaccatacgagttcctttagtaaggatttcctaaagacaatctgctatacgcccacgtcttccagtatgtcttccaatctgactcgtagcagcagctccgatagcatacacagcgtgcggggcaaaccgggcctagtcaaacaacgcacccaggaaattgaaacccgactgcgtctcgcaggcctgacagttagttcccctttgaagcggtctcattcgctggccaagttgggatccctgactttttccactgaagatttgtcttctgaggccgatcccagcaccgtggccgattctcaggacaccacattgagtgagagcagcttccttcatgaaccacagggtacccccagggatcccgcggccacatccaagccatctggtaagcccgcccctgagaacctgaagtccccgagttggatgtctaaaagctag

SEQ ID NO: 134492 - DNA, 2214 bp, synthetic construct
  misc_feature 1..2214: note = Description of Artificial Sequence: Synthetic coding sequence
  source 1..2214: mol_type = other DNA
atgcggtgttacctttcatgggatcgctggacctccccaccactatctagtattatctttatcagcgtggactacatactgaacgtcaccagagaaatcgacaacttttttcctggcctctttgcgtaccataatattagggtgtatgacgaggaaactactgacctgcttgcacactggaacgaggcctatcactttattaataaagcaaaaagaaatcactccaaatgtctggtgcattgtaagatgggcgtcagccgaagtgccagcaccgtgatcgcctacgctatgaaagaatttgggtggccgctggagaaggcttataattatgtcaaacaaaagcggtccattacgaggccaaatgctggctttatgcgtcagctgtccgaatatgaaggcatcttggatgcaagtaagcagaggcacaataagctgtggcggcagcagaccgattcgtctctgcaacaacccgtggatgaccccgcagggcccggggacttcctcccggagaccccggacggcacgcctgagtcacagctgcctttcctagacgatgcagcccagcccggattgggccctcctctgccctgttgttttagaagactctccgacccacttcttccctcgccagaggacgagaccgggtcgctggtgcacctggaggacccagaacgggaagcgttattggaggaagcagccccaccggctgaggtgcatcgacctgcgagacagccgcaacagggttcagggctttgcgagaaagatgtgaaaaaaaaactggagttcgggagcccgaaaggaaggagtgggagcttgttgcaggtcgaggagacagaacgggaggagggcctgggcgccggacgatggggccaactcccaacacagctggaccagaatttgttaaattcggaaaacttaaacaacaattctaaacgaagttgtcctaatgggatggaagatgacgccatttttggcattctgaataaagttaaacccagttacaaatcttgtgccgactgtatgtatcctactgcaagcggggccccagaggccagccgggaacggtgcgaggaccccaacgccccggctatctgcacccaacctgccttcctccctcatattacgtcgagtcccgttgctcacttggccagcaggagccgcgtcccagagaagcccgcctccgggccaactgagcccccaccctttcttccaccagccgggagccggagagctgatacaagcggacctggcgctggcgccgcattggaaccaccagcttctctgctcgaaccatcaagagaaacacctaaagtgttgcccaagtcattgctgctcaaaaacagccactgtgataagaacccccccagcacagaagtggtcataaaagaggagtcatcccctaagaaggacatgaagccagccaaggacctcaggctgctcttttccaatgagagcgagaaaccaactaccaactcctacctgatgcagcatcaagagagtataattcagcttcagaaagcaggtctggtgaggaagcacaccaaggagttggagcgtctcaagtccgtccctgcagaccccgccccaccttccagggacggccctgcgtcgcgcctggaagcttctatcccagaggagtcccaggatcctgcggctttgcatgaactgggccctctggtgatgcctagtcaggccggctcggacgagaagtccgaagctgcacctgcatctctcgagggcgggtcacttaaaagccccccaccattcttctaccgcctggaccacacatcaagcttttctaaggatttcttgaaaaccatatgctacacccccacgagtagctcaatgtcctcaaatcttacacgctcctccagcagtgatagcatacattctgtgcgtggcaaacctggactagttaagcaacggacccaggagattgaaacgaggttgaggctggcagggctgactgtatcatcaccgctcaaacgcagccattccctggccaagctgggaagcctgacattttccacggaggatctcagcagtgaggccgatcccagtaccgtcgctgatagccaggacactacactgtccgaatcatctttcctgcatgaaccccaggggacgccacgggaccctgcagctacatcaaaaccctctgggaaacctgctcccgaaaacttgaaatcaccttcctggatgtctaagagctag

SEQ ID NO: 134493 - DNA, 2079 bp, synthetic construct
  misc_feature 1..2079: note = Description of Artificial Sequence: Synthetic coding sequence
  source 1..2079: mol_type = other DNA
atggctttagttactctgcagcgctcgcccacgccgtctgcagcttcgtccagcgcatccaacagcgagctggaggccggcagtgaggaagatcgtaaattaaatcttagcttgtcagaatccttttttatggtcaaaggagccgctcttttccttcagcagggatccagtcctcagggacagagatccctgcagcatcctcacaaacacgcaggcgatctgccgcagcacctacaggtgatgatcaatcttttacgatgcgaggatcggatcaagctggccgttagactcgaatcagcttgggccgatcgcgtaagatacatggtggtggtgtactccagtggcagacaggatactgaggagaatattcttctcggtgtggatttttcgtcgaaggagtctaaatcctgtaccattggcatggtgcttcggctgtggtctgacacaaaaattcacctggatggtgacggcggatttagcgtgagcacagctggcaggatgcatatctttaaacctgtgtctgtacaggcaatgtggagcgccttacaggtgctgcacaaggcctgcgaggtcgctaggcgacacaactattttcctggtggagtagccctgatctgggccacctactatgagtcatgcatcagcagcgaacagtcatgtatcaacgagtggaatgcgatgcaggacttggagtcaacccggccggattcgcccgcgctattcgtggataaacccaccgagggggagcgcaccgagagacttatcaaagctaagctccggtcaattatgatgagccaagatctcgaaaatgtaacgtcaaaggagatacgcaacgagctcgaaaagcaaatgaactgcaatttgaaggagctcaaagaatttatagataacgaaatgctactgatcctcggtcagatggacaaacccagcctgatctttgaccatctttatctcggatcagagtggaatgccagcaatttggaggagttgcagggctccggggtggattacattcttaatgtgacccgcgaaatcgacaactttttcccaggactgttcgcctatcacaatatccgggtgtatgacgaagaaactacagatctcctggcacattggaacgaagcctaccacttcattaacaaagctaaaaggaatcactccaagtgcctagtgcattgtaaaatgggcgtgtcccggtccgcttccacggttatcgcttatgccatgaaggaatttggctggccgctggagaaggcgtacaattacgtaaaacagaaacgtagcatcactagaccaaatgctggcttcatgaggcagctgtctgaatatgagggcatcctggacgcctctaagcagagacacaataaactgtggcgccagcaaactgattccagcctgcagcagcctgtggatgacccggccgggcctggtgactttctgcccgagacccccgacgggacccctgagtcccagctcccctttctcgatgatgccgcccagcctggtcttggtcccccactgccatgctgctttaggagactgagtgatccgctattgcccagtcccgaggatgagacagggagtctcgtgcatctagaggaccctgagagagaagctcttctggaagaagcggctcctcccgcagaggtccaccgtccagcgaggcagccccagcagggatcaggcctttgcgagaaggatgttaagaagaagctcgagtttggctctcccaaagggcgatcaggaagtctgctgcaggtagaggagacggaacgggaagagggactgggtgctggacgctggggacaactacccacccagctcgaccaaaatctgctgaactccgagaacctcaataacaactctaagcggtcctgccccaatggcatggaggttggcagagcccgaccggccggatggcacacccctagcctcccatcgcattccaattggccaacttccgcttcagtggtcgggacaaccggcaccaggcaccatacccagctgatctttttctactgcctcctgtgggccccctcctcccaccttcaaggacctgaggggagtttcaccggttag

SEQ ID NO: 134494 - DNA, 4272 bp, synthetic construct
  misc_feature 1..4272: note = Description of Artificial Sequence: Synthetic coding sequence
  source 1..4272: mol_type = other DNA
atggctttagttaccgtacagagatcccccacaccttctactaccagttccccatgtgcgtctgaagccgactccggcgaggaagagtgcaggtcacagccacgaagcatttctgagtctttcctgacagtgaagggtgccgcactgttcctgcccaggggcaacggctctagtactcccagaataagtcaccgacgcaataagcacgccggtgacctgcagcaacatttacaagcaatgttcattttgctgagacctgaagataatattagactggccgtgcggcttgagagtacctaccaaaacagaaccagatacatggtcgtagtcagcaccaacggaagacaggataccgaggagagcattgtgctcgggatggacttttcttcaaatgatagtagtacatgcacgatggggctcgtactccccttatggtctgatactctcattcatctggatggagacggcggcttctctgtgtccacagataatcgcgtacatattttcaaacctgtctccgtgcaggctatgtggagtgccctgcagtcgctgcataaggcttgcgaggtggcacgagcccataattattatcctggctctctgttcctaacatgggtgagttattacgagagccacattaactctgaccagagctctgtgaacgagtggaacgcaatgcaagacgtgcagagtcaccgacccgatagccctgcccttttcactgatatccccacagagcgcgaacgaacggaaaggcttattaagacaaagcttagggaaatcatgatgcagaaagatcttgagaacataacttcaaaggagataaggaccgaactggaaatgcaaatggtttgcaatctgagggaatttaaggaatttattgacaatgagatgatagtaatactgggtcagatggacagcccgactcagatctttgaacacgtgttcttggggtcggagtggaacgcctcaaacctggaggacctccagaacagaggcgtgcgatacatccttaatgttactcgtgaaattgataattttttcccaggtgttttcgagtatcataacattcgcgtgtacgatgaggaagcaactgacctgttagcctattggaacgatacttataaatttatttcaaaggccaaaaaacacggctcaaagtgtctcgttcactgtaagatgggagtcagcaggtcagctagtacagtgatcgcttacgccatgaaagagtacggctggaatcttgatcgggcttacgactatgttaaagaacgtcggacggtaaccaagccaaatccatccttcatgcggcagcttgaagagtaccagggcattctgttggcctctaaacaaagacacaacaagctctggagatctcattctgatagtgacttgagcgaccaccacgagcccatctgtaaaccgggattggagctaaacaaaaaagacattactacttctgctgatcaaattgcggaggtcaagactatggagtctcatccacctatccccccggttttcgtggaacacatggttccacaagatgccaatcagaaaggcctgtgtactaaggagcggatgatctgcctggaatttacgtctcgcgagtttcacgcaggacagatagaggatgaactgaacctgaatgatatcaacggatgcagcagcggctgctgcctgaacgagagtaaattccctctagataactgtcacgcctcaaaagccctgattcagccaggtcacgtgccggagatggctaataagtttcccgacttgacagtcgaggatttggaaacagacgccttaaaggcagatatgaacgtgcatctgctgccgatggaagagctcaccagtccattgaaggacccacccatgagccccgacccagagtcgccctccccgcaaccatcctgccaaactgagatttccgacttctctacagaccgcatcgactttttttctgcgttggagaagttcgttgagctatcccaggagacccgctctcggtcctttagccacagccgcatggaagaacttggtggaggccgcaacgagagctgtcggctctcagtggtggaagtggcaccaagtaaggtcactgctgacgatcaacggtcatcctctttgagcaataccccacacgctagcgaagagtctagcatggacgaagagcaatccaaagccatctcagagctggtctcccctgatatttttatgcagtcccatagcgagaacgcaatctccgtcaaagaaatcgtgacagagatcgaaagtatcagccaaggagttgggcaaatacagctgaagggcgacattctacccaatccctgccacaccccaaagaagaactcaattcacgagcttctgctagaacgggcccagacccccgaaaacaagcctgggcacatggagcaagacgaggattcttgtaccgctcagcccgagctggcaaaggattctggcatgtgtaatcctgaagggtgtcttaccacccatagctctatcgccgacctcgaggagggagaacctgctgagggagagcaagaactccagggctcaggaatgcatccaggagcgaagtggtaccccgggagtgtgcgccgggccactctggagttcgaagaaagactacgtcaagagcaggaacaccacggagctgcaccgacctgcacaagtctgtcaactcgcaaaaactcaaagaatgattcaagtgtagcagatctggcccccaagggtaaatctgacgaagcacctccagaacacagttttgtgctaaaagaacccgagatgtctaaaggtaaaggcaaatatagcggcagcgaagctggttctctcagtcacagcgagcaaaacgcaaccgtgcctgcaccccgcgtactggagtttgatcacctccccgatccacaggagggtccggggtctgataccgggacacaacaggaaggagtgctcaaggacctcagaacagtgattccataccaggagtcggagacccaggccgtgccgctccccctgcccaaaagggttgagataattgagtatacccatatcgtaacatcacccaaccacacgggtcctggcagtgagatcgcgaccagtgagaagagtggagagcaagggttacgaaaagttaatatggaaaaaagtgtgactgtgttatgcactttagacgagaacctgaaccggaccctggatcccaaccaggttagtttacatccacaggttctcccactcccacatagtagttcccccgagcataacaggcctacagatcatcctacctccatcctatccagcccagaagaccggggctcctctctgtccactgcactcgagacggccgctcccttcgtgtcacatactactcatttattgtcagcctctctggactatctgcaccctcagacgatggttcacctggaaggcttcacagaacagtcaagtacaacagacgagccctccgcggaacaggtgagttgggaagaatcccaggaatcacctctcagctcaggctcagaggtgccttataaagatagccagctgagcagcgctgatctcagccttatttccaagctgggggataacactggagagttacaggagaaaatggatcctctccctgttgcttgtagacttcctcactcctcttcatccgaaaacatcaagtctctgtcacatagccctggggtggtcaaggaacgcgccaaggagatcgagtctcgcgtggtctttcaggccggtctgaccaaaccctcacagatgagacgctcagcgtcccttgcaaagctgggataccttgacctgtgtaaggactgccttcctgagagggagccagcatcctgcgaaagccctcacctaaaactcctgcagccattcctccggactgactctggtatgcacgccatggaagatcaagagtccctggagaatccgggggccccccacaaccccgagccaaccaagagctttgtggaacagctaacgaccacagagtgcatcgttcagtcgaagcccgttgagcggcctctcgtgcaatatgccaaagaatttggatcctcacagcagtatttactcccaagggcgggattggaactcacaagctccgaagggggattacctgtactgcagacacagggcttacagtgcgcttgtcctgctcccggactcgccgtggcaccaagacaacagcacggtaggactcacccgctgcggagacttaagaaggcgaatgataagaaacggaccacaaatccattttacaacactatgtag

SEQ ID NO: 134495 - DNA, 609 bp, synthetic construct
  misc_feature 1..609: note = Description of Artificial Sequence: Synthetic coding sequence
  source 1..609: mol_type = other DNA
atgacactctcaacgcttgcgaggaaaaggaaagctcccttggcatgtacatgttccctgggtggtccggacatgatcccctacttcagcgccaacgcagtgatctctcaaaatgccatcaatcaactgattagcgaaagcttcctgacagttaaaggggcggccttattcttgcctcgggggaatggttcctcaactcccaggatcagccaccgaaggaataagcatgctggcgacctacagcaacatcttcaggctatgtttattctgctgaggccagaggataatatcaggctggccgtgaggttggaatccacgtatcagaaccggaccagatatatggtcgtggttagtacgaacggcaggcaggacacggaggaatccattgttctggggatggacttcagcagcaacgacagctctacttgcactatgggcttagtgttacccctgtggagtgatactctgatccacttagacggagacggaggcttctccgtatcaacagataatcgagtgcatatcttcaagcctgtgtccgtacaggctatgtgggttgatcgggacagtcggaacaagcactgcgacgtgcttttggtcgaggaatag

SEQ ID NO: 134496 - DNA, 1350 bp, synthetic construct
  misc_feature 1..1350: note = Description of Artificial Sequence: Synthetic coding sequence
  source 1..1350: mol_type = other DNA
atggccctggtcacagtgcagcgatctccgaccccaagcaccacgtcatctccttgcgcctccgaggccgattcaggcgaagaggaatgtcggtcacagcctcggagcataagcgaatctttcttgacagtaaagggcgcagctttgttcctgcctagagggaacggctcttccacacccaggattagtcatcgaaggaacaagcacgcgggcgaccttcagcaacatttgcaggccatgttcatccttcttaggccggaggacaatattcgtttggctgtgaggcttgagagcacctaccagaaccgcactaggtatatggtggttgtgtctacaaatgggcggcaggacaccgaagagtcaatcgtgctcggtatggactttagttcaaatgattcctcgacctgcactatgggcttggttctgcccttatggtccgataccctgatccaccttgatggggacggggggttcagcgtgagcaccgataaccgggtgcatatcttcaagccagtgagcgttcaagcaatgtggtccgctctgcagtcactgcacaaggcttgtgaggtcgcccgggcccacaattattaccccgggagtctgtttcttacatgggtgtcctattacgagtcccacattaactcggaccaatcttcagttaacgagtggaatgcaatgcaggatgtgcagagccatcgacctgattctccagcgctgttcaccgatattcccaccgaaagagaacgaacggaaaggctcatcaaaacaaagttgcgtgaaattatgatgcagaaggacctggaaaatatcacgagcaaagaaattaggaccgagctggaaatgcagatggtttgtaatcttcgggaattcaaggagttcattgataacgaaatgatagttatcttaggtcagatggactctcctacacagattttcgagcacgtgtttcttggttccgagtggaacgcttccaatctggaggatctccagaacaggggagtgagatacatcctgaacgtgacacgtgaaatcgacaatttctttcctggagtttttgagtatcacaacatcagggtctacgacgaggaagccaccgatttgttggcctactggaacgatacatataaattcatttccaaagcgaaaaaacacggatccaaatgcctggtacactgcaaaatgggcgtgagccggagcgcgtcaacagtcatcgcttatgctatgaaggagtacgggtggaatctagaccgcgcctacgactacgtgaaggagcggagaaccgtgaccaagccaaatccaagctttatgagacagctggaagagtatcaggggatcctgctggcccgttag

SEQ ID NO: 134497 - DNA, 4353 bp, synthetic construct
  misc_feature 1..4353: note = Description of Artificial Sequence: Synthetic coding sequence
  source 1..4353: mol_type = other DNA
atggcattagtgacagtccagcggtcgcccaccccttccacgacatcttctccttgcgcttcttcaagccatctggaggatagcgaaagcgctgcgttgctgtgttgtgaatgtgaagaatccgaaatttttactgattccaacgaggccgattccggagaagaagagtgccgaagtcagcctcggtcaatttcagagtcattcctgacagttaagggggccgccctcttcctccccaggggaaatggctcaagcactccaaggatcagccatcggagaaataaacacgccggcgacctgcaacaacacctgcaggccatgtttatactattgcgccctgaagataatatccgcttagcagtgcggctcgagtcaacataccagaatcgcactcggtacatggttgttgtgtcaactaacggcaggcaggataccgaggaatccattgtgctagggatggacttctcttcaaatgattcctcaacatgtaccatggggctcgtactcccattgtggagcgatactcttatccaccttgatggggatgggggcttttccgtctccacggacaaccgggtgcatatttttaagcccgtcagtgtacaagcgatgtggagtgcattgcaatctctgcataaggcttgcgaggtggcacgagcccacaactattacccagggagtttgtttctcacgtgggtatcttattatgagtcacatataaatagtgaccagtccagtgtcaacgaatggaatgccatgcaggacgttcaatcacaccggcctgactccccggctctgtttacggacatacccaccgaaagagaaagaactgaaagattgattaagacaaagctccgcgaaattatgatgcagaaagaccttgaaaatatcaccagcaaagagattagaaccgagctcgaaatgcagatggtgtgtaatctgcgggagttcaaagaatttatagataacgaaatgatcgtgattctgggacaaatggactctcctacccagatttttgagcatgtctttctgggctctgaatggaatgccagtaatctagaagacctgcaaaataggggcgtacggtacattcttaacgtgacacgcgagattgacaatttttttcccggggtgtttgagtaccataacattagagtgtatgacgaagaagccaccgacttgcttgcgtattggaatgacacttacaagttcatctctaaagcgaaaaagcatggctccaagtgtctggtgcactgtaaaatgggcgtcagtagaagcgccagcacagtgattgcatacgccatgaaggagtacggctggaacctcgatcgggcttatgattatgtgaaagagcggagaacagtcactaagccgaatcccagctttatgcggcaactcgaggaatatcaaggaattttactagccagtaagcagcggcacaacaagctgtggcggagccacagcgactcagacctgagtgatcatcacgagcccatatgtaaacctggactggagctgaataagaaagatataactacaagtgccgatcagattgcggaggtcaagacaatggagagtcaccctcccattccgcctgtattcgtggaacacatggtgcctcaagatgctaaccaaaaggggctgtgtaccaaggagcgcatgatctgtctggagttcacatcccgcgagtttcacgcaggacaaattgaggatgagctcaatttgaacgacattaacgggtgctctagtggctgctgcctcaatgaatccaaatttcctctcgataattgtcatgcctctaaggctctgatccagcctgggcacgtccctgagatggccaataagttcccagatctcaccgtggaagaccttgaaactgacgcactgaaggccgacatgaacgtgcatttattgcctatggaggagctcactagcccactgaaggacccaccaatgtcacctgaccctgagtcaccaagcccacaaccatcatgccaaaccgagatcagcgacttctccacagatcgcatcgacttcttttctgccctggaaaaatttgtggagctaagccaggaaactcgatctagaagcttcagtcattcacgcatggaagagctaggcgggggccgtaacgaatcctgcagactctccgtggtcgaagtggcccccagcaaggtgacagcagacgaccagcgcagcagctcactttccaatacacctcatgcctcggaggaaagcagcatggatgaagagcagtcaaaagcaatctcagagttggtgtcccctgatatttttatgcaatctcatagtgagaatgctatctcagtcaaggaaatcgtcacagagatcgagtccatttctcagggggttggacaaatccaactcaagggcgacatactcccaaatccttgtcatactccaaaaaaaaactctatccacgagttactattggaaagagctcagaccccagaaaacaaacctgggcacatggagcaggatgaagatagttgcacagctcagcccgagctggctaaggattctggcatgtgcaaccctgaaggctgtctgacaactcactcctctattgctgatctcgaggagggggaacctgccgagggcgaacaggagctccagggaagtggcatgcacccgggtgctaaatggtatcccggttctgtgcgtagggccacccttgagttcgaggagcgactgaggcaggagcaagagcatcacggagccgcgccaacatgcacttccctcagcacccggaaaaattccaaaaatgacagctctgttgcggacctggcacccaagggcaagtctgacgaggcccctcccgaacatagctttgtgctgaaagaacccgagatgtcaaagggaaagggaaaatactctggttctgaggccggcagtttgagtcactccgagcagaatgctaccgtacctgctcctagagtgctggagttcgatcatctccccgacccccaggaaggtcccggtagcgataccggcacccaacaggaaggagtgctgaaggatctgagaacagttattccatatcaggagtctgaaacccaggccgtgccactgcctttgccaaagagggtggagatcattgagtacacccacattgtcacaagccccaatcacaccggacccggctcggagattgccacctcagagaagagtggcgagcaagggctcagaaaagttaacatggaaaagtctgtcacagtactctgtacacttgatgaaaacttaaatcgaacactcgatcccaatcaagtttcattgcacccacaggtgctccctcttcctcatagttcctctccagaacacaaccggccgaccgatcaccctacgagtatcctgtcctcgcccgaagacaggggctcctccttgtctacggctctggaaacggccgcccccttcgtatcccacacaacgcatctattgtccgcctccttggactatttacacccccaaacaatggtgcaccttgagggtttcacagagcagagttccaccactgatgaaccctccgccgaacaggtgagctgggaggaatctcaagagagccccctgtcttccggtagtgaggtgccatataaggactcacagttgtccagcgcagacttaagtttgatttccaagctgggtgataacacgggggaactgcaggagaaaatggaccctttgcccgtggcttgccgtctacctcattcctcctcttccgagaacatcaagagtctctctcattcacccggcgtggtgaaagagcgcgcaaaggaaattgagagccgagtggtctttcaggccggcttaacaaaaccctcccaaatgcgccgcagtgcctctctcgccaaacttggttacttagacctatgtaaggactgtttgccggagcgcgagcctgcaagctgcgagagccctcatttgaaactgctgcagccttttcttaggacagactctggaatgcatgccatggaggatcaggagtctctggaaaacccgggagccccccacaatcctgagcctaccaaatcctttgtggagcaactcacaactactgagtgcatcgtgcagtctaagcctgtggagagacccttagttcagtacgccaaagagtttggttcctcacagcagtacctcctccccagggccggtctggagctgacctcctcggagggagggcttcccgtgttgcagactcagggcctgcaatgcgcttgtccggcccccgggctggctgtggctccccgtcagcagcacggacgcacgcatccgctgaggagactcaagaaagctaacgataagaaacgaaccactaatccgttctataatactatgtag

SEQ ID NO: 134498 - DNA, 1980 bp, synthetic construct
  misc_feature 1..1980: note = Description of Artificial Sequence: Synthetic coding sequence
  source 1..1980: mol_type = other DNA
atggccctggtgacggtgagccgttcacccccaggatctggtgcttccactccagtagggccttgggatcaggcagtgcagcgtcggagcagacttcaacgaaggcagtctttcgcagtgctacggggagcggttttaggcctgcaagacggcggcgataacgacgacgctgccgaggctagctcagaacccaccgaaaaagctccgtccgaggaggagctgcacggcgaccaaacggattttgggcaaggatcgcagagcccccaaaagcaggaggaacaaagacagcacctgcacttgatggtacagctactgaggccccaggatgatatccgccttgccgctcagctagaagccccacgaccgccgagactgcgttacctgttggtggttagtacccgggagggagagggtctgtcacaagacgagacagtgctgcttggcgtggattttcctgactcttcctctcctagctgtaccctcggtctggttctgcccctatggtctgacacacaggtgtacctcgacggcgacggaggttttagtgtcacctctggcggccagtcccggatattcaaaccaatctctattcaaaccatgtgggcaactctccaagtgctgcaccaagcctgtgaggcggccttgggcagcgggctcgtgccaggtggtagcgctttgacgtgggcttcacactaccaggagcggctgaactctgagcagtcttgtttgaacgaatggaccgcgatggccgacctcgagagcctgaggccgccctcagccgaaccaggcggatcctcggaacaggaacaaatggaacaagccatccgcgcagagctctggaaagtcctggacgtgagtgacctggaaagcgtgacaagcaaagagattaggcaagcgctcgagctgaggctgggtctgcctctgcaacagtatcgcgactttatagacaaccaaatgctacttctggttgctcagagagaccgcgccagcaggatttttccccacctttatctgggatcagagtggaatgccgcgaacttggaggagcttcaacgtaatagggtcacccacattctgaacatggctcgggagatcgataatttctatccagagaggttcacttatcacaacgtgagactatgggacgaggagagcgcacagttacttcctcactggaaagagacacataggttcatcgaggctgccagagcacaagggacccacgtgctggtccattgcaaaatgggagtcagtaggagcgctgccactgtccttgcatacgccatgaaacagtatgagtgtagtttggaacaagctctgcggcatgttcaggagctaagacccatcgcccgccctaaccctgggtttctcagacaactgcagatttaccagggcatacttacagcttcccggcagtcacatgtgtgggagcaaaaagttggaggcgtgtcccctgaggagcatccggccccagaggtcagcacaccttttcctcctctgcctcccgaacccgaaggtggcggagaggaaaaggttgtggggatggaagagtctcaggccgcacccaaggaagagcccggcccccggccgcgcattaacttacgtggggtcatgcgatccatttccctgcttgaacccagtcttgagttggaaagcactagtgagactagcgatatgcctgaggtatttagtagccacgagagttcccacgaggagccattgcaaccattcccacagctggctcgcacaaaaggaggacagcaggtggatcggggaccacagccggcgctgaagtcacggcaatcagtcgtcactctccaagggtcagccgtggtcgccaataggacgcaagcgttccaggaacaggaacaagggcagggtcagggacaaggcgagccttgcattagttctaccccgcgtttcaggaaagtggtgcgccaggcctccgtgcatgactctggggaggagggagaagcctag

SEQ ID NO: 134499 - DNA, 2091 bp, synthetic construct
  misc_feature 1..2091: note = Description of Artificial Sequence: Synthetic coding sequence
  source 1..2091: mol_type = other DNA
atgcttctctggatcctactgctggaaacctccctgtgcttcgccgccggtaacgttaccggcgatgtttgcaaggagaagatctgcagctgtaatgaaattgaaggagacttgcacgtcgactgcgaaaagaagggatttacctctttacagaggttcacagcacccacatcacaattctatcacctgttcttgcatggcaattctctgactaggttattcccaaatgaattcgccaacttttacaacgcagttagcttgcacatggagaataacggactccatgagatagtgcccggggcttttctcggtcttcagctagttaagagactgcacattaataataacaagatcaaaagcttccgaaaacagacttttctggggttagatgacctggaatatcttcaggccgattttaatcttctgcgagatatcgatcccggagcttttcaggatctcaacaaattggaggtgctgatcttaaatgataacctgattagtaccctaccagctaatgtatttcagtatgtgcccataacccacctagatctgagagggaaccgactgaaaactctgccctatgaagaagtgctcgaacagatcccggggatagccgaaatcctcctggaggacaacccttgggattgcacgtgcgacttgttgtctctaaaggagtggcttgagaacattccaaaaaacgctctgattggaagggtggtgtgcgaggcgcctacccgtctgcagggcaaggacttgaacgagactacagagcaggacctgtgtcccctgaaaaaccgcgtggattccagtctgcccgcccctcctgcacaggaggagacatttgctccaggaccactgcccactccttttaagacgaacggacaagaggatcacgcgactcctggatccgcaccgaacggtggcacgaaaatcccggggaattggcagatcaaaattaggccgacagccgcgatagccaccggatcctctcgaaacaaaccactggccaatagcctgccctgtcccggtggctgttcctgcgaccatataccaggaagtgggctcaaaatgaactgcaacaaccgcaatgtgtcctctctggcagatcttaagcctaaattgtcgaatgtccaggaattgtttctgcgtgacaacaaaattcacagtattcgtaagagtcattttgtggattataagaatcttattctgctggacttaggaaataataatatcgcaaccgttgaaaataatacattcaagaacctcctggacctgcggtggctgtatatggactccaattacctcgatactctgtccagagagaaatttgctgggctgcagaacctggaatatctaaatgtggagtacaacgccatccaacttatcctaccgggcacctttaacgcaatgccaaaactacggattcttatcttgaataacaacctcctgcgctctttgccagtagacgtgtttgccggagtgagcctgtctaaactctcactgcataacaattatttcatgtacttaccggtcgctggggtgcttgaccaactgacttcgattatccagatcgatctgcatggcaatccttgggagtgctcctgtacaattgtcccctttaagcagtgggcggagcgacttggatccgaagtactgatgtctgaccttaagtgcgaaaccccggtaaatttttttaggaaagacttcatgctgctgtctaatgatgaaatctgccctcagctttatgccagaatcagtccgaccctgacatctcattctaagaactccactggacttgctgaaaccgggacccactccaatagctatttggacaccagtcgagtgtccatctccgtgctagtaccaggactgttgctcgtcttcgttacatcagccttcacagtggtgggcatgttagtgtttatcttaagaaatcggaagcgtagcaagagacgcgacgcaaattcaagtgctagcgagattaattcactgcagactgtctgcgattcctcttattggcataatggcccatataacgcagatggcgctcaccgagtttatgactgtggaagtcacagcctctcggactag

SEQ ID NO: 134500 - DNA, 2175 bp, synthetic construct
  misc_feature 1..2175: note = Description of Artificial Sequence: Synthetic coding sequence
  source 1..2175: mol_type = other DNA
atgctgtctggggtgtggttcctgagtgtgctgaccgtagcaggaattctgcagacagagtcacgcaaaaccgctaaggatatctgtaaaataaggtgcctttgtgaagaaaaagagaatgtgctcaacattaactgtgaaaacaaagggttcacaaccgttagtctgctgcagccaccgcagtaccgaatatatcaacttttcctcaacggaaacctgcttacgcggctgtaccccaatgaatttgtgaattattccaacgccgttaccctgcacctgggcaacaacgggctgcaggagattcgtacaggcgcattttccggactcaagacccttaagagactccatctaaataacaacaagctcgaaattctgcgagaggatacttttttagggctggagtcgctagagtacctccaagccgactacaattacattagcgccatcgaagcgggggccttctccaagctcaataagctcaaggttctgatcctaaacgacaatctacttctttcattgccctccaacgtttttcgctttgtgttgttgacacatttagacctgcgcggcaacaggctgaaggttatgccattcgccggggtgcttgaacatattggggggattatggaaatacagctggaagagaacccatggaactgcacatgtgatctgctacctctgaaagcgtggcttgatactatcacagtatttgtgggcgaaattgtgtgcgagaccccctttaggctgcacggaaaggacgtaactcagctgacacgccaagatctgtgtcccaggaaaagtgccagtgacagtagccagcgtggatcccacgccgacactcacgttcaaagactgagcccaaccatgaatcctgcgcttaaccctacaagggcacccaaggcaagtaggccaccaaagatgcggaaccgaccgactccccgggttacagtgtccaaagatagacagtccttcggccccatcatggtgtatcagacaaaatcgccagtccctctgacttgtccaagctcttgtgtctgcacatcacagtcaagtgacaatggcctgaatgttaattgtcaggagagaaagtttacaaacataagcgatttacagcctaaaccaacaagccccaaaaagctctacctgactgggaactatctgcagaccgtgtacaagaacgatctgcttgagtattcatccctcgatttactgcacctgggtaataataggatcgccgtgatccaggagggagcgtttacaaacctcacgagcctccgcagactttatctgaacggcaactaccttgaggtgctgtatcctagcatgtttgatgggctgcagagccttcagtacctgtacctggagtataatgtcatcaaggaaattaagccgctcactttcgacgcactgataaatttacaactcctgttccttaacaacaacctcctgaggagcctacctgacaatatttttggcgggacagcgctcacacgtcttaatctccggaataaccactttagccatcttcctgtaaagggcgtgctggaccaactgcccgcttttattcagattgatcttcaagagaatccatgggactgcacatgcgatatcatggggctgaaggattggaccgagcacgcaaatagtccagttattataaacgaggtgacctgcgagtctcccgcgaagcacgctggcgagattctgaagttcttggggagggaggctatttgtcccgactctcccaatctgtccgacggtacagtgctgtccatgaaccacaacacggatacaccccgctctctctcagtgtccccaagctcttacccagagctgcacaccgaagtgcctctgtctgtcctgattttgggcctgttagtcgtcttcattctctcagtgtgttttggggccgggctgtttgtcttcgtgctgaaaagacggaaaggggtcccctctgtgcccagaaacacgaacaacctcgacgtctcttcattccagctgcagtatggaagttataacacagagacacacgacaagacggacgggcacgtgtataattacatccctccgccggtcggacaaatgtgccagaatcccatttacatgcaaaaagagggcgatcctgtagcctattatagaaatttgcaagagttttcctactcaaaccttgaatag

SEQ ID NO: 134501 - DNA, 2538 bp, synthetic construct
  misc_feature 1..2538: note = Description of Artificial Sequence: Synthetic coding sequence
  source 1..2538: mol_type = other DNA
atgcttagcggagtatggttcctctcagtgttaactgttgccggcatccttcaaacagagtcccggaagaccgctaaggacatttgtaagatcaggtgcttatgtgaggagaaagagaatgttctcaatatcaactgtgaaaataaaggtttcaccaccgtgtctcttctgcaacctccacagtaccggatttaccagctgttcttaaatggcaatctcctgacccgtctgtacccaaatgagtttgtcaactacagtaacgccgtaacgctccatctgggcaataacgggctgcaggagatccggaccggcgcattctccggtcttaaaacactcaaaaggctgcacttaaacaacaataaactggagatactccgagaagacaccttcttgggcttggagtctctggagtacctgcaggctgattataattacataagtgccattgaagctggggcttttagtaaactcaacaagctaaaagtcttaatcctgaatgacaacctgttgctgagtctcccgtctaacgttttccggtttgtgctcctgacccacctcgatcttcggggtaacaggctcaaagtcatgccattcgccggagtcctggaacacatcgggggcatcatggaaattcagcttgaagaaaacccctggaactgcacctgcgacctgctcccactgaaggcgtggctggacaccattacagtgttcgtgggagagatagtgtgcgagaccccattccggttgcacggtaaagacgtgacccagctgaccaggcaggacctctgccctaggaagagcgcgtctgactccagtcaaagaggatcccacgctgacacacatgtacagcgcctcagccccacaatgaatcccgcactgaatccaacccgggcacccaaagcctccagaccacctaagatgagaaatagaccaactccaagagttactgtgtctaaggaccgccagagcttcggacccatcatggtctatcagacaaagtcccccgtacctctcacctgtccgagctcatgcgtatgcacgagccagtcttcggataacggcctgaacgtaaattgccaagagaggaagtttaccaacatttctgacttgcagcctaagcctaccagtcccaagaaattgtacttgaccgggaactacctccagacagtttacaagaacgacctcctcgagtactccagcctggacttgctgcatctgggtaacaaccggattgccgtgattcaagaaggcgccttcacaaatctgacatccctgcgacgcctgtatctcaatggcaactacctggaagttctttacccaagcatgttcgacgggctccagtccctccagtatctctacttagagtacaacgtgatcaaagagatcaagccactgacgttcgacgccctgatcaacttgcagctgctcttcttgaacaacaacttgttacgaagtctacccgataacatattcggcgggactgctctcaccagactcaatctgcggaataatcatttctctcacctgcccgtgaagggcgtgctcgatcagctcccggcatttattcagatcgatctgcaggagaatccatgggactgtacttgtgacattatgggtctcaaggactggacggagcacgctaactcccctgtcattatcaatgaagtgacatgtgaatcaccggccaagcacgcaggggagatcctgaaatttctcggccgtgaagccatttgcccagatagtcccaacttgagcgacggtacggtgctgagcatgaaccacaataccgacaccccacgctccctgtccgtgagtccatcttcctatccggaactacacacagaagttcccttgtcagttctcattcttgggcttctggtcgtgttcattctgtccgtgtgcttcggtgcaggactcttcgtcttcgttctaaagagacggaaaggtgtacccagtgtaccaaggaacaccaacaacctggacgtgtctagcttccagttgcaatatggttcatacaacacggaaacccatgataaaacggatggccacgtctacaactatatcccaccccctgtaggtcaaatgtgccagaacccaatttatatgcaaaaagaaggtgacccagtggcctattatagaaatctccaagagttctcctattctaatctcgaggaaaaaaaggaggagcctgccaccccggcatacactatttctgcaactgagttacttgagaaacaagcaactccgagagagcctgagttactctaccaaaacatcgcggagcgtgtgaaagaactgccaagcgcaggactggtccactacaatttctgcacactgcctaaacgacagttcgcaccatcatatgagtcaagaagacagaatcaggatcgcataaacaaaaccgtgctgtacggtaccccccggaagtgttttgtggggcagtccaaacctaatcacccgctgcttcaagccaaaccccaatctgagccagactatctcgaagtgctggaaaagcaaaccgctattagtcagctgtag

SEQ ID NO: 134502 - DNA, 2538 bp, synthetic construct
  misc_feature 1..2538: note = Description of Artificial Sequence: Synthetic coding sequence
  source 1..2538: mol_type = other DNA
atgctatccggagtgtggttcctgagtgtgctgactgtggctgggattctgcagacagaatcacgaaagaccgctaaggacatctgcaaaatccggtgcctgtgtgaggagaaagagaacgtcctgaacatcaactgcgagaacaagggattcaccacggtatcactcttgcaaccccctcagtacaggatctatcagctctttttaaatggaaatctcttgacaagactatatcctaatgaattcgtgaactattcaaacgccgtaactttgcacctgggcaacaacgggctgcaagagatacggaccggggcatttagcggcctgaaaacgttaaagcggcttcacctcaacaacaataagcttgagattctgagggaggataccttcctcggactcgaatccctggagtacctgcaggcagactacaattatatctcagccatcgaggccggtgctttttcaaaactcaataaactgaaagttctcatcctgaacgacaacctcctgctttcccttccaagcaacgtgtttcgatttgtgcttctcactcacctcgatctgagagggaatcgccttaaagtgatgccatttgctggcgtgctcgagcacatcggcgggataatggaaattcagttagaagaaaacccctggaactgtacatgcgatctgttgccgctgaaggcctggctggacaccattaccgttttcgtcggagaaattgtctgtgagaccccattcagactccatggaaaagacgtcacacagttaactagacaggacctgtgcccgcgtaagtcagctagcgatagtagtcaacgaggatcccacgctgatacgcatgtccagcgcctctcccccaccatgaacccggccctgaaccctactcgggcaccgaaagcctcacgcccaccaaagatgaggaatcggccgacccccagggtgaccgtgtctaaagaccggcagagcttcgggcccatcatggtctaccagactaaaagtcccgtgccactgacgtgcccatcaagctgcgtttgcaccagccagtcctcagataatggcctgaacgtgaattgccaggagcgcaaattcacaaacatcagcgacctccagcccaaacctacatcaccaaagaaactctatctcaccgggaactacttacagaccgtatacaaaaatgatctgttagagtatagttcccttgacctcctgcacctgggaaataaccgcatagccgtgattcaggagggcgcctttaccaatcttacttcccttcgtcggttgtacctgaacgggaactaccttgaagtgctctatcccagcatgtttgatggattgcagtccctgcaatacctctatctcgagtacaacgtcataaaagaaatcaaacccctgacctttgacgcattgattaatttacagcttctctttctgaataacaacctgctccgcagcctgcccgacaatatctttggcggtaccgcacttacacgtctgaacctgaggaataaccacttttcacacctcccagtcaagggtgttcttgaccaactgcccgcctttattcagattgatctgcaggagaatccctgggattgcacatgtgacataatgggactgaaagattggaccgaacacgccaattccccagtgattatcaatgaagtgacctgcgaatcccctgcaaaacacgcaggcgagatcttgaagttccttggacgtgaggctatctgccccgacagcccgaatttgagcgacggcacagtgctgagcatgaaccacaacaccgatacacctcggtctcttagcgtgagtccgagcagttaccctgagttgcatactgaggtgcccctgtctgtgctgattctaggattactggtggtgttcatactctctgtctgctttggcgcaggactgttcgttttcgtgctaaagcgaagaaaaggagtgccctcagtgccccgcaacacaaataaccttgatgtgagttcctttcagctgcagtacggttcatacaatacagaaacccacgacaagaccgatggacatgtttacaactatatcccccctccggtaggtcagatgtgtcagaaccccatatacatgcagaaagaaggtgaccccgttgcttattaccgcaacctgcaggagttcagctacagcaatctcgaggagaagaaggaggagcccgccacccctgcttataccatctcagccacggaattactggagaaacaggccactcctcgagaacccgagctgctttaccagaatatcgccgagcgagtgaaagagctgccttctgctggcctcgttcattataacttctgtacattgccgaagagacagtttgcccccagttatgagagtcggcgacaaaatcaggacaggattaacaaaactgtgctgtacggcacccccaggaagtgttttgtgggtcagtccaaaccaaatcatcctctacttcaggctaaacctcagtccgagccggactatctggaagtgcttgagaaacagactgcgatctcgcagttatag

SEQ ID NO: 134503 - DNA, 2538 bp, synthetic construct
  misc_feature 1..2538: note = Description of Artificial Sequence: Synthetic coding sequence
  source 1..2538: mol_type = other DNA
atgctcagtggtgtgtggttcctgtctgtgctgaccgtggctggcatcctgcaaacagagtctcgaaagaccgcaaaggatatctgcaagatcaggtgtttgtgtgaagagaaggaaaacgtgttaaacattaactgtgagaacaagggcttcactaccgtgagtctcctgcagccgccacagtataggatttatcaactgttcttgaatgggaatctcctcacgcgcctgtatccaaacgaatttgtgaactactccaatgcagtgaccttgcatctcgggaacaatggactgcaggaaataaggacaggggcattctcaggcctgaagaccttgaagaggctacacttgaataacaacaagctagagatattaagagaagacacctttctgggcctcgagagcctcgaatatttgcaagctgattacaattatataagtgctatcgaagctggcgcctttagtaagctgaacaagctgaaagtgctgattcttaatgacaatcttctcctgagcctgccctcaaacgtgtttagattcgttttactgacccacctagatctccggggcaaccgtctcaaggtaatgcctttcgctggtgtacttgagcacatcggagggattatggaaatccagctggaagaaaatccttggaactgcacttgcgatctgctgcctctgaaagcgtggctcgacacaatcactgtctttgtgggagagattgtttgtgaaacccccttccgactgcatgggaaagacgtaactcagctgaccaggcaggacctgtgcccccggaagtcagcgagcgatagttcacaacggggatcccacgcggacactcatgtgcaaagactgtcgccaactatgaatcctgctctgaatccgaccagagcccccaaggcatctcgacccccaaagatgcgtaatcgccccaccccacgagttactgtcagcaaggaccggcaatctttcggccccatcatggtgtaccagacaaagagtccggttcctctcacctgcccctcaagttgcgtatgcacctcacaatcttctgacaacggtctcaatgtgaactgtcaggagagaaagtttaccaatatatctgatctgcagcccaaacccaccagccccaaaaagctgtacctgaccggcaattatctccagacagtgtacaagaatgatctgttagagtatagttccctcgacttactgcatctgggtaataatcggattgcagttatacaggagggtgctttcaccaatctgacaagtctgcgccggctctatctgaatgggaactatctggaagtgttgtacccgtcaatgtttgacgggttgcaatccctgcagtacctctatcttgaatacaacgtgattaaggagattaagccactgactttcgacgcattaatcaacctgcaactgctgtttctaaacaacaacctattgcgatcactgcccgataacatcttcggcggcacggccctgactcgactcaaccttcgtaataatcatttctcccacctgccagttaaaggggtcctcgatcagctgccagcatttatccagatcgatctgcaagagaatccttgggactgcacctgtgacatcatgggcctcaaagactggactgagcacgccaacagcccagtgattataaatgaggtcacctgcgaaagccccgccaagcacgctggtgaaattttgaagttcctgggacgcgaagcaatctgtccggacagccctaacttgtccgacggcacggtgctgagcatgaatcataatacggatacaccacgatccctgagcgtgagccctagttcctatcccgagctccatacggaggtaccattatctgtgctcatcttaggattgctcgtagtctttattctgagcgtttgcttcggagcgggactgtttgttttcgtgctgaaacgacggaagggagtcccatccgtgccgcgcaatacaaataatttggacgtgtcctcctttcagttacagtacgggtcttacaatacagaaactcacgacaagactgatgggcatgtgtataattacatacccccgccggtgggacagatgtgtcagaacccaatttatatgcagaaggaaggagatcctgtggcttattacaggaatctgcaggagttctcgtactctaatctggaagaaaagaaggaggaacccgccacaccagcctacactatatcagcaactgagcttctggagaaacaggccacaccaagagagccagaattgttgtatcagaatattgccgaacgtgtgaaggaactgccctcagcaggactagtccattataatttttgcacgctaccgaagcgccagtttgctccaagctacgaatctcgcaggcagaaccaggaccgaataaataagactgtcttgtacggcacacccaggaaatgttttgtaggtcagtcaaaaccaaatcaccctttactccaggccaagccgcagtccgagcctgactatttggaggttctggagaagcaaaccgcaattagtcagctttag

SEQ ID NO: 134504 - DNA, 2538 bp, synthetic construct
  misc_feature 1..2538: note = Description of Artificial Sequence: Synthetic coding sequence
  source 1..2538: mol_type = other DNA
atgctgtccggcgtttggttcctgtcagtgttgaccgtggccggcattctgcagaccgaaagcagaaagacagcaaaagatatctgtaaaatccggtgcctgtgtgaggagaaggaaaacgtgctgaatatcaattgtgagaacaaaggttttacaaccgtgtcccttctccagccaccccagtatcgaatctaccagttattcctcaatggcaatcttctcacccggctgtatcccaatgaattcgttaattacagtaacgccgtaaccctacaccttggcaacaacggcttgcaggagattagaactggcgccttctcaggacttaagacactgaagaggctgcaccttaacaacaataagctggagatcctgcgcgaagacacctttctcggcttggagtctttagaatatttacaagcagattacaattatattagcgcgatcgaagcgggcgccttcagcaaactgaacaaactcaaagtgctgatactgaatgataatcttctactgagcctcccatcaaacgttttccgcttcgtgctgctgacccatctggacctccggggaaacaggctcaaggtcatgccttttgccggggtgcttgaacacatcggtggtatcatggagatccagctggaggagaatccgtggaattgtacctgcgatctccttcccctgaaggcctggttggatacaattactgtatttgtcggtgagattgtgtgtgagaccccttttcgattacatgggaaggacgtgacacagctgactcgtcaggacttatgtcctagaaagtcagcttccgattcctcgcagagaggctcacatgccgatacccacgtccagcggctatctcccacaatgaaccccgccctcaatcctacccgcgctccgaaggcctcacgcccccctaagatgaggaacagaccaacgcccagggtgacggtctcaaaggatcgtcagtcttttggaccaattatggtttaccaaactaaaagtccggtcccccttacgtgcccatcctcgtgcgtgtgcacctcacagtctagcgacaatggtttgaatgtcaactgccaagagcgcaagtttacaaatatcagcgatctgcaacccaagccaacctcgcctaaaaagctttaccttactggcaactatctacagaccgtgtacaagaatgatcttcttgaatactccagtcttgacctgctgcatctgggcaataataggattgcagtgattcaggaaggagctttcaccaatcttacctccctgagacggctctatttgaacgggaattatttagaggttctgtatcccagtatgttcgatgggctgcaaagcctccagtatctttacctggagtataacgtgattaaggagatcaaaccattgacatttgatgctctgatcaacctgcaactcctgttcctcaacaacaatttgcttagatcgctccccgataatatatttggaggcaccgccctgacgcgactcaaccttcggaacaatcacttttcccaccttccagtgaagggggtactggaccagttaccagcttttatccagattgatttgcaagaaaacccatgggactgcacctgcgacataatggggctgaaggattggaccgaacacgccaactcccccgtgattataaatgaggttacgtgcgagtctcccgctaaacacgccggtgagatactgaaattccttggaagagaagccatttgtcctgactcccccaacctgtcagatggcaccgttctatcaatgaaccacaataccgacactccacggtccctatcagtcagtcccagttcatatcccgaattgcacactgaagttcccttatcagtgttaattcttggacttttggttgtgtttattttgagtgtgtgttttggcgccgggctgttcgtgttcgtgcttaaacgcagaaagggggtgcccagtgtcccccgcaacacaaacaacctggacgtttcttccttccagctccagtatgggtcatataatactgagacccatgacaaaaccgacggccacgtctacaactacataccccctcctgtaggccagatgtgccagaaccccatctacatgcaaaaggaaggggaccccgtggcttactataggaatctgcaggaattttcttactctaatctagaggagaagaaagaggagcctgccacacctgcgtatactatctctgcaactgagctgctggaaaaacaagccacaccacgtgaaccagaactgctctaccaaaatatcgccgaacgagtgaaagagctgccctccgcgggccttgtgcactataacttttgtaccctgcccaagcgtcagttcgcgcccagctacgagtcaagacgacaaaaccaagatagaattaataagaccgtgctgtacgggactccccggaaatgtttcgtgggccaaagcaaaccaaatcatcctctcctgcaggctaagcctcagtccgaacctgattacttggaggtcctagagaaacagaccgcaatctcccagctgtag

SEQ ID NO: 134505 - DNA, 2538 bp, synthetic construct
  misc_feature 1..2538: note = Description of Artificial Sequence: Synthetic coding sequence
  source 1..2538: mol_type = other DNA
atgttgagtggggtgtggttcttgtccgtacttacagtcgcaggtatcctgcagactgaatccagaaagactgccaaagatatctgcaagattcgatgcctgtgtgaggaaaaagaaaatgttttgaacatcaattgcgaaaataaaggcttcactacagtctccctgctgcagccgccacagtaccggatctatcagctgttccttaacgggaatctgttgacccgactctatcccaatgagttcgtgaattattcgaatgccgttaccctgcatctcggaaataatggcctacaggagattcgcaccggtgcctttagtgggctcaagacccttaagcgcctgcacctaaacaataataaattggagatacttagggaagatacttttcttggactcgagtccctggagtatcttcaggcagactataactacatctcagcaatagaggccggcgcgtttagcaaattaaacaaactgaaagtactgatcctgaatgataacctgttgcttagcctcccctcaaatgtcttccgcttcgtcttgctcacccacttggacttaagaggtaaccgcctaaaagttatgccattcgcaggggtgctggagcacataggagggattatggagattcagcttgaagagaatccctggaattgcacatgtgaccttcttccgctcaaagcatggttagatacaatcacagtgttcgtgggggaaattgtgtgtgaaaccccttttagactccacggaaaagatgtgacgcagctcacccgtcaagatttgtgtccgaggaaaagcgcatcagactcttcacagagaggttcccacgccgatacacatgtgcagagactgtctcccaccatgaaccccgctcttaaccctacaagagcgccaaaggcaagtcgccctcctaagatgcgaaaccggccaaccccccgggtgacagtgtcaaaagataggcagtcttttggacccatcatggtgtaccagaccaagtcacctgtgcctctgacttgcccttcgagctgcgtctgcacaagtcaatcttccgacaatggtcttaatgttaattgtcaggagcgcaaattcaccaacattagcgatttgcagcccaagccaacctccccaaagaagttgtatctgactggcaactatcttcagaccgtgtacaaaaatgaccttctggaatattctagcctagatctgctacatcttggaaacaaccgcatcgccgtgatccaggagggggcattcaccaaccttacctctctgcgcagactttatttgaacggaaactacttggaggtcctgtatccttccatgttcgatggactgcaatctctccagtacctgtatctggaatacaatgtgattaaagagataaaacctctcactttcgatgcactaatcaacctgcaattgctctttctgaacaataatctgctgaggtccctgccagacaacatcttcggcgggaccgctttgaccagactcaaccttaggaataaccacttctcccacctgcctgtcaagggtgtgttggatcagctgcccgcattcatccagatcgatctccaagaaaacccctgggactgcacgtgtgatattatgggacttaaggattggacagagcacgcaaacagccccgtgattatcaacgaagtcacatgcgaatctcccgcgaagcacgccggagaaatcctgaagtttcttgggcgagaggctatttgccccgatagcccgaacttgtcggatgggacagtcctctccatgaaccacaatactgacaccccacgctccctctctgtgagccctagttcctacccagagctgcacaccgaggtaccactttcagtgctcatactaggcctcctggtggtcttcattttgtccgtctgttttggtgccggcctgtttgtcttcgttctcaagagacggaagggcgtcccaagcgttcccagaaacaccaataatctagacgtcagtagctttcagttacagtacggttcatataataccgagacccacgacaaaactgacggacatgtctataattacataccaccgccagtgggtcagatgtgccaaaatcctatctacatgcagaaagagggggatccagtcgcatactaccgaaacctgcaggagtttagttacagcaacctggaagaaaagaaggaagaacctgcaacccccgcgtacacaatttccgctaccgagctgctggaaaagcaagccacgcctagagagccagagctcctgtaccagaatatagccgagcgcgtgaaagaactccccagtgcaggactagtgcactataacttttgtaccttgccaaagcgccagttcgcaccatcatacgagagtagaagacagaaccaagataggatcaacaagaccgtgctctacggtactccacgaaaatgttttgtaggacagtctaaacccaaccacccactcctacaagccaaaccccaatccgagcctgattaccttgaagtcctggagaaacagaccgctattagtcagctctag

SEQ ID NO: 134506 - DNA, 2934 bp, synthetic construct
  misc_feature 1..2934: note = Description of Artificial Sequence: Synthetic coding sequence
  source 1..2934: mol_type = other DNA
atgaaaccgtccatcgctgaaatgttgcacaggggacggatgctgtggattattctgctatcaaccattgcactgggctggacgacaccgattcctctaatcgaggactcagaggagattgacgaaccctgctttgatccatgctactgtgaggtgaaagaatcgctctttcatattcattgcgattccaaggggttcaccaatattagccagatcacggaattttggtcacggccctttaaactctacttgcagcggaacagcatgcgaaaattatataccaactcttttctacatctgaacaacgccgtgagtataaacttgggcaacaatgcgttgcaggatatacagactggcgcattcaacggcctcaaaatcttgaagcgattgtacctgcacgagaacaaactcgacgttttcagaaatgacacctttctcggtctggagagcctggagtacttacaggctgattataatgttataaaacggattgagtccggagcatttagaaatctgagcaagctccgggtgctgatcttaaatgataatctcatccccatgttgccgaccaatctgttcaaagccgtctccctgacccacctcgacctgagggggaacagactgaaagtgcttttttaccgaggcatgctcgatcacattggccgatccctgatggagctccaacttgaagagaatccgtggaactgcacatgtgagattgttcagttgaaatcttggctggaaaggataccatatactgctctggtgggcgatatcacctgcgagacgccattccacttccatgggaaagatcttagagagattcgaaagacagagctctgcccactactctctgacagcgaggtcgaggcttctcttgggatcccccactcaagctcttctaaagagaatgcctggcctaccaaaccctcgtctatgctgtcatctgtccacttcaccgccagctctgtcgagtacaagtcaagcaacaagcaaccgaagcctacaaagcagccgagaacaccccgaccgccctccacaagtcaagcattgtaccctggacccaaccagccacccatcgccccttatcagactcgcccccccatcccgatcatttgtcccacagggtgtacctgtaatctgcacataaatgacttgggccttaccgttaattgtaaagagcgggggttcaataacatttcagaactgcttccacgccccctcaacgcaaagaaattgtatctgagttcgaacctgatccaaaagatttatcgatctgatttctggaatttttctagtcttgatctgcttcacttgggaaacaaccgaatttcgtacgttcaggacggcgcttttataaatctgcctaaccttaaaagcctgttcctcaacggtaatgatatcgagaagcttactcctggaatgttcagagggctccagagcctacactatctgtactttgaattcaatgtcatcagggaaatccagccagctgctttcagtttaatgcccaatctgaaactgctttttctaaacaacaatctgctgcgtaccctgccaacggacgctttcgccggaacttctctggcccgccttaatctccgcaagaactattttctctatcttcctgttgcgggcgtcctggagcacctcaacgctatcgtgcagatagacctcaacgagaatccatgggactgtacttgtgaccttgtcccatttaagcagtggattgagaccataagctctgtatctgtggtgggagatgttctgtgccgctcacctgagaaccttacccatcgggatgtacgaacaatcgagctcgaagtgttgtgccctgagatgcttcatgtagccccagccggcgaaagccccgctcagcccggagattcacacctgattggagctcctaccagtgctagtccctacgagttttctccccccggggggccagtccccctctctgtgctgattttaagtctcctggtattgttcttctctgccgttttcgtggccgctggcctgtttgcatatgtgctgcgcaggcggaggaaaaaactccctttcaggtcaaaacggcaggaaggcgtggatctcaccggtattcaaatgcagtgccacaggctgtttgaggacggaggcggcggcggcggaggaagcggggggggcggccgtccgactctttcttccccagagaaggcccctcctgttggtcatgtgtatgaatatattccgcatccagttactcaaatgtgcaacaacccaatctacaagcccagagaggaagaagaagtcgcagtgagcagtgcacaggaagcaggttcggctgaacggggaggcccgggtacacagcccccaggtatgggagaagccctccttggctcggaacaattcgccgagactccaaaagagaaccactcaaattaccgaacgcttcttgagaaagagaaggagtgggcactggccgtgtcatccagtcaacttaataccattgtgaccgtgaatcaccaccatccacatcaccccgcggttggaggcgtgagcggtgtggtcggcggaacggggggcgatcttgccgggttcagacaccacgaaaaaaatgggggtgttgtccttttcccacctggcggcggttgtgggtcaggaagtatgctgctagatcgggagcgaccacagcccgccccatgtactgtcggattcgtagattgcctttacggcaccgttcccaaattaaaagagctgcacgtgcacccacctgggatgcagtacccggatcttcagcaggacgcacgcctgaaagaaaccttgctctttagtgcaggtaagggtttcaccgatcatcaaactcagaagagcgactaccttgagctccgcgccaaactgcaaacaaaacctgattacctcgaggtgttggagaagacaacctatcgcttttag

SEQ ID NO: 134507 - DNA, 2934 bp, synthetic construct
  misc_feature 1..2934: note = Description of Artificial Sequence: Synthetic coding sequence
  source 1..2934: mol_type = other DNA
atgaaaccatccatcgctgaaatgctccaccgaggccggatgttatggattatcctgttgtcaacaattgctttggggtggaccacccctatacccttgattgaagatagtgaggagatcgatgagccatgtttcgacccatgttattgtgaggtcaaggagagcttgttccatatccattgcgatagcaaagggttcaccaacatcagtcagatcaccgagttttggtcccgcccattcaagctgtatctccagagaaacagcatgcggaaattgtacaccaacagcttcttgcacctgaacaacgccgtgagtatcaacctgggtaacaacgcactgcaggacattcagacgggagcctttaatggtttgaagattctgaaaaggttatacctccacgaaaataagctggacgtgtttcggaatgacaccttcttgggcctggagtcccttgagtacttgcaggccgactataatgtgattaagaggatcgaaagtggggcttttaggaatctcagcaagctgagggttctcatcctgaacgacaacctcatccccatgctaccaacaaatctctttaaagcggtctcacttacccacctcgacctgcggggaaacagactgaaggtcttgttctaccgcggcatgcttgaccatatcggacgcagtttaatggagttgcagctagaagagaacccgtggaactgcacctgtgagattgtacagttgaagtcatggcttgaacgaataccatacaccgcacttgtgggagacattacttgtgagacacccttccatttccatggcaaggacctaagggaaatccgtaagactgagctgtgtcctctgctctctgatagtgaagtagaggcgagcctcgggataccacacagtagttccagcaaggagaatgcatggcccactaagcccagctcaatgctctcctctgtacatttcacagcttcttctgtcgaatataaatctagtaataagcagccaaaaccaacaaagcaaccgaggaccccaaggcccccctctacaagccaggccttataccccggaccgaatcagcctcctatcgccccttatcagacaaggcctccaatacccattatttgccctactgggtgtacctgtaacttgcatatcaatgacttaggactaacggtgaactgcaaagagaggggttttaacaacatatccgagctcctccctaggccgttgaatgcgaagaagctgtatctgtccagcaatctgatacaaaagatttatcggagcgatttttggaactttagtagtttggatttactgcatctcggcaataataggatcagttatgtgcaggacggagccttcattaatctgccgaatctgaagagcttattccttaacggaaacgacattgagaagttaacacccgggatgtttcgggggctgcagagccttcattacctgtatttcgaattcaacgtgataagggaaattcagcccgccgcgttttccctgatgcccaacctcaagttgctgtttctgaacaacaacttgttgaggactttgccaaccgatgctttcgccgggaccagcctggcaaggttgaatctcaggaaaaactactttttgtatcttccggtcgccggtgttttggaacatctgaatgcaatagtccaaatcgatctgaatgaaaatccctgggactgtacctgtgatctcgtgccctttaagcagtggattgaaaccatctcaagcgtgtccgttgtaggtgacgtactttgtcggtcaccggaaaacctgacccatcgcgacgttcggaccatagagttagaggtgctttgccctgaaatgctgcatgtggcacctgcaggtgaatcacccgctcagccaggggatagccacctcatcggcgcccctactagtgcctccccttacgagtttagtccaccgggagggcctgtccctctgagtgtgctcattctctcattactggtgcttttcttctccgctgttttcgtggccgcaggattgttcgcgtacgtacttcgtcggcgacggaagaaactgcccttcagatccaagcggcaagagggcgtagacctaactgggattcagatgcagtgccatcgtctctttgaagacggaggcggaggtggggggggatcagggggaggaggtagacctactctgagcagccctgaaaaggccccccctgtaggccacgtgtacgagtacatcccccatcccgtgactcaaatgtgtaacaacccaatatataagccccgagaggaagaggaggtcgccgtgtccagtgcccaggaagctggttccgccgagcgcggcggacccgggacgcagccccctggcatgggggaggctttactgggtagcgaacaatttgctgagacaccaaaagagaaccattcgaattatagaacactcctggagaaggaaaaggagtgggcgctggccgtgtcttcctcacagctgaacactatcgtcaccgtgaatcaccaccatccccatcatcccgctgtgggtggagtgtcgggggtcgtcgggggaaccggtggcgacctggcagggtttcgccatcacgagaaaaacggcggcgtggtcttgttcccccccggcgggggttgtggctccggtagcatgcttctggatcgcgagcgcccccaaccagccccttgcacagtcgggttcgtagactgtctgtatggcacagtccctaaacttaaggagctacacgtccatccgccaggcatgcagtaccccgaccttcaacaagatgctaggctgaaggagacgctcctattttctgccggcaagggctttaccgaccaccaaacccaaaagtctgattacttagagctccgggctaaacttcagaccaagccagactaccttgaggtgctagagaaaacgacttacagattctag

SEQ ID NO: 134508 - DNA, 492 bp, synthetic construct
  misc_feature 1..492: note = Description of Artificial Sequence: Synthetic coding sequence
  source 1..492: mol_type = other DNA
atgaagcccagtattgcagagatgctgcacagaggacgtatgttgtggataatactgctgagcacgatcgccctggggtggactacccctattccgctcatcgaggacagtgaagagatcgatgaaccatgctttgatccttgctactgcgaggtcaaagagtccctcttccacattcactgtgacagcaaaggattcacaaacatctcacaaattaccgagttctggtctagaccctttaaactgtatctgcagcgtaacagcatgagaaagctgtacacgaactcctttctacacctcaacaacgctgtttctatcaacctcgggaacaatgctcttcaggacatccagacaggggccttcaacggcttgaagatccttaagcgtctgtatctgcacgaaaataagctcgacgtgttcagaaacgatacttttcttggcctggaatcgctggaatatctccaggccgactataacgtgattaaacgatag

SEQ ID NO: 134509 - DNA, 2514 bp, synthetic construct
  misc_feature 1..2514: note = Description of Artificial Sequence: Synthetic coding sequence
  source 1..2514: mol_type = other DNA
atgttcctgtggttattcctaatcctgtccgcactgatttccagtacaaatgccgattcagacatttcagtcgagatttgcaacgtgtgcagctgtgtctccgtagagaatgtgctgtacgtcaattgcgagaaagtgagcgtgtacagaccaaaccagctgaaacctccatggtcaaacttctatcacctcaatttccagaacaattttctcaacatcctatatccgaacacttttctaaactttagtcacgctgtttccctacaccttggaaataataagctgcagaacatcgaaggaggcgcctttctcggactatcggcgctgaaacagctccacttgaataataacgaattgaagatcttgcgcgcagacacattccttggaatcgagaacctggagtacctacaggctgattacaacttgataaaatacatcgaacggggagccttcaacaagcttcacaaactgaaagttctcatcctgaacgacaatctcattagctttttgcctgataatatcttcagattcgctagcctcacacacctggacattcgcgggaataggatacagaagctcccctacataggagtgttagagcacattggccgagtggttgagctgcagctggaggataatccctggaactgcagttgcgacttactacccctgaaggcatggttggaaaacatgccttacaacatctatattggtgaggccatctgcgagacacccagcgacctgtatggcagactgctgaaagaaacgaacaagcaggaattgtgcccaatggggacgggatctgattttgacgtaagaattctgccgccttcccagttggagaacggttacactacgccgaatgggcatacaacgcagaccagcctgcataggctggtgactaagcccccaaagacaacaaacccatcgaaaataagcggtatagttgcaggaaaggcattatctaatagaaatctctcgcagattgtaagctatcagactagagtgcccccactcaccccgtgcccagcaccttgcttctgtaagacacacccctcagatctggggttgtcggtgaactgccaagaaaagaatatccaatcaatgagcgagctcatcccaaagccgctgaacgctaaaaaactgcatgtgaacggaaacagtattaaggacgtcgatgtgagcgattttaccgatttcgaaggcttggacctgctgcatctgggttccaatcagataaccgtcataaaaggcgacgtgttccataatctgacgaatctgagaagactatacctgaacggtaaccagatcgagagactatatcctgaaatcttttcaggattacacaacctgcaatacctgtacttggagtataacctgatcaaggagattagcgctgggaccttcgacagcatgccaaatctccagcttctgtatcttaataataatctgctgaagagcttaccagtgtatatattctccggcgcaccattggctcgcttgaatttacgcaataacaagtttatgtacctcccggtctcaggggtcctggaccagctgcagtctctcacacagatcgaccttgaaggcaacccctgggactgcacttgcgatctggtggccctgaaactttgggtggagaagctgagcgatggaatcgtcgtcaaagagctaaagtgtgaaaccccagtccaattcgctaatattgaactcaaatccctcaagaatgaaatcctctgtccgaagctgcttaataagccttccgctccgtttacgagcccagctccagccatcacatttactacccccctcggccccatcaggagcccgccgggcgggcctgtacctctttctattttgatcctgtccattctggtagttcttatcctcaccgtgtttgttgccttttgcctactcgtttttgtgcttaggcggaacaagaagcctacagttaaacatgaggggctcggaaacccagattgtggctccatgcaactccagctgcggaaacatgatcacaagacaaataagaaggatggactttccaccgaggccttcattccgcagacaatcgagcaaatgtcaaagtctcacacctgcggattgaaagagtccgagactggttttatgtttagtgatccaccgggccaaaaagtggtcatgagaaacgtggccgataaggaaaaagacctgctccacgtggacacgagaaagcgcctgtccaccatagatgagttagacgagcttttcccatcacgcgatagtaacgttttcatccaaaattttcttgagagcaagaaggaatacaacagtatcggcgtttccggcttcgagatccggtaccctgagaagcagcccgacaaaaaatctaagaaatcactgatcggtgggaaccattcaaagattgtggtggagcaaaggaagagtgaatacttcgagctgaaggccaaactccaatcctcccctgattacttgcaggtcctagaggagcagacggctcttaataaaatctag

SEQ ID NO: 134510 - DNA, 2514 bp, synthetic construct
  misc_feature 1..2514: note = Description of Artificial Sequence: Synthetic coding sequence
  source 1..2514: mol_type = other DNA
atgttcctgtggctttttctcatcctctccgcactgatcagctccacaaatgctgatagtgacattagcgtagaaatttgtaacgtttgttcatgcgtaagcgttgaaaacgttctgtacgttaactgtgaaaaggtgagcgtttatcggccgaaccaattgaaaccaccctggtcaaatttctatcacctgaactttcaaaataattttctcaacatactttacccaaacactttcctgaacttcagccacgccgtgagcttgcacctgggaaataacaaactccaaaatatcgaaggaggggcttttcttggtttatccgcccttaaacagctccacctgaacaacaatgaactaaaaattctcagagctgacacattcctggggattgaaaatctggagtacctacaggcggattacaacctcattaaatatattgaaagaggcgccttcaataagctccacaaattgaaggttttaattctgaatgacaatctcatcagcttcctgcccgacaacattttccgcttcgcgtccctgacacatctcgatattaggggaaacagaattcaaaagttgccttacatcggcgtgctcgagcacataggtagagtcgtagaactgcagctagaggacaatccctggaattgctcttgtgacttgctgcctttaaaggcatggctggagaatatgccttacaacatttacatcggcgaagctatctgtgagacaccaagcgacctgtacggtagactgctcaaggaaactaacaaacaagaactatgccctatgggaaccggctcggactttgacgtgcgtatcttgcctccatctcaacttgaaaacgggtataccacacctaacggtcataccactcagacaagccttcaccggctggtcacaaagccccccaaaactaccaaccccagcaagatttccgggattgtcgcaggcaaggcgttaagcaatagaaacctatctcagattgtgagctatcaaacccgggtgccaccactgaccccttgcccagctccctgtttctgtaagacgcacccaagtgacctaggcctgtccgtcaactgccaggaaaaaaacattcagtctatgtctgagttgatacccaagccactgaacgctaaaaagctgcacgtcaatggaaatagtatcaaagatgtggatgttagcgattttaccgattttgagggcttagatcttctgcacttggggtcgaatcaaattaccgtgatcaaaggggatgtctttcacaacctgacaaatttaagacggctctacctgaatggtaaccagatcgaaaggctctatcctgaaattttctccgggcttcataatctgcagtacctgtatctggagtacaacctcattaaagaaatcagcgcgggcacctttgacagcatgccgaacttgcagcttctgtatctcaacaataatttacttaagtctttgcctgtgtacatcttttccggcgccccattggctagactgaatctgcgcaataacaaattcatgtatctcccagtgtccggcgttctggatcagcttcaatctctgacccaaatagatttggagggcaacccttgggactgcacgtgtgaccttgtcgccctgaaactgtgggttgagaaactcagtgacggaatcgtggtcaaggaactgaagtgtgaaaccccagtccaatttgcaaacattgagttgaagtctctgaagaacgagatcctctgtcccaaattactgaataagcctagtgctcctttcacaagtccagccccagccatcacatttacgactccactcggacctattcggagtcctcccggcggacctgtgcctttatctatccttatcctgagcatactggtggtgctgattctaacagtgttcgtcgcattttgtcttctggtcttcgtgttgagacgcaataaaaagccgacggtgaagcatgagggactaggcaatccagactgcggcagtatgcaactccaactgaggaaacatgatcataaaacaaataagaaggatgggttgtctactgaggcttttatacctcagactatagagcaaatgagtaaaagccacacttgcgggctgaaggaatcagaaactggattcatgttttctgatcccccagggcaaaaggttgtgatgcggaatgtggccgacaaggagaaggacctactccacgtggacaccagaaaacgcctgtccaccatcgacgaactggacgagttgttccctagccgcgactctaacgtgtttattcagaactttctggaatccaagaaggaatataactcaattggtgtgagcggtttcgagatccgataccctgaaaaacagcccgacaaaaaatctaagaaatccctcattgggggcaatcattcaaagatagtcgtggaacagcgcaaatctgaatattttgagcttaaagccaaactgcagagcagccccgattatctgcaggtgctcgaggaacagactgcacttaataagatttag

SEQ ID NO: 134511 - DNA, 2514 bp, synthetic construct
  misc_feature 1..2514: note = Description of Artificial Sequence: Synthetic coding sequence
  source 1..2514: mol_type = other DNA
atgttcctctggctgttcttaatcctgtctgctctgatctcgtctacaaatgccgattccgatatatccgttgagatctgtaacgtttgctcttgtgtaagtgtcgagaacgtcctgtatgttaattgcgaaaaggtcagcgtatatcgcccaaatcagctgaagcccccctggagcaatttctaccacctcaattttcagaacaacttcctcaacatcctgtacccgaatacattcttgaatttctcccacgccgtgtcactgcaccttggaaataacaaactccagaatatcgagggaggcgcctttctggggcttagcgcactgaaacagctccacttgaataataacgagctgaagattctgcgtgccgatacctttctggggatcgagaacctggagtatctccaggccgactacaacctcatcaaatacattgaacggggagctttcaacaaactccacaagcttaaggtgctcatcctgaacgacaacctgatttctttcctgccagacaacatttttagatttgcatccctgactcacctagacatcagaggtaaccgcattcaaaagctcccttatataggcgttcttgaacacatcggacgagtggtggagctccagctggaagataatccctggaattgctcctgtgatttactgcctctgaaggcttggctggaaaacatgccatacaacatttatatcggcgaagccatctgtgagacaccatctgacttgtatggaaggctgttaaaagagaccaataaacaggagctgtgtccaatgggaaccggtagcgatttcgacgttcgaatattgcccccttcgcagttggagaacggatatacaactccaaatggccacaccactcagactagtctgcaccgattagttacaaaacctcctaaaactacaaatccgtctaagatcagtggcatagtagcagggaaagcacttagtaaccgtaacctttctcagatagtctcttaccagacacgggtgcctcctctaacaccgtgtccggctccttgtttctgtaagactcacccttcagatttaggtttgtctgtgaactgtcaggagaaaaatattcaatctatgagcgagctgatacctaaaccgttgaacgccaagaagctgcacgtcaatggaaacagcatcaaagatgtggacgtgtccgatttcaccgattttgagggccttgatctgctgcatctgggaagcaaccagataaccgttattaagggagatgtgtttcacaatcttacgaatctgcgacgactttacctgaatggaaatcagatcgagcgcctctacccagagatcttttccggtctccataatctccaatatctgtacctggagtacaacctaattaaggaaatatctgccgggacctttgactccatgcctaatctccagctcctgtacttgaacaacaatctcctgaagagcctgccggtgtacatttttagtggcgctcccttggcccgccttaatcttaggaataacaaatttatgtatttgcctgtatcaggcgtcctggatcagctccagtccttgacacagattgacctggaaggtaacccgtgggactgcacttgcgatcttgtcgcattaaagttatgggttgagaaattgagcgacgggatagtggtgaaggaacttaagtgcgagacccctgtacagttcgctaatatagaacttaagagcctgaaaaacgagatcctctgccccaaactcttaaacaaaccctctgccccgttcacttctcccgcgcctgccatcaccttcactacacccctcggaccaattcgcagcccaccgggtggtcccgtacccctttctattctcatcctctccatattagtggttttaatacttacagtgttcgtcgcattttgccttctcgtctttgtcctgaggaggaacaaaaagccaactgtgaagcacgaaggtcttggaaatcctgactgtggcagcatgcagctgcagctgagaaagcacgaccataagactaacaaaaaagacggattatcaactgaagcttttattccccaaaccattgaacaaatgtccaagtcacacacctgcggactgaaggagtccgaaaccggctttatgtttagtgatccgccggggcagaaggtggtcatgagaaatgtagcagataaggagaaggatctgctgcatgtcgacaccagaaagcggttgtctactatcgatgaacttgatgagctgttcccatcacgcgatagtaatgtgtttatccagaattttcttgaatctaagaaggaatataactccattggagtttccggcttcgaaattcggtatccggagaaacaacctgataagaagagcaagaagagcttgatcggagggaatcattccaagatcgttgtggagcagcgcaaatctgagtacttcgagctgaaagcaaagttgcagagctcccccgactaccttcaggtccttgaggagcagaccgccctcaacaaaatatag

SEQ ID NO: 134512 - DNA, 2877 bp, synthetic construct
  misc_feature 1..2877: note = Description of Artificial Sequence: Synthetic coding sequence
  source 1..2877: mol_type = other DNA
atgcacacgtgctgcccccccgttaccctggagcaggacctccacagaaaaatgcactcatggatgctgcagaccctggcctttgcagtcacatcgttggtgctctcttgcgcggaaacaattgattactatggagagatttgtgacaatgcctgcccctgtgaagaaaaggatgggatcctgacagtcagctgcgagaataggggaattatctcgctaagcgaaatcagtcccccacgattcccgatatatcatcttttgctctcagggaacctgctgaacaggctgtacccaaacgaattcgtgaattacaccggcgcgtctatattacatttaggttccaacgtgatccaggatatcgaaaccggcgctttccacggactgcgcggactgcgtagactccaccttaacaacaacaaattagaactacttcgggacgatactttcctgggcctcgagaatttggaatacctgcaggtggactacaattacatcagcgtgatcgaacctaatgcatttgggaagctccacctgttgcaggtattgatacttaatgacaatctactcagctcactgcccaataatctgttcaggttcgtgccccttacccatctcgacctcaggggaaacagactgaagcttctcccttacgtcggcctcttgcagcacatggataaggtggtggaattgcagctggaggaaaatccatggaattgcagttgtgagcttatttctttaaaggactggctggatagtatttcatactccgccttggttggtgacgtggtctgcgaaaccccatttcgcttgcacgggcgcgaccttgacgaggtttcaaaacaggaattatgtcctaggcgtctgatttccgactatgaaatgaggcctcagacgcctctgtccacaaccgggtatctgcacacaacccccgcttccgtgaatagtgtcgctacatcatccagtgccgtgtataaacccccactcaagcctccaaagggcaccagacagccaaacaaaccacgggtgcgcccgacttctagacaacccagcaaagacctgggttactccaactacgggccaagcatcgcttaccaaactaaaagcccagtacctctggagtgtcccaccgcttgttcatgcaatctgcaaatttccgatttgggtttaaatgtgaattgccaggagaggaagatcgaaagcatcgctgagttacagcctaaaccatacaaccctaagaaaatgtaccttacggagaactacatcgcggtggtgcggcggaccgacttcctagaagcgactggtctggatttgcttcatttggggaacaatcgcatatctatgatccaggatcgcgcctttggggatctgaccaatctgcgacgtttatatttgaacggcaaccggattgaaagattgtctcctgagctgttctacgggttgcaatcactgcaatatctgttcctccagtataatctgatccgggaaatccagtctggcacattcgatccagtacccaacctacaattgctgtttttgaacaataacctcttgcaggccatgccttcgggggtgttctcaggccttactcttctgaggcttaacctgcgatctaatcatttcaccagtctgcccgtctcaggggtactggaccagctgaagtccttgattcagatcgacctacacgacaacccctgggattgtacctgtgatattgtggggatgaagctgtgggtcgagcagctgaaggtaggcgtgcttgtggatgaagtgatctgtaaggcccccaagaaattcgcagaaactgatatgcgctcgatcaagagcgagctgctgtgcccagattatagcgacgtggtcgtgtcaacgcccacgccaagcagcatacaggtgcccgctcgcacatccgcagtcacccccgcagtgaggttaaacagcacaggcgcccccgccagcctgggtgccggcgggggagcatctagtgttcctcttagtgttcttatcttgtccctcctgcttgtatttattatgtctgtgtttgtggccgccgggttgttcgtgctggtgatgaagcgcaggaagaaaaaccagtccgaccatacctcgaccaataattctgacgtgtcttcatttaatatgcagtattccgtctacgggggagggggtggaaccgggggccacccacatgctcatgtgcaccatagaggcccggcgcttcccaaagtaaagacccctgcggggcacgtatacgaatacattcctcaccctcttggccatatgtgtaaaaacccaatttaccgctcccgggagggcaactccgttgaggactataaagacctgcacgagctgaaggtgacctactcctctaaccatcacttgcagcagcaacagcaaccgccaccccctcctcaacagccccagcagcagccacctccccagcttcagttacagcctggcgaagaagaaaggcgagaatcacaccacctgagatctcccgcttactcagttagtacgatagagccacgcgaagatctgctctccccagtacaggatgccgatagattctacagaggaatcttggaacccgacaagcactgtagcacaacgcctgccggcaattcccttcctgagtaccccaagtttccatgttctcccgcagcttatacattctctcctaactatgatttgcgacgcccgcatcagtatctgcatccgggggccggcgacagcagacttagagagccagtgctatatagtccacctagtgctgtgtttgtcgagcctaatagaaatgaatatctggagttgaaggctaagctgaacgtagagcctgattacctggaagtcttagaaaagcagaccaccttctcacagttctag

SEQ ID NO: 134513 - DNA, 2154 bp, synthetic construct
  misc_feature 1..2154: note = Description of Artificial Sequence: Synthetic coding sequence
  source 1..2154: mol_type = other DNA
atgggagctggcaaacatcgggaaggaggcgggggggatcccacctccctgaacgggtgtgcagatctaatccaaaggcggactgagatcagcagggatcttgatgaggttagcaaacaggagctttgcccgcgcaggctcatcagcgattacgagatgcggccgcagaccccactgtccactactggttacctccacactactccagccagtgtgaacagcgtcgctacctcatcttctgcggtctacaaacctccactgaagcctcccaagggcacacggcagccaaataaacctcgcgtcagacctaccagcagacagccgtctaaggacctgggttactccaactatgggccttcaatagcctaccaaacaaaatctccagtacctttggaatgtcctactgcctgcagttgtaatcttcagatttctgatctgggtctcaacgtaaactgccaggagcgtaaaattgagtctattgcagaactccagcctaaaccttacaaccccaagaaaatgtatctaaccgagaattacatagccgtcgttaggagaaccgactttctggaggccaccggtttagacctgttgcatttaggaaataaccgtatatcaatgatacaggatcgtgctttcggggacctgaccaatctgagaagactgtacctcaacggtaatcgaatcgagcggttgtccccggaactattttatggcttgcaatccttgcagtatctatttcttcagtacaatctcattcgcgagatccagagcggcacctttgatccagtgcccaacctgcaactactgttcctgaataacaatctcttgcaagctatgccatctggcgtgttctctggactgacacttttgcgcctgaacctgaggagcaatcacttcacgtcgttgcccgtgtcaggagtgctcgaccaattgaaatctttgatccaaatcgatctgcacgacaacccttgggactgcacatgcgacattgttggtatgaaactgtgggttgaacagttaaaagtcggagttctcgtggacgaggtgatctgtaaagcccctaaaaaatttgctgagacagacatgcgcagcattaagtcggagttactgtgccccgactatagtgacgttgtagtgtccactcccactccttcatcgatacaggtgcctgcaagaacttcagccgtcacgcccgccgtacggctgaactcaaccggggcgcctgcctctctgggcgccgggggaggagcctcgtcagtgcccctttccgttctgatactgtcactcctgctggtgtttattatgtctgtcttcgtggccgctggattgtttgttcttgtgatgaagaggaggaagaagaaccaaagcgatcatacaagcaccaacaactctgacgtttccagctttaatatgcagtactcagtttacggcggaggagggggcaccgggggacacccccacgctcatgtgcaccataggggtcctgctctgcctaaggtaaagacgcccgctggccatgtgtacgagtacataccgcatcccctcggccatatgtgtaaaaaccccatctacagatcgagggaggggaactcagttgaagactacaaagacctgcacgagctcaaagtcacctactcatctaatcatcacttgcaacagcaacagcagccaccccccccgccccagcagcctcaacagcaacccccccctcagttacagttgcaacccggggaggaggaaagacgggagagccatcacctcaggtctcccgcctacagcgtgagtacaattgaaccacgtgaagatctgttgagccctgtccaggatgctgatcgcttctaccgcgggatactcgagcccgataaacactgcagtaccactccggctggaaactcgctcccggaataccctaagttcccatgcagccctgcggcctacacattctcaccaaattatgatctgagacgcccgcatcagtacctgcatccaggcgcaggtgattccaggctacgtgagcccgtgctctactcccctccatctgcagtgttcgtggagcctaaccggaatgaatacctggagcttaaagctaagctgaatgtcgagcccgactatctcgaggtgctggagaaacaaacaactttttctcaattttag

SEQ ID NO: 134514 - DNA, 2526 bp, synthetic construct
  misc_feature 1..2526: note = Description of Artificial Sequence: Synthetic coding sequence
  source 1..2526: mol_type = other DNA
atgaaactgtggatccacttgttttattcatccctcttggcatgtatcagtctccatagtcagaccccagtcctgtcttcacgcggctcatgtgattccctctgcaactgcgaggagaaggacggtaccatgcttataaattgcgaagccaagggtataaaaatggtcagcgagattagtgtcccaccatcccggccatttcaactgtcacttctaaacaatggactcactatgctgcacactaacgacttctctgggctgaccaatgccatttccatacacctgggattcaacaacattgcggatatagagattggcgccttcaacggtcttggcctgctgaaacaactccatattaatcataatagcctcgagatcctcaaggaagacaccttccacggtttggagaacctggaatttttacaggctgacaataactttatcactgtgattgaaccatcagctttctctaaactcaatcgcctgaaagttctcatcctgaatgacaacgcaatcgagtcattgcctcctaacatatttcgattcgtcccactaacacacctggacttaagaggaaatcaactgcagacactgccttacgtggggtttctggagcatatcgggaggatattggatctgcagttggaggataataagtgggcttgtaattgtgatttgctacagttgaagacttggctggagaatatgccaccccagtcaattatcggtgacgtggtgtgcaatagtcccccgtttttcaaagggagtatactgtctaggttaaagaaagaatccatctgcccaacaccccccgtctatgaggaacatgaagacccgtccggcagcctgcacctcgccgcaacatctagtattaatgattctcggatgagtaccaagaccacttccatactcaaattaccgactaaggctccgggactaatcccgtatatcactaagccttcaacacagttaccaggcccttattgtccaataccatgtaactgtaaggtgctgtctccatcgggtctgctgatccactgtcaggaacggaacatcgagagcctgtccgacctgaggccaccacctcagaacccgcggaaactgattctggcaggtaatattattcacagcctgatgaaatcagatcttgtcgaatactttaccttagagatgctgcatctaggtaataatcgcatcgaggtgctagaggaagggagctttatgaatctaacacgcctccagaagctgtatttgaacggtaatcacctcactaaactttcgaagggcatgtttctggggttgcataacctcgaatatctctacctcgaatataacgcaatcaaggaaatcctgcccggcactttcaacccaatgcccaagttgaaagtgctttatctgaacaacaatctacttcaagtcctgcccccccacatattctccggcgtacctctgacaaaggtgaacctgaaaaccaaccagtttacacacttgcccgtgtccaatatcctggacgatctggacctgctaacccaaattgatcttgaagataatccgtgggattgctcctgcgatctcgtgggcctacagcagtggatccagaagctaagcaaaaacacagttacagatgacattctgtgcaccagtccgggccatctggataagaaggaactcaaggccttaaactcagaaatcctgtgtccggggctcgtcaataatcccagcatgcccacgcagacaagttatctcatggtgaccacgcccgcaaccaccacgaacacagcggacacaatccttagatcactcacggatgctgtacctctgagcgtgctcatcttaggtttactaattatgttcattacaattgtgttctgtgcggccgggatagtggtgttggtactacatcgacggaggaggtacaaaaagaaacaagtcgacgaacagatgcgggataacagcccagtgcacctgcagtacagcatgtacggtcacaaaaccactcaccacaccacggagcgccctagtgcatcactgtacgaacagcacatggtgtctcccatggtccacgtgtacaggagcccttctttcggccctaaacacctggaagaggaagaggaacgaaacgaaaaggaaggcagcgacgcgaagcacttgcagcgcagtctgctcgaacaggaaaatcattctccccttacaggaagcaacatgaagtacaaaacaactaaccagtccacggagtttctatcctttcaggatgctagttcgctgtatcgcaacattttggagaaggagagggagttacagcaactcgggattaccgaatatctgcgcaagaatatcgcgcagcttcaacccgacatggaagcccactatccgggggctcatgaggagctgaaattgatggagacgctgatgtacagtagaccacgcaaggtgctcgtagagcaaactaaaaatgagtacttcgaattaaaagctaatctgcacgcagagcccgactatcttgaggtgctggaacagcagacctag

SEQ ID NO: 134515 - DNA, 4578 bp, synthetic construct
  misc_feature 1..4578: note = Description of Artificial Sequence: Synthetic coding sequence
  source 1..4578: mol_type = other DNA
atgaggggcgtgggctggcaaatgttatccctaagcttgggattggtgctggctattctgaacaaggtggcgccacaggcgtgccccgcacagtgttcatgctccggttcaacagtggactgccacggactagctctgaggtctgtccccagaaatattccacggaataccgagaggcttgatctcaatggcaacaatattacacgaataaccaaaacagatttcgctggactgcggcatctgagagtgctgcaactaatggaaaacaagatctctaccattgaaaggggggcatttcaggacctgaaggagctcgaaagactgaggcttaaccggaatcacctgcagctcttccccgagcttctgttcctcgggacagctaagctgtacagattggatctgtccgaaaatcagatccaagctatccctaggaaggccttccgtggtgctgttgatatcaaaaacctgcagctcgattacaaccagatttcgtgtatcgaggatggcgcatttagagccttgagggacctggaggtactcacgttgaacaacaataatattactcgtttaagtgtggctagctttaatcacatgccgaagcttaggacctttagattgcatagcaacaacctctattgtgactgtcacctcgcatggctgtccgactggctgaggcaaaggccccgggtcggcctatacacccagtgtatgggcccctcacacctgcgcggccacaatgtagccgaagtccagaaaagagaattcgtgtgctctgggaagggcgaaggtcatcagagtttcatggccccatcttgctcagtcctccactgtccggccgcttgcacatgttcaaataacatcgtagattgtcgcggcaagggtctgacagaaatccctacaaacttgcccgagaccatcactgaaatccgcctcgagcagaacactattaaggtcattccacctggcgcgttctccccttataagaaactgcgccgcatcgatctatcgaacaatcagatatcagaactggcgccagatgcttttcaggggctgcgaagcttaaattctttggttctgtatggaaacaaaatcactgagcttcccaagtcactcttcgaggggctgttctctcttcagcttctcctgcttaacgcgaataaaatcaattgtttgcgcgtagatgcattccaagacctgcataatctgaacttactgtccctatatgataacaagctacaaacaatcgccaagggcacatttagtcctctgagggctattcagacgatgcatttggcacagaatcccttcatctgtgattgccacctaaaatggctggctgattacttacataccaacccaatcgaaacttctggcgccaggtgcacgtcaccccgcaggcttgccaataaaaggatcgggcagattaagtctaagaagtttagatgcagtggcacagaggattatcgttctaaactgagcggcgactgctttgctgatttggcgtgtccagaaaagtgtagatgcgagggcacaactgtggattgttctaaccaaaaactaaacaagatcccggagcacataccacaatataccgctgagctcagactgaacaataatgaattcaccgtgttagaggctactggaattttcaagaaattaccacagttgaggaagatcaatttctcaaacaataaaatcacagacatcgaggagggagccttcgaaggtgctagcggggttaatgagatactcttgacgagtaaccggcttgaaaacgtccaacataagatgttcaaaggcctggaatcactgaagaccttgatgctacgctctaaccggattacctgcgttgggaacgactcttttatcggtctgtcaagcgttaggctgctttccctttacgacaatcagataacaactgtagcacctggtgccttcgataccctgcactccctcagtaccctgaacctgttagccaaccctttcaattgcaactgctatctggcatggctgggcgagtggctgagaaagaagagaatagtgacaggcaaccctaggtgccagaaaccctatttcctaaaggagatccccatccaggacgtcgctattcaggatttcacatgtgacgacgggaatgacgacaattcttgcagccccctgtcacggtgtcccacggaatgcacctgcctggacacagtggtaagatgctccaataaaggcctgaaagtgctccctaaaggcattccccgggacgtcacagaactctatttagacggaaaccagtttactctcgtgcccaaggagttaagtaactacaaacatcttacgctgattgacctcagtaacaaccgcatttctacgctctcaaaccagtctttcagtaatatgacacagcttctcacactcatcctatcttacaatcgcctcaggtgcattccccctcgcacgttcgacggcctaaagagtctgaggctcctctctctgcatggcaatgacatttcagttgtccccgagggggcatttaacgatctctccgctttgtctcacctggcgatcggagctaatccactctactgtgattgcaatatgcagtggctatcagattgggtaaaatctgagtataaagagcctgggattgctcggtgtgctggcccaggcgaaatggctgataaactccttctgacaaccccttcaaaaaagtttacctgccagggccctgttgacgtaaacattctggccaagtgtaacccgtgcctcagtaacccttgtaagaacgacggcacctgcaacagcgaccccgtggatttctaccggtgcacatgcccctatggatttaaggggcaggattgcgatgtccccatacatgcctgcatttcaaatccctgcaaacatgggggtacttgccacttgaaggaaggggaagaagatggattctggtgtatatgcgcagacggcttcgaaggggagaactgtgaagtgaatgtggatgattgcgaggataacgattgcgaaaataactcgacatgtgtggacggcattaacaattacacttgtctttgtccccctgagtacactggcgaattatgcgaggaaaagcttgacttttgtgcacaggacctaaacccctgtcaacacgatagcaagtgtattctgactcctaaaggcttcaaatgtgattgcaccccagggtatgtgggggaacattgtgacatcgacttcgacgattgtcaagataacaagtgcaaaaatggtgcccactgcaccgatgccgtgaacggatacacttgtatatgtccagaaggatattcaggcttgttttgcgaattctccccacctatggtgcttccccgtacttcaccctgcgacaattttgactgccaaaatggcgcacaatgtattgttaggatcaatgaaccaatctgccagtgtctgcctggctatcaaggtgaaaaatgtgaaaagctggtgtcagtaaactttatcaacaaggagtcctatctccaaatcccttctgctaaagtgcgaccccagacgaatatcacccttcaaatcgcaaccgatgaagacagcggtatacttctttacaaaggggacaaagaccacatcgctgtggagctgtatagaggacgcgttagagcgagttatgataccgggtcacaccccgccagtgccatatattcagtggagacgatcaacgacgggaactttcatattgtcgaactcctggcactggaccagtcactctctctctctgtggatggcggcaatcctaagataatcaccaacttatcaaagcagtctactctaaatttcgactccccactctacgtcggaggtatgcctgggaagtcaaacgtagcaagtctgcgtcaggcacccggccagaacggcacaagttttcacggctgtataaggaacctgtatatcaattcggagttacaggactttcaaaaggtgcccatgcagacaggaatactgccaggatgcgagccgtgtcacaaaaaggtgtgcgcccatggaacttgccagccttccagtcaggccggtttcacatgcgaatgccaggagggatggatgggacctctgtgtgaccagcggaccaacgacccttgtttggggaacaaatgcgtgcacggtacgtgccttccaattaacgcgttttcgtattcttgtaagtgtctagagggccacggaggtgttctctgtgacgaggaggaagaccttttcaacccctgtcaggcaatcaagtgtaagcacggaaaatgtagactgagcggactggggcagccttactgcgagtgcagcagcggctatactggtgatagctgcgaccgagagatctcctgtagaggagagcggatacgggactactaccaaaagcagcagggctacgctgcctgtcaaactactaagaaggtctccagactggaatgtagaggcggctgcgctgggggtcagtgctgtggccccctgagatccaagagacgcaaatattctttcgagtgtacagacggtagtagcttcgttgatgaggtcgagaaggtggtcaaatgtgggtgtaccagatgtgttagctag

SEQ ID NO: 134516 - DNA, 4566 bp, synthetic construct
  misc_feature 1..4566: note = Description of Artificial Sequence: Synthetic coding sequence
  source 1..4566: mol_type = other DNA
atgcgcggcgtgggttggcagatgctctcacttagtctgggacttgtgcttgctattttaaacaaagtggcccctcaggcatgcccagctcagtgctcatgctctgggtcaacagtcgattgtcacggccttgctcttaggtctgtacctcgaaacatccctaggaatacagagcggctggacctgaatgggaacaatataacacgcataaccaagacagattttgccggcctccgccacctgagggtgttacagctcatggaaaataagatcagcactatcgaaaggggggccttccaggaccttaaggaactggagcgtttgcgcctgaatcggaaccatcttcagctgtttcccgagttattgtttttggggacagcaaagctctaccggctggatctttcggaaaaccagatccaggcgattccacggaaggcctttcgaggagccgtcgacattaaaaacctgcagctggactacaaccaaatctcttgcatcgaggatggcgcatttagagccctaagggacctggaagtgctgaccctcaacaacaacaacattaccagactctccgtcgcttcgtttaaccatatgccaaagctcaggaccttccgactacacagtaacaacctttactgtgactgtcatcttgcctggctgtctgactggctcaggcagcgacccagggtaggactatacacccaatgcatgggcccatcacatctgagaggacacaatgtggcagaggtgcaaaagcgggaattcgtgtgttccgggcatcagagcttcatggctcctagctgtagcgttctccactgccccgccgcctgcacatgtagcaataacatcgtagattgcaggggtaaaggtctaacagagatccccaccaatttgccagagactataacagaaatacgactggaacagaacacgataaaggtgattccgccgggcgccttctcgccatacaagaaactgaggcgaatagatctgagcaacaaccaaattagtgaactcgctcccgacgccttccaaggccttaggagtctgaactccctcgttctgtacggtaacaagattacagagctcccaaaaagtctttttgagggactgttcagtcttcagttgttactgctgaacgcaaataaaattaattgtctcagagtcgatgcatttcaggatctgcacaatttaaacctactctcactatatgataacaaactccagacaattgctaaaggtacattcagccctttacgggcgatccagaccatgcacttagctcaaaaccccttcatctgcgactgccacctaaaatggctagccgactaccttcacaccaatccaatagaaacaagtggagcacggtgtacatcgccacgcaggctggctaacaaacggatagggcagattaagagtaagaagttcaggtgcagtggaactgaggactatagatccaaactttcaggcgactgctttgccgatctagcatgccctgagaagtgccgctgcgagggtaccacggtggattgttctaatcagaaattgaacaagattcctgaacacattccacagtacaccgcggagctgcgcctgaacaacaacgagtttaccgtcttggaggccactggcatctttaagaagctcccccaactgaggaaaatcaacttctctaataataagatcaccgacatcgaagaaggcgccttcgagggagcaagcggagttaacgaaattctgctcacgagcaaccgtctggagaatgtgcagcataaaatgtttaagggcttagagtccttaaagacattgatgctgaggagcaatcgaattacttgcgtcggcaacgactccttcattggcctgtcatccgtgcgtctgctaagcctctacgataaccagattacaaccgtagcaccaggagcttttgatacactgcacagcctgagtactctgaacctgttggccaatccatttaactgtaactgttacctcgcctggcttggcgagtggttgcgtaaaaagcgtatcgtgactggaaatccccgctgccaaaagccctacttcttgaaagagattcctatccaggatgtcgccatccaggatttcacctgcgatgacgggaatgatgacaattcctgctccccgctgtcacggtgtccaactgaatgtacatgccttgacaccgtggttcgttgctccaataaagggttgaaggtgctccccaaaggtattccacgcgatgtcacagaattgtatctggatggaaatcaattcacactagttccgaaggaactgtccaactacaagcacctgacacttattgatcttagtaacaaccgcatcagcaccctctctaatcaaagtttctctaatatgacacaactgctcaccctgattctctcttataataggttgaggtgcatcccacctcgaaccttcgatggcctcaaatctctgcggctgctgtcattgcatgggaatgacatctctgtggtcccagaaggcgcgttcaatgacctgagcgccctgagtcaccttgcaatcggagcaaatccgctttactgcgattgtaacatgcagtggttgtcagactgggtgaaaagtgaatataaagaacctggcattgctcgttgcgctgggccgggtgagatggccgacaaacttctcttgacaacgccctcgaagaaattcacgtgccaggggcctgtagatgtcaatatccttgctaagtgtaacccctgtctgtccaatccctgtaagaacgacggaacttgtaattccgaccctgtggatttctataggtgtacctgcccttacggctttaaagggcaggactgcgatgtgcccatccatgcatgcattagtaatccatgtaaacatggcggcacgtgtcacctgaaggaaggggaggaggacggtttctggtgtatctgcgctgacgggtttgaaggcgagaattgtgaagtcaatgtggacgactgtgaggacaacgactgcgaaaacaattcaacctgtgtggatggaataaataactatacctgtttatgccctcctgaatacacaggggagctttgtgaggagaagctggacttttgcgcacaggatcttaacccttgccagcatgattctaaatgtatcctgaccccgaaggggtttaagtgcgattgcacgcctggttacgtgggagaacactgcgacatcgatttcgacgactgccaggacaataagtgcaaaaacggcgctcattgtacagatgccgtgaacggatacacttgtatctgccctgaaggatactctggcctgttttgcgagttcagtcctcctatggtactccctaggacttcaccatgcgacaactttgactgtcaaaacggcgcccagtgcatcgtccggatcaatgagccaatctgtcaatgtctcccgggatatcagggggagaaatgcgagaagctggtttcagtgaatttcatcaataaagagtcttacctgcagattccctctgccaaggtacgcccacagacgaacattaccctgcagatcgccaccgacgaagattccggtatacttctgtataaaggagataaagaccacattgcagtcgagctctacagagggcgtgtaagagcgtcctacgacaccggttcccaccccgcgtccgcgatctactccgtggaaacaattaatgatggtaactttcatatcgtggaactgttagcactggatcagtctctgagtctcagcgtggatggaggaaatcccaaaatcatcacgaatctcagcaaacagagcaccttgaacttcgattctcccctgtacgtaggcggtatgcctggcaaatcgaatgtggcatccttaagacaggccccaggacaaaacggaaccagcttccacggatgcattcggaatctgtatatcaatagtgaattgcaagatttccagaaagtcccgatgcaaacagggatactgccaggatgtgagccttgccataaaaaagtgtgtgcccatggcacctgccaaccatcctcgcaggccggatttacgtgcgagtgtcaggaagggtggatgggtccactgtgcgaccagagaaccaacgatccatgcttgggcaacaaatgcgtacacgggacatgcctccctattaacgcgttcagctacagctgcaaatgcttggagggccacggcggggtgttgtgcgacgaagaagaggatctatttaacccctgtcaagccattaagtgcaaacacgggaagtgtagactttcaggtctgggacaaccttactgcgagtgctcttctggctatactggagactcttgcgacagggaaataagctgtcggggcgagcggatcagggattactaccagaagcagcaaggatacgccgcctgccagacaactaagaaggtgtcacgtttagagtgccgaggcggctgcgcgggaggtcagtgctgtgggcccctacgaagtaaaagaagaaagtacagcttcgagtgtactgacggtagttcatttgtggacgaagtcgagaaggttgtcaaatgcggctgcaccagatgcgtgtcatag

SEQ ID NO: 134517 - DNA, 4578 bp, synthetic construct
  misc_feature 1..4578: note = Description of Artificial Sequence: Synthetic coding sequence
  source 1..4578: mol_type = other DNA
atgcgaggcgtcggttggcagatgttgagcctgagtttaggtctggttctggccattctgaataaggtggcgccacaagcctgtccggcacagtgttcctgcagcgggtctacagtggattgccatgggcttgctctcaggagcgtcccaagaaatatccccagaaataccgagagactcgacctcaatggcaataacatcactcggatcacaaaaacagactttgcgggccttcgccacttacgggtgctccaactgatggagaataagataagcactattgaacggggtgcctttcaggatctgaaagaactagaacgcctacggctgaaccgcaaccatctgcagctgttcccggaactcctcttcctcggaacagcaaaactttacagactcgatctttctgaaaaccagattcaagcaattccacgcaaagcctttcggggggctgtcgatattaaaaatttacagttagattataatcagatttcttgtatcgaagatggagccttcagggccctgagggacctggaggtccttaccctgaataacaataacatcacaaggttaagtgtggcatccttcaatcacatgcctaagctgcggaccttccggctgcacagtaataacctgtactgtgactgtcatttagcatggctttcggattggttgcgccaaagaccacgggtgggactctacacgcagtgcatgggcccttcgcatctgcgaggccacaatgtcgctgaagtccaaaagcgggaatttgtgtgcagcgacgaggaggagggtcaccagagcttcatggctccaagttgtagcgtcctgcattgccccgcagcttgcacctgttctaataacattgtagactgtcggggcaaaggtctgaccgaaatacccacgaatttacccgaaactattacagagatcaggctggaacaaaatacaatcaaggtgattccacccggagctttttctccttacaagaaacttcgaagaatcgacttgagtaacaaccagataagtgagctggcccccgacgcgtttcagggccttaggtcactgaattctctagtgctgtacggcaacaagattacagagctgccaaagtcgctttttgagggcctgttctcactgcaacttctgttactcaacgccaataaaatcaattgtctccgagtagatgccttccaggacctgcacaatctcaatctgctaagtttgtatgacaacaaactacagactatcgcaaaaggaaccttctcccccctccgggccatccaaacaatgcatttggcacagaatcctttcatctgcgactgccacctgaagtggctggcagattatctacacacaaaccccatcgagacttctggggcccggtgcacaagccctagacgccttgcaaacaagagaattggtcagatcaagagcaagaagttcaggtgtagcggcacggaagattatcgcagtaagctgtcgggggattgctttgctgacttagcctgtcctgaaaagtgccgatgcgagggtaccacggttgactgtagcaatcaaaagctgaacaaaataccagagcacataccccagtacaccgcagagctgaggctgaacaataacgagtttaccgtgctggaagcaactggcatctttaagaagcttccacagctccggaaaattaacttctccaataacaaaattacagatatagaggaaggtgcgttcgaaggcgcgtctggtgtgaacgagatcctgttgaccagtaatcgattggagaacgtgcagcacaaaatgtttaagggcctagaaagccttaagacactcatgcttcggtcaaacaggatcacatgcgtaggtaatgatagcttcataggccttagctctgtgcgcctgcttagtctttatgacaaccaaattacgaccgtagccccaggcgctttcgacacactgcacagtcttagcacccttaacctcctcgcaaacccttttaattgcaattgctatctggcatggttgggagagtggctcagaaaaaaaaggatcgtgaccggaaacccccgctgccagaaaccttacttcctgaaagagattccgatccaggatgtagccatccaggactttacctgcgatgacggcaatgacgataacagctgttcccccctctcgcgctgtcccacggaatgtacgtgcttggatactgtcgtgcgctgcagcaataaggggctgaaagtgttaccaaaggggataccgcgcgacgtgaccgagctgtatctggacgggaatcaatttaccctggtgcctaaagaattgagcaactataaacacctcacattgattgatctctccaacaaccgtatctccactctgtccaatcaatccttctcgaacatgacacagttactgaccctaatcctgagctacaatcgcctgagatgtattccccctaggacattcgatggcctcaaaagcctcagactgctgtcactgcatgggaacgatatttccgtggtgccagagggggctttcaatgacctgtccgcactgtctcatttggcaataggcgctaacccgctgtattgcgactgcaacatgcagtggctctctgactgggtgaagtcagagtacaaagaaccaggcatcgcccgctgtgctgggcctggcgagatggctgataagttgttgctgacgactcccagtaaaaaatttacatgtcagggccccgtggacgtcaatattttagctaaatgcaatccatgtctgtccaatccttgtaaaaacgatggcacctgcaacagcgaccccgtcgatttctatcgatgcacttgcccttacgggtttaagggacaggactgtgacgtgccaatccacgcctgcatctctaacccgtgcaagcatggagggacttgtcacctgaaggagggcgaggaggacgggttctggtgcatatgtgccgacggattcgaaggtgagaactgtgaagttaatgtggatgactgtgaagataacgattgtgaaaataatagtacttgcgtcgacgggatcaataactacacatgcttatgcccaccggagtacacgggggaactttgcgaggagaaactggacttctgcgctcaggatctcaatccttgccagcatgattccaaatgtatattgaccccgaagggcttcaaatgcgactgcactccaggctacgtaggagagcactgcgatattgactttgatgattgtcaagacaacaaatgtaaaaacggggcccactgtacagatgccgttaacggatacacctgtatatgtcccgagggctatagcgggctgttctgtgaattttctcctcccatggtcctgccaaggacatccccttgcgacaattttgactgtcagaatggggctcaatgcatcgtgagaatcaatgaacccatatgtcaatgtcttccaggctatcagggcgagaagtgcgaaaaactggtcagcgtcaatttcattaacaaggagagttatctccaaattccctcagccaaggtgaggcctcagacaaatataacgttacagatcgccaccgacgaggatagtggaatcttactgtacaaaggcgacaaagaccatattgccgttgaactgtaccgcgggcgtgtgcgggcaagctatgacacgggttctcatccggcatctgccatctattctgtggaaactatcaacgacggaaactttcacattgtagaactacttgcactggaccagagcctaagcctgagcgttgacggaggcaaccctaagataataaccaatctgtccaagcagtctaccctcaactttgactcgcctctgtatgtaggcggaatgccaggaaaaagcaacgtcgcctccttgcgccaagctccaggccaaaacgggacttctttccacggatgcatccgaaatctgtatatcaacagtgaactgcaagattttcagaaagtacccatgcagacagggatactgcccggctgtgaaccttgtcacaagaaggtctgtgcacatggaacctgtcaaccatccagccaggccggcttcacgtgcgaatgccaagagggctggatgggccccctatgcgaccagagaacgaacgatccctgcttgggaaataagtgcgtccacggtacgtgtctgcctatcaatgcgttttcctattcttgcaaatgtctagagggccacggaggcgtgctgtgcgatgaggaagaagatctgtttaatccttgccaggctatcaagtgtaaacacgggaagtgcagactgtctggattaggccaaccatactgcgaatgcagctccggctacacaggggattcctgtgatagagaaattagctgcagaggtgagcgcataagggactattatcaaaaacaacagggatacgcggcatgccaaactactaagaaggtgtctcgcctcgagtgtcgaggaggctgtgctggcgggcaatgttgcggtccccttaggtccaaaagacgtaagtattcattcgaatgcaccgatggaagtagctttgtggatgaggtggagaaagttgtcaagtgcgggtgcacaaggtgcgtatcttag

SEQ ID NO: 134518 - DNA, 4590 bp, synthetic construct
  misc_feature 1..4590: note = Description of Artificial Sequence: Synthetic coding sequence
  source 1..4590: mol_type = other DNA
atgcgcggagtcggatggcaaatgctgtccttaagcctggggttagtcctggctatcctcaataaagtggcaccccaggcctgtcctgctcagtgtagttgctctgggtcaacagtggattgtcatgggctcgcgctgcgttccgtgccacggaatattccgaggaacacagaacggttagatttgaacggcaataatatcacgcgcatcactaaaaccgactttgcgggattacggcacctccgcgttcttcagcttatggagaataaaatcagcacaatagagagaggcgctttccaggatcttaaagagttggaaagactgcgactgaacaggaatcatctccaattgtttccggaactcctctttctggggactgccaaactgtatagactggatttgagtgaaaaccaaatacaggccatccctaggaaggcctttcggggagccgtggacatcaagaacctccaattggattacaaccaaattagctgcattgaggatggggcattccgtgcattgcgagatcttgaagttttgaccctgaacaacaataatataacacggctatctgtggcgagtttcaaccatatgcccaagctacggacctttcggctgcattccaataacctgtactgcgattgtcacttggcctggctgagtgattggctccgacagcgacctcgcgttggcctgtacacgcagtgcatggggccaagccacctgcgaggccacaatgttgctgaggtccagaaaagggagttcgtctgttctgggcatcagagtttcatggcaccctcctgctccgtgttgcactgcccagcagcatgtacttgttccaacaacatagttgactgcagaggcaaaggacttacagagattccaacaaacctcccagaaactattactgagattcgtctggagcagaacacaattaaagtgatcccaccaggcgcgttctccccatataagaagttgaggcgcatcgatctctctaataatcaaatatccgagctggcccccgatgccttccagggccttcgctcgctcaactctctcgtgctgtatggaaacaagatcacggagctgcccaagtctctctttgagggtctttttagtcttcaacttctattgctaaatgccaataaaatcaactgtctgagagtggacgctttccaggatctgcacaatctgaacctcttatctttgtatgataacaaattgcagaccatagctaagggaacttttagccccttgcgggctatccagacaatgcatttggctcaaaatccctttatttgcgattgtcacctgaagtggctggcggattatctgcacacaaacccaattgaaacttctggggcccggtgcacaagtccccggaggctcgcaaacaaacgcattggacagatcaaaagcaaaaaatttagatgctccgccaaagagcagtattttattcctggcacagaagattaccgaagcaagctttctggagactgctttgcggatctcgcctgtcctgaaaagtgtagatgcgaaggtaccacggtggattgctcaaatcagaagctcaataagattcccgaacatatcccccagtataccgccgagctcagactgaataacaacgagtttaccgtgctcgaggcaaccggtatctttaagaaattgcctcagctgcgcaaaattaacttttccaataacaaaatcaccgacatcgaagagggggcctttgaaggcgccagtggcgtcaatgagatcctcctcacctcgaaccggctcgaaaatgtccagcataagatgttcaaagggctggaatccttgaagactctgatgctgcgaagcaaccgcattacatgcgtgggaaacgactctttcatcggactaagcagcgtacgtctgctcagtctgtatgataatcagattaccaccgttgcaccaggtgctttcgatacattgcattccttatctactctcaacttgctggcaaatcccttcaattgcaactgctatctcgcctggctgggagaatggctaagaaagaagcggatagttacggggaacccccggtgtcaaaaaccctatttcctgaaggaaattccaatccaggatgtggccatccaggacttcacctgtgatgatggcaatgacgacaatagctgttctccactcagccgctgccctactgagtgcacctgtctcgacaccgtcgtgcgttgtagcaataaaggactaaaagtgctcccaaaaggcataccacgcgatgttacggagctgtacctcgatggcaaccagtttaccctggtccccaaagagctgtcaaattataagcaccttaccctgatagatttaagcaataatagaatctctaccctgagtaaccagtcattttcaaatatgacccagctcctgacattgatcctaagctacaaccggttgcgctgcattccccccagaaccttcgacgggctcaagtcgctccgactgttaagtctccacggaaacgatattagcgtggtccccgaaggcgcatttaatgacctctctgcactttcacatctggcaatcggggctaatccactgtactgcgattgcaacatgcaatggttgtctgactgggttaagagcgagtataaagagccaggaatagcccggtgtgccgggccaggtgaaatggccgataagctcttattaacaacaccgagcaagaaattcacatgccaaggtcctgttgatgtgaatatccttgccaagtgcaacccctgtctctccaacccttgcaagaatgatgggacctgcaattctgaccccgtggatttctatcggtgcacatgtccttacggtttcaaaggtcaagactgcgatgtgcccatacacgcctgcatctccaatccctgcaaacatggtggtacctgtcacttgaaggagggggaggaggacggattttggtgcatttgcgccgacggtttcgagggtgagaattgcgaggtgaatgtggatgactgtgaagacaatgattgcgagaataattccacttgcgttgacggaatcaataattatacctgtctgtgtccccccgaatacaccggtgagttgtgtgaggagaagttagatttctgcgcccaagacctgaatccttgccaacatgacagtaaatgtatcctgactccaaaaggcttcaagtgcgattgtacgcctggctacgtcggagagcactgtgatatcgacttcgatgattgtcaggacaacaaatgcaaaaacggcgctcattgcactgacgccgtaaacggttacacttgcatatgccccgaaggctacagtgggttgttttgcgaattctccccaccaatggtcctcccacgtaccagcccctgtgataacttcgactgccagaatggagcacaatgcattgtgcgcatcaacgagcccatctgtcaatgcctgccaggttaccagggggagaagtgtgaaaagctcgtgagcgttaatttcatcaataaggagtcctaccttcagatcccttccgcaaaggtgcgccctcaaaccaatatcaccctgcagatcgcgacggacgaggactcaggcatcctgttgtacaaaggggacaaagatcacatcgccgtggaattatacagagggagagtcagagcctcttacgacacaggatctcatcctgcatccgcaatttatagtgtggagacaataaacgatgggaacttccacatcgtagagttgttggccctcgatcagtccctgtccctctccgttgacggtggaaacccgaagattattaccaacctgagcaagcagtccactctgaatttcgattcaccactatatgtgggcggcatgccagggaaaagcaacgtggctagcttaaggcaagctccaggtcagaatggaacgtcattccatggctgcatccggaacctgtatatcaatagtgaactgcaagattttcaaaaagtcccaatgcagaccggtatcctgcccggctgcgagccttgccataaaaaagtctgcgctcacggaacgtgtcagccttcaagtcaagcaggttttacttgtgagtgccaggagggctggatgggtcccctttgtgaccagcgtacaaatgacccctgcttgggaaacaaatgtgtgcacggcacctgcctgccaataaatgcctttagctattcctgtaaatgtctggaaggacacggtggagtgctgtgtgatgaagaggaggatcttttcaatccatgccaggcaattaaatgtaaacacggcaagtgtagactttcgggtctcggccagccatattgtgaatgcagctctggatatacaggcgattcatgtgaccgcgagatatcatgccggggcgaaaggatcagggactactaccagaagcaacagggatatgctgcttgtcaaaccactaaaaaagtcagtcgtctcgagtgcagagggggatgcgccggggggcagtgctgcggtccgctccggagcaagagaaggaagtattccttcgaatgcactgacggcagcagcttcgtcgacgaggttgagaaagtcgtgaaatgtggatgtactaggtgcgtgtcctag

SEQ ID NO: 134519 - DNA, 4419 bp, synthetic construct
  misc_feature 1..4419: note = Description of Artificial Sequence: Synthetic coding sequence
  source 1..4419: mol_type = other DNA
atggctccggggtgggctggggtcggagcagcagtgagagcccggttggcactagccctcgcgcttgcatcagtgctcagcggacctccagccgttgcctgcccaactaaatgtacttgctcagctgcctcagtggactgtcacggccttggtctgagagctgtcccccgcggtattcctcgcaatgctgagcgcctagacttggatagaaataacatcactcgtattaccaagatggatttcgccggtctgaagaatctacgcgtactgcatcttgaggacaaccaggtttccgtcattgagcgcggcgcatttcaggacctcaaacagctggaaagactgcgccttaataagaataagctgcaagtactcccagaactgctgttccagagcacacccaagctgaccagactggacttgtccgaaaatcagatccagggcatccccaggaaagcatttcgtggcatcacagatgtaaagaatctgcaattggacaacaatcacataagctgcatcgaggacggcgcattccgcgccctcagggaccttgaaattcttacccttaacaataataatataagccggattctagtcacaagctttaaccatatgcccaagattagaaccctaagactacattcgaaccatttgtactgtgactgtcacttggcctggctctctgattggctgagacaacgccggacggtggggcagtttacactttgcatggccccagtccatttgcggggtttcaacgtggcagacgtgcagaaaaaagagtacgtctgtccggcgccacatagtgagcccccttcctgcaacgccaatagcatatcatgtccctccccttgcacatgctcaaacaatattgtagactgtcgcggcaagggactcatggagattcccgctaacctgccagagggaatagtggaaattcgcttggagcaaaactctatcaaggccatccccgcaggagcttttacgcagtataagaagctcaagcgaatcgatatctccaagaaccagattagtgatatcgcccccgacgccttccagggcctcaaatccttgacctcacttgtgctgtatggcaacaaaatcaccgaaatcgtgaagggactcttcgatggattggtgtcattacagctgttactgctcaatgctaacaaaatcaattgcctgcgtgtcaacaccttccaggacctgcagaacctgaatctgctttctctttacgacaataaactccagacaatcagcaaggggctgtttgcgcccctgcagtctatccagaccctccatctggctcagaacccattcgtgtgcgactgtcacctgaagtggctggccgattatttacaagacaatcctattgagacgagcggggctcggtgttccagtccgcgccgtctagcaaataagcgcatctcacagatcaagtccaaaaaattccgctgttctggaagcgaggactaccgttctcgtttctcgtccgagtgcttcatggacttagtttgcccggaaaagtgccgctgcgaggggaccattgtggattgcagcaaccagaagctagtgcgcatcccatcacatctaccagaatacgttaccgacctgcggctcaacgacaatgaggtctccgtgctagaagccactgggattttcaaaaaactaccaaatctgaggaagatcaacttgtccaacaacaagatcaaggaagtgcgcgagggagctttcgacggcgccgcttctgttcaagagctgatgttaaccggaaatcagctggaaaccgttcatgggagagtgtttagaggactctcaggcctgaaaactctcatgctgcgtagtaacctcatcgggtgtgtgtcaaacgacactttcgccggcctaagttccgtgagattgctgtctctgtatgacaaccggatcactacaattaccccaggggccttcacaactctggtctcactgtctacaattaatctgttgtctaacccttttaactgtaactgccatttggcctggctcgggaagtggttacggaagcgcagaatcgtctccggcaaccccaggtgccagaagcccttttttcttaaggaaattcccatccaagatgtggcaatacaggattttacatgcgatggcaatgaggagagcagctgccaattaagccctcggtgtccggagcagtgtacttgtatggagaccgtagtgcggtgttccaacaagggacttcgagctttgccccgcggcatgcctaaggatgtgacagagctgtatctggaaggaaaccatctgacagctgtcccccgggaactgtccgctttgagacatctcacgttgattgacttgtcgaacaatagtattagtatgttgaccaactatacattttcaaatatgtcccacttgtccacactgattctcagttataacagactacgctgtattccagtccacgcattcaacggcctcagatctctgcgggtgctaactctccacggtaatgacattagttcagtgcctgagggctcatttaacgatttaacatccctctcccacctggcgctcggcaccaaccccctgcactgcgattgttctctgaggtggctatctgagtgggttaaggctggatataaagagcccggcatcgcccgctgttccagtcccgagccaatggccgacaggttgctcctgacgaccccaactcacagattccaatgtaagggaccagtggacattaatatagtggccaaatgcaacgcctgcctgtcttcaccatgcaagaataacggtacatgcacgcaagaccccgtggaactctatagatgcgcatgtccttacagctataaggggaaggactgcaccgtgccgatcaacacctgcattcagaacccctgtcagcacggcggtacatgtcacttgagcgactctcataaggacggattctcctgttcctgtcctctggggtttgaagggcagaggtgcgagatcaatccagacgactgcgaagataacgactgtgaaaacaacgctacgtgcgttgatggaataaacaattacgtgtgcatctgtccacccaactatactggcgaactttgtgacgaggtgatagatcattgcgtgcccgagctcaacctgtgccagcacgaagccaagtgtatcccgctggacaagggattttcctgcgagtgtgtaccgggatattctggtaaactgtgcgagaccgacaatgatgactgcgtggctcataaatgtagacacggggcgcagtgcgtggacaccatcaacgggtacacttgtacttgcccccagggatttagcgggcccttctgcgaacatccccctcctatggtgcttttgcagacctccccatgcgatcagtatgaatgtcagaatggtgcacaatgcattgttgtgcaacaagagccaacttgcagatgcccacctggctttgcaggacccaggtgtgagaaactcatcactgttaactttgtaggtaaggacagctatgttgagctggcttccgctaaggtccggccccaagcaaacatttctctgcaggttgctaccgacaaagacaacggaattttgctgtataagggagacaacgaccccctcgccttagaactgtatcaagggcacgtgcggttagtatatgattctctgagctcccctccaactacagtttattccgtcgaaaccgtcaatgatggccaatttcactccgttgaactggtgaccctcaatcagaccctgaatcttgtcgttgataaagggacacccaagagcctcgggaaactgcagaagcaaccagcagtggggattaacagccccctgtacctcggaggaatacctacctcaactgggttgtcagccctgagacaggggacggatcggcctctgggcggatttcatggttgcatccacgaggtgaggatcaacaatgaactgcaggactttaaagctcttcccccccagagtctaggcgtgtctccaggttgtaagtcctgcacagtctgcaagcacggcctctgcagatcagtggagaaggactctgttgtctgcgaatgcagacctggttggaccgggcccctgtgcgaccaggaagcacgcgatccctgcttgggacatagatgtcatcacggcaagtgcgtcgccaccggtacctcatacatgtgcaagtgtgcagagggctacggcggggacctttgtgacaataagaacgacagcgccaacgcctgcagtgcctttaaatgccaccacgggcaatgtcatatttctgatcagggggaaccttattgtctctgtcaacctggattctctggagagcactgtcagcaagtgttccgggctcaggtttttcagtcaagtctgccaggcaactgtagctggtcatgttggcctccccggcctccgatgccttag

SEQ ID NO: 134520 - DNA, 4572 bp, synthetic construct
  misc_feature 1..4572: note = Description of Artificial Sequence: Synthetic coding sequence
  source 1..4572: mol_type = other DNA
atggccccggggtgggccggtgtcggcgccgccgtgagagctcgtcttgctctggccctggcactggcgtctgtgctcagtggccctcccgcagtcgcatgtccaactaagtgcacatgctccgcagcttccgtcgattgccacggactgggtctgagggcggtgccacggggtatcccccgaaatgccgagagacttgacctggaccgcaacaacatcacccgcatcactaagatggacttcgccgggctcaaaaacctgagggtgctccatctggaggacaaccaggtgagtgttatcgagaggggcgcctttcaagacctcaaacagctcgagaggctcagactgaacaaaaacaagctccaggtactgcccgagctgcttttccagagtacccccaagctgacgcgcctggatctgagcgagaaccagattcagggtataccaaggaaggcttttagggggattacggacgtaaagaacctgcagctggataacaatcacatatcatgtattgaagatggggcattcagagcactgcgggacctggaaattctgacactgaacaacaacaatattagcagaattttagttacatcatttaaccatatgccgaagattaggacacttcgcctgcattcaaaccatctgtattgcgattgccaccttgcgtggctttccgactggctgagacagcgacgaacagtcggacaatttactctgtgtatggcccctgtgcacttgagggggttcaacgtggccgatgttcagaaaaaggagtacgtatgcccagccccccactcggaacctccatcatgtaatgctaattcgataagctgcccatcaccatgcacttgtagtaacaacattgtagattgcaggggaaaaggactcatggaaatcccagccaacctccccgagggcatagtggagattcgacttgagcagaattctatcaaggccatacctgcgggggcgtttacccagtacaagaagcttaagaggatcgacatttccaaaaaccaaattagcgacatagcccctgacgcatttcagggcctgaaaagtctaacatcacttgttctctatggtaataaaatcacggaaatcgtgaaaggactcttcgatggcctggtcagtttacagctgctccttttgaacgcaaacaaaatcaattgtctaagagtcaatactttccaagatctccagaacttgaatctcctgagcttatatgataacaagctgcagactatatctaaggggttatttgccccgcttcagagcatccaaactctgcacttagcgcaaaatcccttcgtgtgcgattgccacctcaaatggttagcagattacttgcaagacaatccaattgaaaccagcggcgcacgatgtagctctccacgtagactggccaataaaaggatctcccagatcaaaagcaagaagttccgttgttctggctctgaggattatagatcccggttttcatccgagtgcttcatggatctcgtgtgtcccgaaaaatgcagatgtgaagggaccatcgtcgactgctctaatcagaagctggtgcggattccctctcaccttccggaatacgtcacggacttgaggttgaatgataacgaagtatctgttctagaagccactgggatcttcaagaagctgccgaacctcagaaagatcaaccttagcaataataaaatcaaagaagtgagagaaggcgcattcgacggggcagcgtctgtccaagagcttatgctcactggcaaccaactcgaaaccgtgcacggccgagtattccgcgggttgagcggactgaagacattgatgctgagatctaatctcatcgggtgcgtcagcaatgataccttcgctggcctgtccagcgtgaggttactgagcctatacgataaccgcattacgactataacaccaggcgcatttacaacactggtgagccttagcacgatcaatctcctgagcaacccctttaactgcaactgccacctggcctggctggggaaatggttgcggaagcgccggatagtgtcaggaaatccaagatgtcagaagccattcttcctgaaggaaattccaattcaggacgtggccattcaggacttcacatgcgatggcaacgaagaaagttcgtgtcagctgtctcctcgctgccctgaacagtgtacttgtatggagacagttgtgcgatgttcaaataagggcctcagagcccttccccgcggtatgcctaaggacgtcaccgagctctacctggaaggaaatcacctaactgcagtgcctcgagagctatccgctctgcgccacctcactctcattgacctgtctaacaatagtatctcgatgttaacaaattacacctttagcaatatgagtcacctctcaaccctaattctgagctataacagattgagatgtattccggtgcacgcattcaatggtctgcgatctctcagagtcttgactctccatggcaatgatatatccagcgtgcccgagggcagcttcaatgatctgacgtctctctcccatcttgccctcggtaccaaccccttgcactgtgactgttcattgagatggctctccgagtgggttaaggccgggtataaggaaccggggatagcaaggtgtagttctccggaacccatggccgacagattgctgctgactacgcccacccatcgctttcaatgcaaaggacccgtcgacataaacattgtggccaaatgcaacgcttgcctctcctcaccttgtaaaaataacggcacttgtacgcaagatcccgtggagctttaccgatgcgcctgcccctatagctataagggtaaggattgtactgtgcccataaatacttgcatccagaatccgtgtcagcatggcggcacttgtcatctaagcgattcccacaaagacggtttctcatgttcttgtccattaggcttcgagggtcaacgatgcgagataaatcctgacgattgcgaggacaacgactgtgagaacaacgctacgtgcgtggacggcattaacaactacgtgtgtatttgcccacctaactatactggagagctctgtgacgaggtaattgatcactgcgtcccggaactcaacctttgtcaacatgaggcaaagtgtattcctctggacaaagggttctcttgtgaatgcgtccccgggtattctggtaagctatgcgaaaccgacaacgacgactgtgtggctcacaaatgtcgccacggcgcacagtgcgtggatacaatcaatgggtacacctgtacgtgcccccaaggcttttctgggcctttttgcgaacacccaccccctatggtcttactgcagaccagcccttgtgatcagtatgagtgtcagaatggtgcccaatgtattgtcgtgcaacaggagcccacgtgcaggtgtcccccgggatttgccggaccaaggtgcgaaaagctgattacggttaactttgtgggtaaggatagttacgtcgaactggcttctgctaaggtaagaccacaagcaaatatctcactccaggtggctacggataaagacaatgggatcctgctatacaaaggtgacaacgacccacttgccctggaactctaccaaggccacgtgagactggtctacgacagccttagttctcctccaaccaccgtatattccgtagagaccgtgaatgatggtcaattccactcagtcgagctggtgacattgaaccagacccttaacttggtagttgacaagggcacaccaaaaagcctggggaagcttcagaagcagcccgcggtagggatcaacagcccactctacctggggggcatccctacaagcacaggtctctccgcacttaggcagggcaccgatcgtcccctgggtgggttccatggttgtattcacgaagtaaggattaataacgaacttcaggactttaaggcgctgcctcctcagtcactcggggtgagtccagggtgcaaatcatgcactgtatgtaaacacgggctttgtagatccgtagaaaaggactctgtagtgtgcgagtgcagaccaggatggacaggaccattgtgtgatcaagaggcccgggacccgtgcctagggcacaggtgccaccacggaaaatgtgttgcaactgggacaagttatatgtgcaaatgtgctgaggggtatggcggggatctttgtgataataagaatgacagtgcaaatgcatgttccgctttcaaatgtcatcacgggcaatgtcacatttccgatcagggagagccttattgcctatgccaacccggctttagcggagaacactgtcagcaagagaatccatgcctgggtcaggtggtgagggaggttattaggcgccagaaagggtatgccagctgtgccacagctagcaaagtgccaattatggagtgtcgaggtgggtgtggaccccagtgttgtcagccaacgcggtcaaagagacgtaagtacgtctttcagtgtaccgatggttcctcgtttgttgaagaggtcgaaagacacctggagtgtgggtgcctggcctgtagttag

SEQ ID NO: 134521 - DNA, 3258 bp, synthetic construct
  misc_feature 1..3258: note = Description of Artificial Sequence: Synthetic coding sequence
  source 1..3258: mol_type = other DNA
atgtctactcctagtagatttaagaaagacaaagagattatcgctgagtacgagtcacaggtgaaggagattcgcgctcagttggtagagcagcaaaagtgtcttgagcagcaaacagaaatgcgagttcagctattgcaggacctgcaggattttttccgaaaaaaggccgaaattgagacagagtactctagaaacttagagaagcttgccgagaggttcatggctaagactaggtctacaaaggaccaccaacaatacaagaaggaccagaatcttctctcccccgtgaactgctggtacctgctgctgaaccaagtccgacgcgagtcaaaagaccacgcgacgctgagcgacatttacctgaacaacgtgatcatgcgcttcatgcagatctcagaagattcaacaagaatgttcaaaaaatccaaggaaatcgcattccagctgcacgaggatctcatgaaggtgctaaacgaactctatactgttatgaaaacctaccacatgtaccatgcagagtcaatctccgcagagagtaaattaaaggaggcggagaaacaggaggaaaagcaaatcggcagatcaggtgatcccgtattccatatacggctcgaggaaagacaccagcgtaggtcatctgttaagaagatcgagaaaatgaaagagaagcggcaagccaagtattcagaaaacaagttaaagtccatcaaagcccgcaatgagtacttgttgactttagaggctacaaacgcctccgtctttaagtattatatccatgacctgtccgacttaatagattgttgtgaccttggataccacgcgagccttaaccgagccctcagaacttatctcagcgcagagtacaacttggaaaccagcagacacgagggtttagacatcattgaaaacgccgtggataacctcgagcctcgttccgacaagcagcggttcatggagatgtatccagccgccttctgcccacctatgaaatttgagttccagtcccacatgggagatgaggtgtgccaggtcagtgctcagcaaccagttcaagccgagctgatgttgcgctaccaacagctgcagagtcgcttagccaccttgaagatcgaaaatgaagaggtgaagaagactactgaagccactctccagaccatccaagacatggtgacaatagaggattacgacgtttcagagtgtttccagcacagcaggtccacagagagtgttaaatcaacggtctctgaaacatacctgtcaaagccaagcattgctaagcgaagagctaatcagcaggagactgagcagttctattttatgaaactccgtgagtatctagagggtagcaaccttataaccaagctgcaagccaagcacgacctgctccagagaaccctgggtgaaggtcacagagcggaatatatgacgactaggccacctaacgtgccgcctaagccacagaagcacagaaagtctcgccctaggagtcagtacaacaccaagttgtttaacggtgatctggagacttttgtgaaggatagcgggcaggtgatcccactcattgtggagtcatgcatccggtttattaacctgtacggactgcagcaccagggtattttccgggtttcggggagtcaagtggaggttaacgacattaagaactcctttgagcgcggcgagaatcccctggccgacgatcagagcaatcatgacatcaactcagttgccggagtgctgaagctgtacttcagaggtttagagaatcctttatttccgaaggagcgcttcaatgacctcatctcctgcataaggattgataacttgtacgaaagggccctgcacataaggaaacttctcctgacacttcctaggtctgtcctaatcgtgatgaggtacctctttgcattcctgaatcacctttcccagtactctgatgagaatatgatggatccctacaatttagccatttgttttgggcccaccctgatgcccgtgccagagatacaggaccaggtgtcctgtcaagctcatgtgaatgagatcatcaagactataattatccaccatgagacgatcttcccagacgccaaagaactagacgggcccgtttacgagaagtgcatggccggggacgactactgtgattctccctactcagagcatggcacactcgaggaagtcgaccaggacgcagggactgagcctcatacttccgaagatgagtgcgaacctatcgaggcgatcgccaaattcgattacgttgggcgtagcgcacgcgaactgagttttaagaaaggcgcttctttgttgttgtaccacagggcctctgaagattggtgggagggtaggcacaatggaattgacgggctcgtcccacatcaatatatcgtggtccaggatatggatgacacattttccgatactctctcccagaaagccgacagcgaagcttccagtgggccagtgacggaagacaagtcctctagcaaagatatgaacagccctactgacaggcatccagatggttatcttgcccgccaacgcaaacgaggggaacccccacccccagtgagaagacctggacgaacaagcgatggccactgcccgctgcacccccctcatgccctcagtaactcatccgtcgatcttgggtctccaagcctggcttctcatcctaggggtctcctgcaaaaccgtggccttaataacgatagccctgaaaggcgcaggcgccccggacacggatcgttgactaatatctctaggcacgactcactaaaaaaaattgatagccctccaattcgcaggtcaacaagttccgggcaatatactggctttaacgaccataaacctttggaccctgagaccattgcacaggatattgaggaaaccatgaataccgcccttaacgaactgcgcgaactcgagaggcagtcaacagccaaacacgcgcctgacgtagttctggacacacttgaacaggtgaagaacagccccacaccggccaccagtaccgaatccctctcacctttacacaatgttgccctccggagcagtgagccacaaatcagacgttcgaccagctcttcctcggatactatgtccaccttcaaacctatggtcgcccccagaatgggggtacagctcaagccacctgcactgaggcccaagccagccgtgctgccaaaaaccaacccgacaattggacccgccccacctccccaagggcccaccgataagagctgtacgatgtag

SEQ ID NO: 134522 - DNA, 3189 bp, synthetic construct
  misc_feature 1..3189: note = Description of Artificial Sequence: Synthetic coding sequence
  source 1..3189: mol_type = other DNA
atgagcacacccagtcgtttcaaaaaagacaaggagattatagccgagtacgagagccaggtcaaagaaatccgtgctcagctggtggagcaacaaaaatgtctggagcagcagacagaaatgcgcgttcaacttttgcaggatcttcaggattttttcaggaaaaaagctgagattgagactgagtattcacgtaacctcgaaaaactcgctgagagatttatggctaagactaggtccactaaggatcaccagcaatacaagaaggatcagaacctactgtcgcccgtgaattgttggtatttgcttcttaaccaagtccgcagagaaagtaaggatcacgccactctgtctgatatctacttaaacaacgtcattatgcggttcatgcagatctccgaggattctactcgaatgtttaagaaatctaaagaaattgctttccagctacacgaagacttaatgaaagtgctcaacgagctgtataccgttatgaaaacataccacatgtaccacgcggagtccattagtgccgaaagcaaacttaaagaggcagagaagcaggaagaaaaacagattgggcggtccggcgaccctgtattccatatccggctcgaagaaagacatcagcgcaggagcagcgtgaagaagatagagaaaatgaaggaaaaacggcaggctaagtacagcgaaaacaagctgaaatctataaaagctcgtaatgagtatctcctgacactggaggccactaatgcgtctgtgtttaaatactacattcacgacctgagcgatctgatagattgttgcgatctggggtaccacgctagcttaaacagggcactgagaacttatctttcagctgagtacaatctcgagactagccgtcacgagggccttgatatcatcgagaatgcagttgacaatcttgaaccccgaagcgacaagcaacgcttcatggagatgtaccccgctgccttttgtcccccaatgaagttcgagttccagtcacatatgggcgatgaggtttgccaggtgagtgcacagcagcctgttcaggccgagctcatgctcagatatcagcagctccaatccagacttgctactctcaaaatcgaaaacgaagaggtgaaaaaaacaaccgaagccaccctgcagaccatacaggacatggtcaccatcgaagactacgatgtgtccgagtgtttccagcactccagatccacagagtccgtgaagtccacggtgagtgaaacatacctgagcaagccatcaattgcaaagcgcagggctaatcagcaggagaccgagcagttttactttatgaaattgagggaatacctggagggaagtaatctgattacaaaattgcaggctaagcatgacctcttgcagaggacgctgggggagggccaccgcgcagaatatatgactacctcccgcggacggaggaattcccacaccaggcaccaggattccggacaggtcatccctcttatagtggagtcttgcattcggtttattaatctttacggcctccagcaccagggtatctttagggtgtccgggagccaggttgaggtgaatgacataaagaatagcttcgaacgcggcgagaaccctttggcagacgatcaaagcaaccatgatatcaactcagtcgctggtgtactcaagctctatttccgtggcctggaaaatcccctgttccctaaagagcggtttaatgatctgatcagctgcataaggatcgacaatttatacgaacgcgctctgcacatccgaaagctgctgctcaccctgcctcggtccgtcctcattgttatgaggtaccttttcgcgttcctaaaccacctatctcagtatagtgacgaaaatatgatggatccatataatctcgcgatttgcttcggacctaccttgatgccagtcccggagatccaggatcaggtttcctgtcaggcccatgttaatgagatcatcaaaaccattattatccaccatgaaaccattttcccggacgcaaaggagctggatggacccgtttacgaaaaatgcatggccggtgatgactattgcgattctccctattccgagcacgggaccctggaagaggtagatcaggacgccggcacggagccccatacatccgaggacgaatgtgaacccatcgaagccatagcaaaattcgactacgtaggtaggagcgctcgggagctgagtttcaaaaaaggcgccagcttactgctgtaccaccgggcctctgaagactggtgggaggggcgccataatgggatcgacggtttggttccacatcaatatatcgtggttcaggacatggacgacaccttctccgacaccctttcccagaaagcggactctgaagcgtccagtgggcctgtgacagaagataaatcttccagtaaggatatgaacagtcccacggacaggcaccccgacggttatctggcccgccagagaaagcgtggcgaacccccaccacctgtgagacgaccaggacggacctccgatggtcattgccctctccaccctccccatgcactaagcaatagctccgtagatctggggagccctagcttggccagccaccctagaggcctgcttcaaaaccgcggcctgaataatgattcccccgaacggcgtaggcggcctgggcacgggagtctgactaacattagccggcacgattccctcaagaaaatagactctccccctatccggaggtcaacatcctccgggcagtacaccgggttcaacgaccacaagcctctggacccagagactattgcccaagacatcgaggaaaccatgaatactgccctgaatgagctgcgggaactggaacgtcagtctaccgcaaagcatgcacctgacgtagtgctggacactctcgaacaggtgaagaacagtcccacaccggctacttctacagagtctctcagccctctccacaacgtggcattgcgaagctctgagcctcagatccggaggtccacatcgagttcttccgacacaatgagtacttttaaaccaatggtcgccccgaggatgggggtacaactgaagcccccagccctcagacccaagccggccgtcctgcctaaaaccaaccctaccatcggaccagctccgcccccacaaggtccaacagacaagtcatgtactatgtag

SEQ ID NO: 134523 - DNA, 2958 bp, synthetic construct
  misc_feature 1..2958: note = Description of Artificial Sequence: Synthetic coding sequence
  source 1..2958: mol_type = other DNA
tgaaaggaccagaatgtgctgtcacctgtgaactgctggaatctcttgctcaaccaggtaaaaagggaaagccgcgaccacacaacactgtcagacatctatctgaacaacataattccgcgcttcgtgcaggtaagcgaagatagcggtaggttgtttaaaaagtcaaaggaagtagggcaacagcttcaggatgatttaatgaaggttctcaatgagctgtacagtgttatgaaaacttatcacatgtacaacgccgattccatttccgcgcagagcaaactgaaggaggctgaaaagcaggaagagaagcaaatcggtaagtccgttaaacaggaggaccgtcaaacaccccggagtcccgacagtaccgccaatgtcagaattgaagaaaagcatgtgcgccgtagctccgtgaagaagattgagaaaatgaaggagaagcgtcaagcaaaatataccgagaataaactgaaggcaattaaggcacgaaacgaatatctcctggccctggaagcaaccaacgcttccgtgttcaaatattatattcacgaccttagcgacctgatcgatcaatgttgtgatctgggttaccacgcctcactcaacagagccctacgtacttttttatccgccgagcttaatctggagcagagcaaacacgaagggctggacgctatagagaatgctgtggagaatcttgatgctacttccgacaaacaacgcctcatggagatgtataataatgtgttttgtcctccaatgaaattcgagttccaaccacatatgggagatatggcaagtcaactgtgcgcgcagcagcccgtccaatccgaactggtgcaaaggtgccagcagctccagagcaggctctctacattaaagatagaaaatgaggaagtcaagaaaaccatggaggccactctgcagacgattcaggacatcgtgacagtcgaagattttgatgtgtctgactgcttccagtattccaattcgatggaatccgtgaagtctaccgtgtcagaaaccttcatgagcaaaccttcgatcgccaagagaagggcaaaccaacaagaaactgaacagttctactttacgaaaatgaaggagtacttggagggccgaaacttgattaccaaactccaggccaagcacgacttacttcagaaaaccctgggggaaagtcaacgcacagattgtagtctggctagaagaagcagcacagttaggaagcaagattcatcccaggctattccactcgtggtggaatcctgtattagatttatatcacggcacgggcttcagcacgagggaattttccgtgttagcggctcccaggtcgaagtcaacgatattaagaatgcttttgagaggggggaagacccactggccggggaccagaacgaccacgatatggactctatagcgggtgtactaaagctttactttcgcggcctggaacaccccctgttcccaaaagatatcttccacgacctgatggcatgtgttaccatggacaatctgcaggaacgcgccctccacatccgaaaggtccttctcgtccttcctaaaacaacccttattatcatgaggtatctgtttgcctttcttaaccatctgagccagttttccgaagagaacatgatggatccttataatctcgcgatttgcttcggccccagcttgatgtccgtgcctgagggccacgaccaggtgtcctgccaagcacatgtgaacgagctcataaaaacgatcatcatccagcatgagaatatattccccagcccacgggaactggaggggcctgtgtatagtagaggcggctcaatggaggattattgcgactccccccatggggaaactacaagcgtcgaagacagtacacaggacgtgaccgcggaacatcacacatcggacgacgaatgtgagcctattgaggctattgccaaattcgattatgttggccggactgcccgcgagctcagcttcaagaaaggcgcctcactcctgttataccagcgtgcaagcgatgactggtgggaggggagacacaacgggatcgatggcctaattccccatcagtacattgtggtgcaggatacagaggacggagtggttgagcgtagcagcccaaagagcgagatcgaagtgatctcggaacctcccgaggagaaagtcacagccagagctggcgcatcttgtccgtcgggaggccatgtagcggacatctaccttgcaaacattaacaagcaacgaaagcgtccagagtctggctctattaggaaaacctttagaagcgattcacatgggctaagctccagcttgaccgatagttcctctccgggggtgggcgcaagctgtcgccccagcagtcaacctataatgagccaaagtctgcccaaggaaggccctgataaatgctctatatccgggcacggaagcctgaactccatatcacggcacagttccctgaagaaccgcctagactctcctcaaataaggaagaccgcgacagccggccgatctaagagctttaataaccatcggccaatggatcccgaggtgatcgcgcaagatatcgaagctaccatgaattcggccctcaacgaactgagagagctggaacgccagtcaagtgtgaagcacacgcccgacgtggtgctcgacaccctggaaccattgaagaccagcccagtggtcgcccccacctccgagccatcttcccctcttcatacacagctcctcaaggaccctgagcccgcgtttcagagatccgcatccaccgccggcgacatagcctgtgcattccggcctgtcaagtccgtgaagatggctgcccctgtaaaacctcccgcaactcgtcccaaacctactgtgtttcctaagactaatgcgacatctcccggcgttaatagtagcacttcaccgcagagtactgacaagtcctgtacagtgtag

SEQ ID NO: 134524 - DNA, 2796 bp, synthetic construct
  misc_feature 1..2796: note = Description of Artificial Sequence: Synthetic coding sequence
  source 1..2796: mol_type = other DNA
caatctaaggaagtgggccagcagctgcaggatgatctaatgaaggtgctaaacgagctttattctgtcatgaaaacctaccacatgtacaacgccgatagcatctccgcccagagtaagttgaaggaagccgagaaacaagaggagaagcagattggcaagtccgtcaagcaggaagacagacagactcctagaagcccagattccacagctaatgtccggatcgaggagaagcatgtaaggcggagttcagtgaaaaagattgaaaaaatgaaggaaaagaggcaggctaaatacacggagaacaagttgaaagcaattaaggctagaaatgagtatctactggcattagaggccacaaacgcaagcgtttttaagtactacattcatgacctcagtgacctcattgaccagtgctgtgacctgggctaccatgcttccctcaacagggccctacggacgttccttagtgcggagctaaatcttgagcagtcaaagcacgagggactggatgctatcgagaacgcagtggagaacttggacgcgaccagtgataagcagagattaatggagatgtataataatgtcttctgtccccccatgaagttcgagtttcagccccatatgggggatatggccagccagctctgcgcacaacagcccgttcaatccgagctggtacagagatgtcagcaactgcagtcgcggctgagcactcttaagattgaaaacgaggaagtgaagaagaccatggaagccactctacagactatacaagatatcgtaaccgtggaggacttcgatgtcagcgattgcttccagtacagtaactctatggagagcgtgaaatccaccgtgtccgagacattcatgagcaaaccctccatcgctaagagaagggccaatcagcaagaaactgaacagttttactttactaaaatgaaagaatacctggaggggcgtaacctgatcacaaaactgcaagctaagcacgacttgcttcagaagactttgggtgagtcgcagaggaccgattgcagcctggccagaagatccagcacagtgaggaagcaagatagttcccaggcgataccccttgtcgtcgagtcctgtatacggttcatcagccgacacgggctccagcacgaggggattttccgtgtctcagggtcccaggtggaagtgaatgatattaaaaacgcattcgagcgtggtgaagaccccctggctggggaccaaaacgaccatgacatggactcaatagctggcgttctaaagctttacttccgtggactcgagcatcccctctttcctaaagatatcttccatgacttgatggcatgcgtaacaatggacaatctgcaagagagggcgctccatatacgcaaggtgctactcgtcctacctaagacgactctcattatcatgaggtacctgttcgcgttcctgaaccacttgtctcagttcagcgaggaaaatatgatggatccatataacctggccatttgtttcggaccctcgctgatgtctgtccccgaggggcacgaccaggtttcttgccaggcacacgtcaacgagcttatcaaaactatcattattcagcacgagaatatttttcccagcccccgcgaactggagggtccggtatactcacgggggggctctatggaagattactgcgactccccccacggagagacaacgtcagttgaggactccactcaggatgtgacagctgagcaccacacttccgatgacgaatgcgagccgatcgaggcgatcgccaagtttgactacgtcggtcgaactgctagagagttgtcgttcaaaaaaggggcatccctcctgctatatcaacgtgcatccgacgattggtgggagggaagacacaatggcatagacgggctgatcccacatcagtatatcgtagtgcaggatacagaagatggagtcgtggaacggagttctccaaagagcgaaatcgaagttatctccgaacctccagaggaaaaagtgaccgcccgcgccggcgcctcctgcccatccgggggacatgtcgccgatatctatctggccaatattaataaacagcggaaacgacctgaaagcgggtccatacggaagactttccggagcgatagccatggactcagctcttcactcactgactcctctagcccgggggtgggcgcttcatgtagaccctcttcgcagcctattatgtcccagtccctgcccaaggagggccccgacaaatgttctatcagtgggcacggctcactaaacagcataagcagacactcatcccttaaaaataggctagatagcccacaaatccgaaaaacggccaccgccggccgctccaaatctttcaataatcaccggcccatggatcctgaggttatcgcacaggacattgaggccacaatgaactctgcactgaatgagctgcgcgaattagaacgccagtcctctgttaagcacacccctgacgtggtgctggatacgctggagccacttaagactagcccagtcgtggcccctaccagcgaaccaagtagcccgctgcatactcagctgctgaaggacccagaacctgcttttcagaggagtgccagcacagccggcgacatcgcctgtgcttttaggcctgttaaaagcgtgaaaatggccgctcccgtgaaacccccagctacacgaccgaagcccaccgtgttccctaagacaaacgccacatctcctggagtgaattccagcacctctccccaaagtaccgacaagtcatgtacggtatag

SEQ ID NO: 134525 - DNA, 2112 bp, synthetic construct
  misc_feature 1..2112: note = Description of Artificial Sequence: Synthetic coding sequence
  source 1..2112: mol_type = other DNA
cgcaaagatcaaaatgttctttcccctgtgaactgttggaatctgttgcttaaccaagtgaaacgcgaatcaagggaccacacaactctttcagacatctatcttaacaacattattcctcggtttgtgcaggtatcggaagactcaggccgcctgttcaagaagagcaaagaagttggacaacagttgcaggacgatttgatgaaagtgctcaatgagttgtactcagttatgaaaacctatcacatgtacaatgctgacagcatttccgcacagtcaaagctaaaggaggctgagaagcaagaggagaagcagatcgggaagagcgtgaaacaggaggaccgacagactccgcggtcacccgactctacagcaaatgtgcggatcgaagagaagcatgttaggaggtcatccgtgaagaagattgaaaagatgaaagagaagcgccaggcaaaatataccgaaaacaagctgaaagccatcaaggctcgcaacgagtatctgctcgctctcgaagccacaaatgcttcagtttttaagtactatatccacgatctgagtgacctgatcgactgttgtgatctgggctatcacgccagcctgaatcgcgccctaaggacattcctgtcagccgaactcaacctggagcaatctaaacacgagggcttagatgcgattgagaacgcggtggaaaacctagatgctacaagcgacaaacagcgcctcatggagatgtataataacgtgttttgccctccgatgaagtttgaattccagccccatatgggcgacatggcctcacagctctgcgcccaacagcctgtccagtccgagctggtgcagcgctgccaacagctccagtcaagactcagcacccttaagatcgagaatgaggaagtaaagaagacaatggaagcgaccctccagacgatacaggatatagtgaccgtggaggatttcgacgtgtctgattgttttcagtactcaaactctatggagtccgttaagtccaccgtctccgaaacatttatgtccaaaccttcaattgccaagcgacgcgccaaccaacaagagaccgagcagttttacttcactaaaatgaaggagtatctggagggcagaaatttgatcaccaaactccaggctaagcacgacttgcttcaaaagacactaggcgaaagccagcggacagattgctccctggcccgcagaagcagcaccgtccgaaagcaagactcgtcacaagcaatcccacttgtggtcgagagttgtattaggtttatttcccgccatggactgcagcacgagggcattttccgggtatctggaagccaggtcgaggtgaacgatattaagaacgcttttgaaaggggtgaggatcctctagctggcgaccagaatgatcacgatatggatagtatcgcaggagtcttgaagctgtactttcgcggcctcgagcacccgctattccctaaggacatatttcacgatctaatggcctgcgtaacgatggacaatctgcaggaaagagcactgcacatacggaaagtgctgctggttctaccaaaaacaacactgataatcatgcgctatctgtttgctttcctgaatcatctgtcccagttttctgaagaaaatatgatggacccttacaacttggctatttgttttggcccatccctcatgtcagtgcctgaaggtcatgaccaggtgtcttgtcaagcccatgtgaacgagctgattaaaaccattattatccagcacgaaaatatcttcccctcccctagagagttagagggtcccgtgtatagcagaggcggtagtatggaagactattgcgattcacctcacggcgaaactacctcagtcgaggactccacccaggatgtcacagctgaacatcacacatccgatgatgaatgcgagccaatcgaggctatcgctaaatttgattacgtaggtcgcaccgccagagagttaagcttcaaaaaaggtgccagcttgctcctatatcagagggccagtgacgactggtgggagggccgtcacaatggcattgacgggctcatccctcatcagtatattgtcgtgcaagacacactcatctcatag

SEQ ID NO: 134526 - DNA, 759 bp, synthetic construct
  misc_feature 1..759: note = Description of Artificial Sequence: Synthetic coding sequence
  source 1..759: mol_type = other DNA
atggaagactattgcgattcgcctcacggtgaaactacttctgtcgaggattcaactcaagatgtaaccgctgaacaccatacaagcgacgacgagtgtgaaccaattgaggcaatcgcaaaatttgactatgttggtaggaccgccagagaactctcctttaagaagggcgcctctcttctgctgtaccagagggcctcggacgactggtgggaaggacgccataatggcatcgacggcttgattcctcaccaatatattgtagtccaggacaccgaggatggcgtcgtagagaggtcctccccaaagtctgaaattgaggtgatcagtgagccacccgaagagaaagttactgcccgggccggagcttcttgtccatcaggcgggcatgttgcggatatctacttggccaacattaacaacaatcttcacttagataatacaaaacccgtgactacaaaacaacggaagagacctgaaagtggtagcatcagaaaaaccttccggtctgattctcacggtctcagctcttccctcaccgatagctcctcccctggggtaggcgcgagctgtcgtcctagttcacagcccattatgtctcagagcttgcctaaagaaggtccagataagtgctccatcagtggacacgggagtctgaacagcattagtcggcacagcagtctgaagaatcgtctggactcgcctcagattcgtaagactgctacagccggcaggtctaagtcattcaacaatcactag

SEQ ID NO: 134527 - DNA, 693 bp, synthetic construct
  misc_feature 1..693: note = Description of Artificial Sequence: Synthetic coding sequence
  source 1..693: mol_type = other DNA
tgagcagaacatcacacatccgatgacgagtgtgaacccatcgaggctatagccaagtttgactatgtcggacggacggcccgggaactgtcattcaaaaaaggcgcctcattgctactttatcagcgtgccagcgacgactggtgggagggtcgtcataacgggatcgatggtttgattccccatcagtacattgtggttcaggatactgaggacggagtggtggagagaagctcaccaaaatcagagattgaggtcatctctgaaccaccagaagagaaagtgactgcaagagcaggcgcaagttgtccatccggaggtcatgtggctgatatctacttggcaaatatcaacaacaacctgcacctggataacacgaagcccgtaacgacaaagcagcggaaaaggcccgagagcggatcaattagaaaaacatttaggagcgattcacatggcctgtctagttctctaacagactcctcctcccccggcgtcggggcttcttgtcgaccatcctcgcagcctattatgtcacaatctttacctaaagaggggcctgataagtgttccatctctgggcacggcagcctgaactcgatcagcaggcattcctcacttaaaaatagactggattctcctcaaataaggaaaacggcgaccgcaggacgatccaaatctttcaataaccactag

SEQ ID NO: 134528 - DNA, 1353 bp, synthetic construct
  misc_feature 1..1353: note = Description of Artificial Sequence: Synthetic coding sequence
  source 1..1353: mol_type = other DNA
gtgaagaaaacaatggaagccactctgcagacgatacaggacatcgtaacggtagaagatttcgatgtgagcgattgctttcagtatagtaacagcatggagagcgttaagagcactgtgagcgaaacatttatgtcaaaaccttcaattgccaaacggagagcaaaccagcaggaaacagaacagttctactttacaaagatgaaagagtatctggagggcaggaatttgataacaaagttgcaggcaaagcatgacctccttcaaaagaccctgggagaatctcagcggaccgactgcagcctggccagacggagtagcacggtgcgcaagcaggatagctcgcaagcgataccactggtggtcgagtcctgtattagatttatatcccgacacggactgcagcacgaaggaatcttcagggtttcaggttcccaagtggaggtgaatgacatcaagaacgcctttgagcggggcgaagaccctcttgccggggatcaaaatgatcacgacatggacagtattgctggggtgcttaagctgtactttcgaggtcttgaacatccacttttcccaaaagacatctttcatgacttgatggcttgcgttactatggacaatctccaggaaagggcgctgcatatcagaaaggtgctactcgtcctgccgaagactacactgattattatgaggtacctctttgcatttctgaaccatctctcccagtttagcgaagagaatatgatggacccttataatcttgccatatgctttggaccctcactcatgagcgtaccagagggtcacgatcaagtgtcttgtcaagcccatgtgaatgaacttattaaaaccatcatcatccagcatgaaaacatctttcccagcccaagagagcttgaaggtccagtttactcaaggggcggatccatggaggactactgtgactctcctcatggggaaacgacttcggttgaagacagcacccaagatgtgaccgcagagcatcacactagcgatgacgagtgtgagccaatcgaagccatcgccaagttcgattatgtgggcaggacagccagagagctctcctttaaaaagggcgccagcctgctgctgtatcagagggcttccgacgactggtgggaaggccgacacaatggcattgatggactgattccccaccaatacatcgtcgtgcaggacacggaggatggggtggtggagagaagcagcccaaagtccgagattgaggtgatttcagagccacccgaggaaaaggtgaccgctcgggcaggtgcctcttgcccctcgggtggtcacgtagccgatatctacctggcaaacatcaataagtag

SEQ ID NO: 134529 - DNA, 3228 bp, synthetic construct
  misc_feature 1..3228: note = Description of Artificial Sequence: Synthetic coding sequence
  source 1..3228: mol_type = other DNA
atgtctagtcagacgaagtttaaaaaggacaaagaaatcatagcagagtatgaagcccagatcaaggagatccggacacagctggtggagcagtttaaatgcctggagcagcaatccgaaagtaggctgcagctactacaggacctgcaagagttctttaggaggaaagcagaaatcgaactcgagtactcacggagcttggagaaactggccgagcgcttttccagcaaaattcgctccagtagggagcaccagtttaagaaggatcaatatcttctgtcacctgtcaactgctggtacctggttctgcaccagactagaagagaaagcagggatcacgctactctgaacgatatttttatgaataatgttatcgtcaggctatcgcaaattagcgaagatgtcattagactgttcaagaagtcaaaggaaatcgggcttcagatgcacgaggaactgctgaaagtgactaacgagctttacacagttatgaagacttaccacatgtaccacgctgaaagtataagcgcagagtcaaagttgaaggaggctgaaaagcaggaagaaaagcagttcaataaatcaggagatctctctatgaatctgcttcggcacgaggataggccccagaggcggtcttcagtgaagaagatcgaaaagatgaaggaaaagcgccaagccaaatacagcgaaaacaaactaaagtgtacgaaagctagaaatgattaccttcttaatttggcagccacaaatgcagcgattagcaaatactacatccacgacgtgtccgatctcattgactgctgcgatctgggcttccacgcatcgctggcgcgcaccttccgtacatacctcagcgccgaatacaacctggagacctctaggcatgagggtttggatgtgattgaaaatgctgttgataatttggactcccgcagcgacaaacacacagtaatggacatgtgtaatcaggtgttttgcccgccccttaaattcgagtttcagcctcacatgggggacgaggtttgccaggtgtcagcacagcagcctgtccaaaccgaactccttatgcggtaccatcagcttcagtcacgcctcgccaccttgaagattgagaatgaagaggtacgcaagaccttagatgctaccatgcaaacattgcaggatatgctgactgttgaggactttgatgtgtcggacgcctttcagcactcgcggtcaacagaaagcgtgaagtccgcggcttcggaaacttatatgtccaaaattaacattgctaagagacgtgctaatcagcaggagaccgagatgttttacttcactaaattcaaagagtatgtgaacgggtccaacctcatcacaaagctgcaggcaaaacatgatcttctcaagcagacacttggagagggagaacgcgcggaatgtgggacgacccggggcaggcgaaatgcacgaaccagaaatcaggactcggggcaagctatcccattagtcgtggaatcttgtataaggtacattaacctttatggccttcagcaacaggggatcttccgtgtccccggctcacaggtggaagttaacgacattaagaatagcttcgaacgcggcgaggatcctctagtggacgatcagaatgagagggatattaactcagtcgccggcgtgctcaagctgtattttcgtggtctggagaaccccctcttccctaaagagcggttccaggacctaatcagcacgattaagttggagaatcccgccgagagggtccatcagatccagcagatcctcgtaacacttccccgggttgtgatcgttgtcatgagatacctgtttgcattcctcaaccacctgtcccagtactcagatgaaaatatgatggacccctacaatctggccatctgctttggacctacgctgatgcatattcccgatggacaagaccccgtaagttgtcaagctcatatcaacgaggttattaaaaccattattattcaccacgaagccattttcccgtcacctcgggagctggagggtcccgtgtacgaaaagtgcatggcgggcggagaagaatattgtgattcacctcattcagaacctggcgcgatagacgaagtggaccatgataacggcacagagccgcatacctccgacgaggaggtcgagcagatagaagctattgctaaattcgactatatggggaggagcccacgggaactcagcttcaagaagggcgccagcttactactatatcaccgtgccagcgaagactggtgggagggccgacataatggtgtggatggattaatccctcaccagtacattgtagttcaggacatggatgacgcattctccgactctctctcccagaaggcagactccgaagcttccagcgggccgttgctcgacgataaggcctcaagcaaaaatgacctccagtctcccacagaacacatatccgattacggcttcgggggggtgatgggccgagtgaggctgcgctctgatggcgctgccatcccaagacgacgatcgggcggagacacccactcccctcctcggggcctcggcccttcaatagacacgccaccccgcgctgccgcatgtccttcctctccgcataaaatccctcttacccgcggtaggattgagagcccagagaaaaggagaatggctactttcggcagcgcgggcagtattaactatccggacaaaaaggccctttccgaaggacactccatgcgctcaacatgtggatcgactcgtcactcatcattaggtgaccacaagagtctggaggctgaagcactggccgaagacattgagaagaccatgtcaaccgcgctccacgagttaagagagctggagcgccaaaacaccgtcaagcaggctccagacgtcgtcctggatacactcgaacccttaaagaaccctccagggcccgtgtccagtgagcctgcttccccactccacacaattgtaatcagagacccagacgcagccatgcggaggtcaagctcatcatccacagagatgatgacaacttttaagcccgccctgagcgcgagactggcgggcgcccagctgcgcccccccccaatgaggcctgttcgccctgttgtgcagcacaggtcgtcaagttcaagtagttcaggcgtcggcagccccgcagtcacccctactgagaaaatgtttccaaactcctccgcagacaaatcaggcactatgtag

SEQ ID NO: 134530 - DNA, 3300 bp, synthetic construct
  misc_feature 1..3300: note = Description of Artificial Sequence: Synthetic coding sequence
  source 1..3300: mol_type = other DNA
atgtcctcacagacaaagtttaagaaagataaggaaatcatagccgaatacgaagcccagattaaagaaattagaacacagcttgtcgaacaatttaagtgtctggaacaacagtcagagtcacgcctgcaattgctccaggatcttcaggaattctttagacgaaaagctgagatcgagctggagtactccaggtcacttgagaagctggcggagagattcagttcaaaaattagatccagtagagagcatcagtttaagaaggatcagtacctcctatcccccgttaactgttggtacctggtgttacaccagactagacgggagtcccgcgatcacgccactctgaatgatatcttcatgaataacgttatcgtgagactgagtcagattagtgaggacgtaatccggctgtttaaaaaatccaaagagattggactccaaatgcatgaagagctgttgaaggttaccaatgaattgtacactgtgatgaagacataccatatgtaccacgcagaatccattagcgctgaatcaaaactgaaggaagccgagaagcaggaggaaaagcaatttaataaatctggggaccttagtatgaacctcttaagacacgaggaccggccgcagcggcggtcatccgtaaaaaaaatagagaagatgaaggaaaaaagacaagcaaagtatagtgagaataagctcaagtgcacaaaagcccggaatgattacctgctgaacttagccgcgacaaacgccgccatttcgaaatactatatacacgatgtgagtgaccttatagactgttgcgatttgggcttccatgcttccctcgcgagaacatttcggacttacttaagcgcagagtacaatctcgagacctcaagacacgagggactggacgtgatagaaaatgccgtggacaatcttgacagccgctccgataaacataccgtgatggacatgtgtaatcaggtcttttgccccccattaaaatttgagtttcagcctcacatgggagatgaagtgtgccaggtaagtgcacagcagccagtccaaaccgaacttcttatgcggtaccaccagctacagagccggttggccactcttaaaatcgagaacgaggaagtaaggaagacattggacgcaaccatgcagacattgcaggacatgctgaccgtagaggactttgacgtgagcgacgctttccagcactcaagatccacggaatccgttaagtctgcggccagcgagacgtatatgtcaaaaatcaacatcgctaaacggcgggccaatcaacaggaaaccgagatgttttatttcactaagtttaaggagtacgttaacgggtccaatctcatcaccaagctacaggcaaagcacgacctactcaagcagactttaggagagggagaacgggcggagtgcggcacaacccggccaccatgccttccgccgaagccgcaaaaaatgagacgtccaagacccttaagcgtgtattctcacaagttgtttaacggaagcatggaggcatttatcaaggatagcgggcaagccatccccttggtagtggagtcctgtatccgatatattaacctctacggcctgcagcagcaaggcatctttagggttccagggtcacaggtggaggtgaacgacattaaaaatagcttcgagcgcggcgaggatcctttggtagacgaccagaacgagcgggatattaactccgtggctggcgtcctcaagctgtattttcgagggttagagaatcccctgtttccgaaagaacgttttcaggatttgattagtaccatcaagctcgaaaaccccgccgagagagtgcatcagatacagcagatcctagtcacacttccacgcgtcgtcatcgtcgtcatgcggtatctgtttgcctttctcaaccatttaagccagtatagcgacgaaaacatgatggatccctacaatctcgccatctgcttcgggccaaccctgatgcacatcccagacgggcaggaccccgtctcctgtcaggcacacattaacgaggtcatcaagacaattataatacaccacgaagcaatttttcctagccctcgtgagctggagggacctgtctacgagaagtgcatggccggcggcgaggagtactgcgattccccccattcagaaccaggggcaatcgatgaggttgaccacgataatgggactgaaccacatacatctgacgaagaggtggaacagattgaagctatagcgaagttcgattacatgggacgctcaccacgcgaattgtcgttcaagaagggcgcttctctgctattgtaccacagggccagtgaagattggtgggagggcagacacaatggtgtcgatggcctgatcccccatcagtacattgtcgtgcaggatatggatgacgcattctctgattccctgagccagaaagccgatagtgaagcatcctccggtcctctcctggacgataaggctagctccaaaaatgatttgcagagcccgaccgagcatatctcagattacggattcggtggagtgatgggcagggttcgtctccgtagtgacggagccgctatcccccgacgcagaagcggcggcgatacccatagcccccccaggggtcttggcccttctattgacacgccacccagagccgctgcttgcccatcttcccctcataaaattcccctcacccgcggcagaatagagagtcccgaaaagcgccgaatggcgacgtttgggtccgccggatcaatcaattatccagacaagaaggccctgagtgaaggccacagtatgaggagcacatgcggtagtacccgacattccagccttggcgatcataaatcgctggaagccgaagcactggctgaggacatcgaaaagaccatgtccacagctctccacgagttaagagaactggagcgacaaaatacagtgaaacaggcacccgacgtcgtgctcgacactctggaacccctaaagaacccgcctggcccagtctctagcgagcccgcatcccctctgcacaccatagtgattagggatccagacgcagccatgagacgctcaagtagtagtagcactgaaatgatgactacgttcaaacctgctctctctgcaagactcgcgggtgcccagctccgtccacctccaatgcggcctgttcgaccagtcgtgcagcatcggagctcctcatcatcgagttcaggcgtggggagccccgctgtgactcccaccgaaaagatgttcccaaactcctcagccgacaaatccggcacaatgtag

SEQ ID NO: 134531 - DNA, 1008 bp, synthetic construct
  misc_feature 1..1008: note = Description of Artificial Sequence: Synthetic coding sequence
  source 1..1008: mol_type = other DNA
atgaacaatgtgattgtgagactgtcccaaatttctgaagatgtgattaggttattcaaaaagtcaaaagagatcggactccaaatgcacgaggagctgctgaaggtgaccaatgaactatatacggtgatgaaaacgtatcatatgtaccacgctgaatccatatcggcggagtcaaagctgaaggaggctgagaaacaagaagaaaagcagtttaataaaagcggagacctttctatgaacctgctccggcacgaagatagaccccaacggcgctcgtctgtcaaaaagatcgaaaagatgaaagagaaacgccaggccaagtactccgaaaacaagttaaagtgtacaaaggcccgtaacgactacttactcaatctcgcagctacaaacgctgctatctccaagtactacatacacgacgtgtcagatctgattgattgctgcgacttgggctttcatgcatcattggctcgcaccttcagaacctacttaagcgctgagtataatctcgagacatcccggcacgaaggtctcgatgtgatagagaatgctgtcgacaacttggattctagaagtgataagcatactgtgatggacatgtgtaaccaagtattttgtcctccgcttaagtttgagtttcagcctcacatgggggacgaagtatgtcaggtgtccgctcagcagcctgtccagaccgagctcctcatgcgatatcatcagctacagagcagacttgctaccctcaagatagagaacgaggaggtgcggaagactctcgatgcaacaatgcagactctccaagacatgcttactgtggaggatttcgatgtaagtgatgcctttcagcactcccggagtaccgagtccgtgaaaagcgccgcaagtgagacctacatgagcaagatcaacatcgcaaaaaggagggcaaaccagcaggagaccgaaatgttctacttcacgaaaggacctgacgatgtattcccaatctgccatccccgattgtag

SEQ ID NO: 134532 - DNA, 360 bp, synthetic construct
  misc_feature 1..360: note = Description of Artificial Sequence: Synthetic coding sequence
  source 1..360: mol_type = other DNA
atgtcctggtggcgaaataatttttggatcatcctggctgtggccatcatcgttgtatctgttggcttggggctgattctttactgtgtgtgtaagtggcagcttagaagaggcaagaaatgggagatcgccaagccattgaagcacaagcaagtagacgaagagaaaatgtatgacttcctcctccttcggacagcatgtagtcttccacccttgcccctgcattacaggaccagcatgacagagacatatggtgtgcttctttgtcgccctgggtggtcagccctggcgcgtagtaggctgacggctgcctcagccagctgggttcaagcgattctccttccacagccccccaagtag

SEQ ID NO: 134533 - DNA, 438 bp, synthetic construct
  misc_feature 1..438: note = Description of Artificial Sequence: Synthetic coding sequence
  source 1..438: mol_type = other DNA
atggatacttttacagtacaagattcgacagccatgtcctggtggcgcaataacttttggatcatactggccgtcgcaatcattgtggtcagcgttggtcttggattgattttgtactgtgtttgcaaatggcagctccgaaggggaaagaaatgggagattgccaaaccactgaagcacaagcaggtcgacgaggagaaaatgtatgaaaacgttctgaacgaatctcctgttcagctgccaccattgccccccagaaactggcccagtctcgaagatagtagtccccaggaggcacccagccaacccccagctacatatagtctcgtgaataaagttaagaataagaaaaccgtgagtattccttcatacatcgaacctgaggatgactatgatgacgtcgaaattcctgccaacacagaaaaagcctccttctag

SEQ ID NO: 134534 - DNA, 438 bp, synthetic construct
  misc_feature 1..438: note = Description of Artificial Sequence: Synthetic coding sequence
  source 1..438: mol_type = other DNA
atggacaccttcaccgtgcaggattcgaccgccatgtcctggtggcgcaataacttttggattattttggcggtcgccatcatcgtagtcagcgtgggcctcgggcttattctctattgtgtgtgtaagtggcagctcaggcgcgggaagaaatgggagattgcaaaaccactaaaacacaagcaagtggatgaagagaaaatgtatgagaacgtgctgaatgagagtcccgttcagctgccacccctgcctccgcgcaactggccaagcctggaggacagttcaccccaggaggccccctcccaacctccagctacatatagccttgtaaataaggtgaagaataagaaaacagtgagcataccttcttatatagaaccagaggatgattacgatgacgtggagatcccagccaatactgagaaggccagcttttag

SEQ ID NO: 134535 - DNA, 1398 bp, synthetic construct
  misc_feature 1..1398: note = Description of Artificial Sequence: Synthetic coding sequence
  source 1..1398: mol_type = other DNA
atgaatgtgacctcattgttttcatttacttcccctgccgtgaaaaggctcttaggttggaaacagggggatgaggaagaaaaatgggccgaaaaagccgttgacgctctcgtcaaaaaactaaaaaagaaaaaaggagccatggaagagctggagaaagccttaagctgccctggtcagcctagcaattgcgtgaccattcctcgctccctagatggtcgacttcaggtgtcacataggaagggcctgccccacgtcatttactgccgcgtatggcggtggcccgacctgcagagccatcacgagttgaagccccttgagtgctgcgaatttccattcggcagtaagcagaaggaggtatgtatcaacccataccattacaaacgagtagaatccccagtgctgccccccgtactggttccacgccactcggagtacaatccacagcattccttgctggcccagttcaggaatttgggtcagaacgagcctcatatgccactaaatgcgaccttcccggactccttccagcagcccaactctcacccgtttccgcatagcccaaattcaagctacccgaatagtcctggctcatccagcagcacctacccacacagccccacatcaagtgacccgggaagcccattccagatgcccgccgacacacccccccctgcgtatcttcctcctgaagaccccatgacacaggacggcagtcagccaatggatacaaacatgatggcccccccgttaccttcggaaataaatagaggagatgtccaggcagtggcctacgaagagcccaagcattggtgttccatcgtgtactacgagctaaataatagggtcggagaagcatttcacgccagcagcacctctgtacttgtggacgggtttacagatccatctaataataaaaaccggttctgcctcggcctgctttctaatgtgaatagaaatagtacgatcgagaacacaaggcggcacatcggtaagggtgtgcacttgtattacgtgggcggtgaagtatacgcggaatgcttatctgattcctccatattcgttcagagtcggaactgcaattaccaccacggattccacccaaccactgtgtgcaagattcccagtggatgctctctaaaaatcttcaacaaccaagagttcgcccagctactggcccagtccgtgaatcacggattcgagaccgtctatgagttgaccaaaatgtgtacaataaggatgagttttgtgaagggctggggagccgaataccatcgccaagacgtcaccagtaccccttgctggatcgagatccatctccatgggcccctacagtggttggacaaggtattgacccagatgggatctccacacaaccctatcagctctgtgtcctag

SEQ ID NO: 134536 - DNA, 1398 bp, synthetic construct
  misc_feature 1..1398: note = Description of Artificial Sequence: Synthetic coding sequence
  source 1..1398: mol_type = other DNA
atgaatgtcactagcctctttagctttaccagcccggcggtgaaacggctcttggggtggaaacagggcgatgaggaggaaaagtgggccgagaaagctgtcgacgctttagtgaagaagttaaagaagaagaaaggcgccatggaagagctggagaaagcattatcgtgtcccggccagccatcgaattgtgtaacgatccctcgctccttggacgggcggctgcaggtgtcacaccgcaaaggcctgccccacgtcatctactgtcgggtgtggaggtggccggacttgcagtctcatcacgaactgaagccactggaatgctgtgagttccccttcgggagcaagcagaaagaggtatgcatcaacccatatcattataaacgagttgagtcgccagtattaccccctgtgttggtgccgcgtcactccgaatataacccccagcattcactgctcgctcaattccgaaatctagggcagaacgagccacacatgcctctcaacgcgaccttcccagactcattccagcagccaaatagtcaccccttcccccatagcccaaattccagctacccgaactctcccggtagcagttcaagtacatacccccactctccaactagctctgacccgggttcaccgtttcagatgcctgctgacactccaccacctgcttatctgcctcctgaggatcctatgacccaggacgggtctcagcctatggacaccaacatgatggcccccccgctgccttccgaaatcaatcggggagatgttcaggccgttgcctatgaagagccaaagcactggtgctccattgtgtactacgagctaaacaaccgcgtgggggaggctttccatgcttcttcaacttccgtgctcgtagacgggtttacggacccatctaataacaaaaacaggttctgcctgggactactgtccaatgtgaacaggaattctaccatcgagaatacccggcgccacataggcaagggcgtgcatctgtactatgttggaggcgaagtgtacgctgaatgtttaagcgatagctctatatttgtgcaatctagaaactgtaactaccaccatggatttcacccgactaccgtgtgcaaaataccatcaggctgcagcctcaagattttcaataaccaggagtttgcacagttgctggcacagtccgtgaaccacgggtttgagaccgtctacgagctcacaaaaatgtgtactattaggatgtcctttgtaaagggctggggagccgaataccacaggcaggatgttacgtcgacgccttgctggatcgagatccatctccatggcccccttcaatggttggacaaagtcttaacccagatgggaagtccccacaatccaatatcttcagtgtcctag

SEQ ID NO: 134537 - DNA, 177 bp, synthetic construct
  misc_feature 1..177: note = Description of Artificial Sequence: Synthetic coding sequence
  source 1..177: mol_type = other DNA
atgaatgttacctctctgttcagcttcacttcccccgccgtgaaaaggttgcttggatggaagcagggtgacgaagaggagaaatgggccgaaaaggccgtcgacgcactggtgaagaaactcaagaagaaaaagggcgcaatggaagagttagagaaggctctttcctgtccgtag

SEQ ID NO: 134538 - DNA, 33 bp, synthetic construct
  misc_feature 1..33: note = Description of Artificial Sequence: Synthetic coding sequence
  source 1..33: mol_type = other DNA
atgaacgtgacctctctgttttcctttacgtag

SEQ ID NO: 134539 - DNA, 288 bp, synthetic construct
  misc_feature 1..288: note = Description of Artificial Sequence: Synthetic coding sequence
  source 1..288: mol_type = other DNA
atgaatgttacgtcattattcagcttcacaagtcctgctgtgaagaggttgttaggatggaagcagggcgatgaggaagagaaatgggccgagaaggccgtggacgccctagttaagaagctgaagaaaaaaaagggcgccatggaggagcttgaaaaagccctgagctgccccgggcagccctccaactgtgtgactatccccagaagcttagatggaagactgcaggtgagccataggaaggggctgcctcatgtgatctattgtagggtgtggagatggccctag

SEQ ID NO: 134540 - DNA, 402 bp, synthetic construct
  misc_feature 1..402: note = Description of Artificial Sequence: Synthetic coding sequence
  source 1..402: mol_type = other DNA
atgaatgtgaccagtctgttcagctttacttctcctgctgtcaagcgtctactgggctggaaacaaggagatgaagaggagaaatgggcggagaaggcagttgatgctcttgtcaaaaagctcaagaagaagaagggcgccatggaagaactagagaaggccctaagttgcccgggacagccttctaactgcgttactatacctagaagcttggatgggcgcttgcaggtcagccacaggaaaggcctgcctcacgtcatctactgtcgggtctggcgctggcccgacctgcagtctcaccatgagctcaagcctctggagtgctgcgaattcccttttggaagtaaacaaaaagaagtctgtataaatccttatcattataagcgtgtggaatcgccctag

SEQ ID NO: 134541 - DNA, 321 bp, synthetic construct
  misc_feature 1..321: note = Description of Artificial Sequence: Synthetic coding sequence
  source 1..321: mol_type = other DNA
atgaacgttacaagcctcttttcctttacatctcctgctgtgaagcggctactgggctggaaacagggtgatgaggaagagaagtgggccgaaaaggctgtcgatgccctggtgaagaaactgaagaagaaaaagggagcaatggaagagttggagaaggctctgtcatgtcctggtcagccttccaactgcgtgaccataccccggtccctggatggccgtctccaagtttctcatcgcaagggcctgccacacgtgatctactgccgcgtgtggcgctggcctgatctacagtctcaccatgagctgaaaccgctctag

SEQ ID NO: 134542 - DNA, 339 bp, synthetic construct
  misc_feature 1..339: note = Description of Artificial Sequence: Synthetic coding sequence
  source 1..339: mol_type = other DNA
atgaacgtgactagcctgttttcttttacatcaccagctgtgaaaaggctattagggtggaagcaaggggacgaggaagaaaaatgggccgaaaaggcagtggacgccttggtaaagaaacttaaaaagaagaagggggccatggaggagcttgaaaaggctctctcatgccctgggcagccgagcaattgcgtgacaattcctcggtcactcgacggtcggcttcaggtgtctcataggaaaggcctccctcatgtgatctattgccgagtatggcgctggcctgatttgcagagtcaccacgagttaaaacccctcgagtgttgtgagtttccatag

SEQ ID NO: 134543 - DNA, 1398 bp, synthetic construct
  misc_feature 1..1398: note = Description of Artificial Sequence: Synthetic coding sequence
  source 1..1398: mol_type = other DNA
atgaacgtcacttcattgttcagctttacctctccggccgtgaagagactgctggggtggaagcagggagacgaagaggagaagtgggctgaaaaagctgtggacgcgctcgtcaaaaaacttaagaaaaagaaaggcgccatggaggagctggagaaggccctgtcttgcccaggtcagccgtcaaattgtgtaactatcccaaggtctttggacgggcgcctgcaggtctcacatcgtaaaggattgccccatgtgatttattgcagggtctggcggtggcctgacttgcagtctcaccatgagctcaagcccctggagtgctgtgagtttccttttggctcaaaacagaaggaggtctgcatcaacccttatcactacaagcgggtggagtcaccggttctccccccggtgttggtaccaaggcactctgaatataaccctcagcactccctgcttgcccaattccggaacctggggcaaaacgaaccccatatgcctctcaatgcaacctttccagactcctttcagcagcccaacagccaccccttccctcatagccccaacagctcataccccaacagtcccggcagcagctcttctacttatcctcactcgcctacgagttctgacccagggagcccgtttcagatgccagccgatactcctccccccgcctatcttccgcctgaggacccaatgacccaggacggctctcagccgatggatactaacatgatggcccccccactgccaagcgagataaaccgtggagacgtgcaggccgtcgcttatgaggaaccaaagcactggtgttcaatcgtgtattacgaactaaataatcgagtgggtgaggctttccacgcatcatcgacctccgtgttggtggatggcttcaccgatcctagcaataacaaaaatcggttctgcctggggcttctgtctaatgttaacagaaatagtaccatcgaaaatacacgcagacatatcgggaagggcgtgcatctgtactacgtggggggcgaggtatacgcagaatgtctgtctgatagttcaatcttcgtccagtctagaaactgtaactatcatcatgggtttcaccctacaaccgtgtgcaagatcccctctgggtgtagcctgaaaatattcaataatcaggaattcgcccagctgctagctcagtccgtcaatcacggctttgaaacagtgtatgaactcaccaagatgtgcactatacgtatgtccttcgtcaaaggctggggggcagagtatcacagacaggatgtaacgtctacaccatgctggatcgaaatccatctgcacggaccgctacagtggctggacaaggtattaacccagatggggagccctcataacccgataagttcagtgagttag

SEQ ID NO: 134544 - DNA, 1659 bp, synthetic construct
  misc_feature 1..1659: note = Description of Artificial Sequence: Synthetic coding sequence
  source 1..1659: mol_type = other DNA
atggacaatatgagcataacgaatactccaacatctaacgacgcatgcctctctatcgtgcattcccttatgtgccaccggcaaggcggagagtcagaaaccttcgcaaaacgggccatagagtcactggtaaaaaaactgaaagaaaaaaaggatgaactcgatagtttaatcacggccattaccactaacggtgcccacccaagcaagtgtgttacaattcagcgcaccctagacgggaggctgcaggtggccggcaggaaagggttccctcacgtgatctatgctcggctctggaggtggcccgaccttcacaagaatgagcttaagcacgtcaagtactgccagtacgcctttgacttgaagtgcgatagtgtttgtgtcaacccataccactacgagagggtggtctcccccggaattgatctgtccggactaacactgcagtctaacgcgccaagctccatgatggtgaaggacgaatacgtgcacgactttgaaggccagccaagtctctctaccgaagggcactctatccagaccattcagcacccgcctagtaatcgcgctagcacggagacctactcaacgcctgccctcctggctccatcggaaagtaatgctactagcaccgctaatttccctaatatccccgtggcttccacctcgcagcccgcctcaatcctgggaggctcgcattctgagggactgttgcagatcgcatctggtccccagccaggacagcaacagaatggattcacagggcagcccgccacctaccaccacaactcaaccacaacctggacaggcagccgaaccgccccctacacgcccaatttaccccatcaccagaacggccacctgcagcatcatccacccatgcccccccatcccgggcattattggccagtccataatgaactagcattccagccaccaatctcaaatcacccagcacctgagtactggtgcagcatcgcgtactttgagatggacgtgcaggttggggagacctttaaggtgccttctagctgtcccatagtgacagtcgacgggtatgtggatccttccggtggagataggttctgtctggggcaactttccaacgtacatcggaccgaagctatcgaaagagcgaggcttcacatagggaagggcgtgcagcttgagtgtaaaggtgagggagatgtctgggtgcgatgtctgtccgaccatgccgtatttgtccagtcatactacttggaccgcgaggcagggagggcccctggggacgcagtgcataagatttatcctagtgcctacattaaggtctttgatctcaggcagtgccaccgacagatgcagcagcaggcagcaactgctcaggccgctgccgctgcccaggctgcggctgtggccgggaacatccctggccccggaagcgtgggcggcatagccccagctatttctttgagtgccgccgccggtatcggagtggatgatcttagacgcctgtgtatacttagaatgtcttttgtgaaaggatggggacccgattatccacgccagtcgattaaagaaaccccgtgctggatagagatccatctgcatagagctttgcagctcctggatgaggtcttgcacaccatgccaattgctgatccccagccattggattag

SEQ ID NO: 134545 - DNA, 1659 bp, synthetic construct
  misc_feature 1..1659: note = Description of Artificial Sequence: Synthetic coding sequence
  source 1..1659: mol_type = other DNA
atggacaacatgtctatcaccaatacccctactagcaacgacgcctgtctctccattgtacattccttgatgtgtcaccgccagggcggcgagtctgagaccttcgccaaacgggccattgagtctttggttaaaaaactcaaggaaaagaaggacgagctcgactccctcatcacggccataaccacaaacggggctcatccaagcaagtgcgttactatccaaaggacactggacgggcgtctgcaggtcgctgggaggaagggttttcctcacgtgatctatgctaggctgtggagatggccggatctccacaaaaacgagctcaaacacgttaagtactgccagtatgcctttgatctgaaatgcgattccgtgtgcgttaatccctatcactacgagagagtagtttctccaggcatcgatctgtctgggctaacactgcaatccaatgcaccgtccagtatgatggtgaaggatgaatatgtgcacgatttcgaaggccagccttcattgagcaccgaaggacactccattcagacgatacaacacccacccagcaatcgtgccagtacagaaacatattctacacctgctctattggctcccagcgagagtaacgccacctctacagccaattttccaaacatcccagtggcctctacctctcagcctgctagcatccttggcgggagccactctgagggactccttcagattgcaagtggcccacagcccggccaacagcagaatgggtttactggtcaacctgccacttatcaccacaattccactactacctggactggctcccggactgctccatacaccccaaaccttcctcatcaccagaacggacacctacagcaccacccaccaatgccaccacacccgggccactactggcctgtccataacgagcttgccttccaacctcccattagcaatcacccagcacccgaatattggtgctcaatagcatacttcgaaatggacgtgcaggttggcgagacgttcaaagtcccttcatcatgtcctatcgttaccgtggatggctatgttgatccatccggcggtgaccgcttttgccttgggcagctctctaatgtgcacagaaccgaagctattgagagagcccggctccacataggcaagggggtgcagttagaatgcaaaggggaaggagatgtatgggtcaggtgcctgtctgatcatgctgtgttcgtccagtcttactatcttgacagggaggccggtcgagctccaggcgatgccgtgcataagatctaccctagtgcctacatcaaagtcttcgatctgaggcagtgtcatcgacaaatgcagcagcaagccgccacagctcaggcagccgccgcagcgcaggccgccgccgtggcaggaaatatccccgggcccggttcggttgggggcatcgccccagctatctctctgagcgccgccgctggcattggggtagacgatctgaggaggctctgcatcttgaggatgtccttcgtgaaaggatggggcccagattacccaagacagtctattaaagaaaccccctgctggatagaaatccacctccatcgggctctgcagctgctcgacgaggtgttgcatacaatgccaatagccgacccccagcccttggactag

SEQ ID NO: 134546 - DNA, 534 bp, synthetic construct
  misc_feature 1..534: note = Description of Artificial Sequence: Synthetic coding sequence
  source 1..534: mol_type = other DNA
atggacaatatgtccattacaaatacaccaacatctaatgacgcctgcctctcaattgtccattccttgatgtgtcacagacaggggggtgagagtgagaccttcgccaaacgggctattgagagcctcgttaaaaaactcaaagagaaaaaggatgaactcgattccctgattacagccatcacaacaaacggagcacacccctcgaagtgcgtaacgattcagagaacattagacggtcgcctgcaagtcgcgggtcggaaaggctttccccacgtcatttatgcccgcctgtggaggtggcctgatctacacaagaacgaactgaaacatgtgaaatattgtcagtacgcttttgaccttaagtgcgactcggtctgtgtcaacccctaccactacgagagggtggtcagcccgggcatagacctctcaggcctgacactgcagagtaatgagaacaactggtacttttctcaactgcttctggacttagacaagggtatgatccaggagcaggcaatccacggcccatag

SEQ ID NO: 134547 - DNA, 1311 bp, synthetic construct
  misc_feature 1..1311: note = Description of Artificial Sequence: Synthetic coding sequence
  source 1..1311: mol_type = other DNA
atggataatatgtcaattacaaatactccaacgagcaacgacgcttgtctctcaatagtccactcactgatgtgccatcgacagggcggcgaaagtgagacctttgcaaagcgagccatagagtctctggtgaagaagttgaaggaaaagaaggacgaactggactccttaattacggccattactactaacggcgctcaccctagtaaatgtgtgacgatccagaggactctggatggacgcctccaggtggctggccgcaaagggttccctcacgtgatctacgctaggctgtggaggtggccagatctgcacaagaatgagcttaaacacgttaaatattgtcaatatgcctttgatctgaaatgcgacagcgtttgtgtgaacccttaccactacgagcgcgtggtgagtccaggtatcgatctcagcggattgacacttcaatcgaacgctcctagttctatgatggtgaaggacgagtatgtgcatgatttcgaagggcagccttctctgagcacggagggccactctatccagacaatccagcacccacctagtaaccgcgcatccacagaaacctactcaactcctgctcttctcgctccatcagagtcaaacgccacctctaccgcgaatttcccaaacatacctgtagcatccacatcccagcccgcgtcaatcctggggggttcccacagtgagggactgctgcagatcgccagtgggccacagccgggacaacagcaaaacgggtttactggacaacctgctacataccatcacaacagtactacaacatggactggcagtcgcaccgccccctacacccccaatttgcctcatcaccagaatggtcatttgcagcatcacccaccaatgcctcctcacccgggacactactggccagtgcacaacgagctcgcctttcaaccaccaatctcaaaccatcctgctccagagtactggtgttccattgcgtattttgaaatggacgtccaagttggtgagacctttaaagtgccttcatcatgcccgatagttactgtagatggctatgttgatcctagcggaggggaccggttctgcctgggacaactcagcaacgttcacaggacagaagccatcgagagggcccgcctgcacatcggtaagggagtacagttagaatgcaagggagaaggtgacgtatgggtgaggtgcttatctgaccacgctgtgtttgtgcagagctattaccttgatcgagaggctgggcgtgcccccggcgacgctgtccacaaaatttaccccagtgcgtatatcaaatag

SEQ ID NO: 134548 - DNA, 243 bp, synthetic construct
  misc_feature 1..243: note = Description of Artificial Sequence: Synthetic coding sequence
  source 1..243: mol_type = other DNA
atgacctctatggctagcctctttagtttcactagcccagcggtcaaacgtttgctgggatggaagcagggcgatgaggaggagaagtgggctgaaaaggcagtcgacgctctagtgaaaaagcttaagaagaaaaagggcgcaatggaggaactggaaaaggctctttcaagccccggccaacctagtaaatgcgtgacaatacctaggtcactggacggacgactgcaggttagtcactag

SEQ ID NO: 134549 - DNA, 387 bp, synthetic construct
  misc_feature 1..387: note = Description of Artificial Sequence: Synthetic coding sequence
  source 1..387: mol_type = other DNA
atgaccagcatggcaagcctgtttagcttcacgagtcccgccgtcaaacggctccttgggtggaaacagggcgatgaagaggagaaatgggcagagaaagccgtagacgcactcgtgaagaaactcaagaagaagaaaggtgcaatggaagagctggaaaaggctctatcctcccccggccagccatctaagtgcgtgactatccctcgttcactagatgggcggcttcaggtctcacataggaaagggttaccacatgttatttattgccgggtgtggagatggcctgacctccagtcacatcacgagctcaagccattagacatctgtgagtttcccttcggatccaaacagaaagaggtctgcattaacccttaccactactag

SEQ ID NO: 134550 - skipped

SEQ ID NO: 134551 - DNA, 405 bp, synthetic construct
  misc_feature 1..405: note = Description of Artificial Sequence: Synthetic coding sequence
  source 1..405: mol_type = other DNA
atgacctctatggcatccttattttccttcacgagccccgcagtgaagcggctgctggggtggaagcaaggagacgaggaggagaagtgggctgagaaagccgtggacgccctcgtaaagaagctgaagaagaaaaagggggccatggaggagcttgagaaggcactgtcctctcccggccagccctcgaagtgcgtgacgatcccaagaagcctggacgggcgcctgcaggtttcacaccggaagggactgccgcatgttatttactgccgcgtgtggagatggccagacctgcaatcccatcacgagcttaaacccctcgacatttgtgagtttccatttggctcgaagcagaaggaagtttgcatcaatccataccactacaagagggtggagtcaccgtag

SEQ ID NO: 134552 - skipped

SEQ ID NO: 134553 - DNA, 1395 bp, synthetic construct
  misc_feature 1..1395: note = Description of Artificial Sequence: Synthetic coding sequence
  source 1..1395: mol_type = other DNA
atgacctccatggccagtctgttcagctttacctccccagcagttaagcgactgctaggatggaaacagggggatgaggaagagaaatgggcagagaaagctgtggatgccctcgtgaaaaaactcaagaaaaagaaaggggctatggaggaactggagaaggccctttccagtcctgggcagcccagtaagtgcgtgacgatcccaaggtctctggacggcagactccaggtgtcacataggaagggcctcccacatgtaatctactgtcgtgtttggcggtggccagatctccagtctcaccacgagctgaagccactggacatttgtgagtttcctttcggatctaaacaaaaagaggtgtgtatcaatccataccactataaacgcgtggagagccctgtgcttcctcctgtgctcgttcccaggcataacgaattcaaccctcagcacagcctcctagtgcagtttaggaacctctctcacaacgagccccacatgcctcagaacgccacctttcccgactcttttcaccaacctaacaatacaccttttccgctgtcacctaatagtccgtacccgccctcaccagcaagctccacttatccaaattcccccgcctcaagtgggcctggtagcccgttccagctgcccgccgatacaccgcctccagcatacatgcctcccgatgaccagatgggccaggataactcacaacccatggacacaagtaataatatgattcctcaaattatgccctccatctcgagcagagatgtgcaacctgtggcttatgaggagcctaaacattggtgtagtatagtctattatgagcttaataaccgagtaggagaggcgttccatgctagcagtaccagcgtgctcgtggatggtttcactgacccatctaacaacaaatccagattctgtttaggtttactctctaatgtgaatcgcaactcgaccattgaaaatacacgcagacatatcggaaagggcgtgcatctgtactatgtcggtggcgaagtatacgccgagtgtctgtccgattcctcaatcttcgtccagagtcggaattgcaatttccaccatggctttcatcctaccaccgtgtgtaaaattccgtcttcatgttcgttgaaaatctttaacaatcaggaattcgctcaactgctggcccagagcgttaaccatggatttgaggcagtttatgaactgaccaaaatgtgtacaatacgtatgtcttttgtgaaggggtggggggcagagtaccaccggcaagatgttacttcaaccccgtgttggatcgagatcctgcacggccctctccagtggctagataaggtcctgacccagatgggaagccctttgaaccctatctcctcagtttcctag

SEQ ID NO: 134554 - DNA, 1395 bp, synthetic construct
  misc_feature 1..1395: note = Description of Artificial Sequence: Synthetic coding sequence
  source 1..1395: mol_type = other DNA
atgactagcatggcctcgctcttctcattcacctcgccagctgttaaaaggttacttggctggaaacaaggcgacgaggaagagaagtgggctgagaaggccgtggatgcactggttaaaaaactcaaaaaaaaaaagggggcaatggaagaactggaaaaagctctctctagtcctggtcagccaagcaagtgtgtgaccattccccgttcactcgacgggcgattgcaagtgtcccacaggaaggggctgcctcatgtgatttactgccgcgtttggagatggcccgatctgcagagccaccatgaattgaaacccctggacatatgcgagtttccatttggaagtaaacagaaggaggtgtgtatcaacccttaccattataagcgcgtcgaaagtcctgtgcttcccccagtcctagtgccacgtcacaacgaatttaaccctcagcacagcctgctggtgcagttccgtaatttgtcccataatgagccgcacatgccccagaatgcaactttccccgactctttccaccagcccaataataccccttttccgctatctcccaattcaccatatcctccaagcccagcctcttctacatatcccaattctcccgcctcatctggcccagggtctcccttccagctgcccgccgacacacccccacccgcatacatgcctcccgacgaccagatgggacaagataactcccagcccatggacacatcgaacaacatgatcccgcaaattatgccctctatatccagtcgggacgttcagcccgtggcctacgaagagcccaagcattggtgctctattgtttattacgaattaaataatcgcgtcggtgaggcctttcatgcttcatccacatctgtgcttgtggacggctttacagacccctcaaacaataaatcccgtttctgtctcggcctactctccaatgtgaataggaattcaactattgaaaacacccggaggcacatcggcaaaggcgtgcacctttattacgtgggaggtgaggtgtacgcagaatgtcttagcgactcatccatcttcgtccaaagtcgaaactgtaatttccatcatgggttccatcccacaacagtctgtaagattccttcctcctgttcactcaagatatttaacaaccaggagtttgcccaacttctggcccagtcagtgaatcacggcttcgaggcggtctatgaattgacaaaaatgtgcacaattcggatgtcgttcgttaagggctggggggctgagtaccataggcaggacgtgacctctactccgtgctggattgagatactgcatgggccactccagtggctggataaagtgctgactcagatgggctctccactgaatccaatttcgagcgtgtcctag

SEQ ID NO: 134555 - DNA, 1491 bp, synthetic construct
  misc_feature 1..1491: note = Description of Artificial Sequence: Synthetic coding sequence
  source 1..1491: mol_type = other DNA
atgttcagatctaagcgctccggcctggttaggcgcttatggcgttctcgcgtcgtacccgaccgcgaagagggagggtcgggcggcggcggtggaggggatgaggacggctccctgggtagccgcgcggaacccgctcctcgagccagggagggaggaggatgtggtcggtctgaagttaggcctgttgcgcccaggagacccagagatgctgtaggccaaaggggcgcccagggtgccggccgacgaagacgtgcggggggcccccctaggccgatgagtgaacctggtgctggagctggcagttccctattggatgtcgccgagcctgggggtcctggttggctaccagagagtgattgcgaaaccgtaacctgttgtctgtttagtgaacgcgatgccgccggagcgccgcgggatgcttcagatcctctcgccggcgccgccctcgagccagctggaggaggccgatcgcgggaagctagatcccggttgctgctccttgagcaggaactaaagaccgtcacctatagcctccttaaaagactcaaagaaaggtcccttgatactctgctcgaagcagtggaaagccgggggggtgtgcccgggggctgcgttctcgttccccgggcggatctgcgacttggcggccagcccgctccgccacaacttttactcggacgtctgttcaggtggcctgaccttcagcacgcagtggagctgaagcccctgtgtggatgccacagttttgctgctgcggctgatggtcccactgtatgttgcaatccttatcacttctcgcgcctctgtggacccgaaagtccccctcctccttattctagattgagtccacgggatgagtataaaccactggacctctcagactctacattgtcttatacagaaaccgaggctaccaactcactcatcactgcgcctggcgaatttagcgatgctagtatgtctccggatgccaccaaaccctctcactggtgctcggtcgcttattgggaacatcggacgcgcgtgggccgtttgtatgccgtttatgaccaggccgtgtctattttttatgacttgccgcaggggtccggcttctgtctcggtcaactcaacttggaacagcgctctgagtcagtcagaaggacccgaagtaagattggctttggcattctcctcagtaaagagcccgacggcgtgtgggcctacaatcggggggagcatccgattttcgtgaattctccaacactcgacgcacctgggggtcgcgccttggttgtgcgcaaggtacctcccgggtattcgattaaggtttttgactttgagcggtctggtctgcagcatgcccctgagccggacgctgccgatggcccttacgatccaaattcagtaaggatcagcttcgcaaaaggatggggaccatgttacagtagacagttcataacctcctgcccttgctggttggaaattctgcttaacaatcctcgctag

SEQ ID NO: 134556 - DNA, 708 bp, synthetic construct
  misc_feature 1..708: note = Description of Artificial Sequence: Synthetic coding sequence
  source 1..708: mol_type = other DNA
atgagtagaatgggaaaaccaatcgaaacacagaaatctccaccccccccctactcacgattatccccccgggatgagtataagcctttggacttatccgattcaaccctcagttacaccgagactgaagccactaactctctcattaccgcacctggtgagtttagtgacgcttctatgtctcccgatgctactaagccgagccactggtgctctgtggcctactgggagcacagaacccgcgtggggagactctacgcggtgtacgaccaggccgtttccatattctacgatctccctcagggtagtggattttgcctgggacagctgaacctggagcagcgaagtgagagcgtacggagaactcgttccaaaatcggctttgggattctacttagcaaagaacccgacggggtctgggcttacaatcggggggaacaccctattttcgtgaacagccctaccctcgacgcacccgggggacgcgcacttgtcgtgcggaaggttcccccaggctatagtattaaggtgttcgatttcgaacggtctggcctccaacacgctcctgagccagatgccgcagatggtccttacgaccccaatagcgtgcgcattagtttcgctaagggctggggcccgtgttactccagacagtttataacaagttgcccttgctggttggaaatactgctgaacaacccacggtag

SEQ ID NO: 134557 - DNA, 1017 bp, synthetic construct
  misc_feature 1..1017: note = Description of Artificial Sequence: Synthetic coding sequence
  source 1..1017: mol_type = other DNA
atgtttcggagcaagcgctccggactggtccgtcgcctgtggaggtctcgggtggtgcctgatcgggaggagggcggatccggaggcggcggcggaggtgatgaggacggcagccttggaagtagagctgagcctgctccccgagcgcgggagggcggggggtgtggaaggtcagaggttaggccggtggcccctcggaggcctcgagacgcggtcgggcagcgaggagcacagggagctggccgacggaggagggcaggaggacccccccgccctatgtctgaaccaggagctggcgctggttcctccctcctcgacgtcgctgagccaggaggtcctggatggctcccggaaagtgattgcgaaaccgtgacttgctgcctgtttagcgaacgcgatgccgcaggcgctccgagagatgccagtgatcccctcgctggtgccgcgctcgaacctgccggcggcggtaggtcccgagaagcgaggagtaggctgctgctgttggagcaggaactgaagacggtgacatactcactcttgaaaaggctcaaagagcggagtctggacactcttttggaggctgttgagagtcgcggaggcgttcccgggggctgtgtccttgtaccccgcgctgatctcaggcttggtggccaaccagctcctcctcagctcctcctgggcagactgttcagatggcccgacctacagcacgccgttgagctaaaacctctatgcggatgccactcgttcgctgcggccgccgacggaccaacagtgtgttgtaacccctatcatttttcccggctttgcggaccagagtctcccccccccccgtactctcggctttctccccgggatgagtataaaccactggatctttctgactctacactatcctataccgaaaccgaagctaccaatagcctgatcacggctccaggcgaattttctgcagccgacgccggcatcggcagcagaggtaatcgcggacttgagagtagtgtgccatgcagctag

SEQ ID NO: 134558 - DNA, 1293 bp, synthetic construct
  misc_feature 1..1293: note = Description of Artificial Sequence: Synthetic coding sequence
  source 1..1293: mol_type = other DNA
atgcacagcacaacacctatctcttccctatttagctttacttcaccagcagtaaagcggctccttggctggaagcaaggcgacgaggaggagaagtgggccgaaaaagccgtggactctttggttaagaagctgaagaagaaaaaaggtgctatggacgaactggagcgcgcactgtcttgtcctggccagccgtccaaatgcgtcacaatccccagatctctggatgggcggctgcaggtgtctcacaggaagggcctgccacatgtcatttattgtcgagtctggcggtggccggatctccaatcacaccatgagctgaaacccctcgaatgttgcgaatttcccttcgggtctaaacaaaaggaggtgtgcattaatccataccattatagacgcgtcgaaacacccgtcctgccaccagtattggtaccccgacattcagaatataatcctcagctgtctttgctggccaaattccgatctgccagcctgcacagcgagcctctgatgccacacaatgccacgtaccctgactcctttcaacagcctccatgtagcgcattaccaccttccccctctcacgccttttctcagtctccttgcaccgcatcctatccacactcacccggaagtccgagcgagcccgaatctccctatcagcatagcgactttcgcccagtttgttatgaggagcctcagcactggtgtagtgtggcctactatgagctgaacaaccgagtgggcgagacattccaggctagcagccggtccgtgctcattgacgggttcacggatccaagcaacaaccgcaatcggttctgcttgggacttctgtccaatgtgaaccggaattcaacaattgagaatacacgacgacacataggaaagggggtgcacctatactacgtgggcggagaagtttacgccgaatgcgtctcagatagctccattttcgttcagtctcgtaactgcaattatcaacatggattccaccctgccaccgtctgcaaaatccctagtggatgctcccttaaggtctttaacaatcagctttttgcccagcttcttgcacagagcgttcaccacggttttgaagtggtgtatgagctgactaaaatgtgcactattcgaatgtccttcgttaaaggctggggtgctgagtaccatagacaggatgtgacctccactccatgctggatcgagattcatctccatggccctctgcagtggcttgataaggtattaacccagatggggtcaccacataatcccatcagttccgtgtcttag

SEQ ID NO: 134559 - DNA, 1404 bp, synthetic construct
  misc_feature 1..1404: note = Description of Artificial Sequence: Synthetic coding sequence
  source 1..1404: mol_type = other DNA
atgcattctacaacccccattagctcactgttttccttcaccagtccggcagttaagcgcctactaggttggaagcagggcgacgaagaggaaaagtgggctgaaaaagctgtagactccctggtcaagaagttgaagaagaagaagggggctatggacgagctagaacgagcccttagctgccccggccagcccagcaaatgcgtgacgatccctagaagccttgacggcagacttcaggtgagccatcgcaagggcctaccacacgtgatctattgccgcgtgtggaggtggccagatctccaaagtcaccacgagctcaagcccttagaatgctgcgagttcccgtttggctcaaagcaaaaggaagtttgcattaacccatatcattaccggcgggttgagactccagtgctgcctccagttttggtcccacgtcacagtgaatataatccccaactgagcctgctcgccaaattccgctcagcttcgctccatagcgagccccttatgccccacaacgctacgtaccctgatagcttccagcaacctccctgttcggctctgcccccgtctccatcccacgccttcagccagtcaccctgcactgccagctaccctcattctcccggcagcccttctgagcctgagagtccttaccagcactccgtggacacaccacccttgccctaccatgccaccgaggcatctgagacccagtccgggcagccagttgatgccacggcagatcgccatgtagtcctgtccatacccaacggagatttccggccggtttgctacgaggagcctcagcattggtgcagtgttgcatactatgagttaaacaatcgggtgggcgaaaccttccaggccagcagccggtcggtactaattgacggctttaccgaccccagtaacaataggaacaggttttgcctggggctcctgtccaacgtgaatcggaatagtaccatcgaaaacacccgccggcatattggtaagggagtgcacctgtactacgttgggggcgaagtctacgccgagtgtgtgtccgacagtagcatattcgtgcagagcaggaactgtaactatcagcatggctttcaccctgccacggtgtgcaaaattccctctgggtgttctcttaaagtctttaacaatcaactgttcgcccagctcctcgcgcagtctgttcatcatggcttcgaagtggtgtacgagctgactaaaatgtgcactattcgtatgtcatttgtgaaaggttggggggcggaatatcacaggcaggatgtcacgtctactccctgctggattgagattcatttgcacggacccctgcaatggttggacaaggtgctgactcagatgggtagtccacataaccctatctcctccgtctcttag

SEQ ID NO: 134560 - DNA, 1404 bp, synthetic construct
  misc_feature 1..1404: note = Description of Artificial Sequence: Synthetic coding sequence
  source 1..1404: mol_type = other DNA
atgcactctaccacgcccatttccagtcttttctcgttcaccagtccagccgtgaagcggctattaggctggaaacagggagacgaagaagagaaatgggctgaaaaagccgtggattcacttgtgaaaaaactgaagaagaagaaaggggccatggacgaacttgagcgcgccctaagctgcccgggacagcccagcaagtgcgtaaccattccgcgttcgctggatggcaggctgcaggttagtcaccgcaagggcttaccccacgtgatttactgtcgagtttggcgttggccggacctgcagtctcatcatgaattgaaacctctggaatgctgcgagtttcccttcggctcaaaacaaaaagaggtctgtattaacccttatcactaccggcgggtagagacgccagtcctgcctcccgtgctggtcccgcgacactctgaatacaatccccagctgagcctcctggccaaattccggagcgcctcactacatagcgagccactgatgcctcacaatgcaacttaccctgactcatttcagcagcccccctgctccgcattgcccccaagcccttcccacgcattcagccagagcccatgcacagcttcatacccccattctcccgggtctccttccgagcccgaaagtccctatcagcactctgtggacacccctcccctcccgtatcacgccaccgaggcctccgaaactcagagcggacagccagttgacgcaacagccgatagacatgtggtgttgagtattcctaatggtgactttcggcctgtctgctacgaagaaccccaacattggtgttcagttgcctactatgaactcaacaatcgcgtgggagagactttccaggcgtcatcccgttcggtgctgatcgacggcttcaccgatccatccaacaatcgtaataggttttgcctgggattattgtccaatgtgaacagaaacagtactattgagaacacgcgccgccatatcggaaagggtgtgcatctttactatgtgggtggagaggtgtacgccgaatgtgtgtccgactcgtcaatcttcgtccagtccagaaattgtaattaccaacatggattccaccccgcaacagtatgcaaaatcccctcaggctgctccctgaaagtgtttaacaaccagctgttcgcccagctgctggctcagtcagtgcaccatggtttcgaggtcgtgtacgagctaaccaaaatgtgtactataagaatgtcgttcgttaaaggatggggcgccgagtatcaccgccaggatgtgactagtacaccatgctggatcgagatccacctacacggcccacttcaatggctcgacaaagtgctaactcagatggggtccccccacaatcctatctccagcgttagttag

SEQ ID NO: 134561 - DNA, 1191 bp, synthetic construct
  misc_feature 1..1191: note = Description of Artificial Sequence: Synthetic coding sequence
  source 1..1191: mol_type = other DNA
atgaaagctgtcaagtcggagcgggaacgcggatctcggcggcgacaccgggacggagatgtcgtgctccctgccggcgtggtcgtcaagcaagagcgtttatctccagaagtcgcacccccagctcataggaggcccgaccactctggtggatctccttcgcccccaacttcagaacccgccagaagtggccacaggggaaatagagcacgcggagtctcccggtcaccccctaaaaagaaaaataaggcatctgggcgcaggtccaagtccccccggtcaaagaggaatagatctccccaccactcaaccgtgaaggtgaagcaggaacgggaagaccacccacgccgcggccgggaggatagacagcaccgcgagccttcggagcaggaacacaggagggccagaaatagtgacagggaccgacaccgcgggcacagccaccagaggagaacatcgaacgaacggcccgggtcagggcaaggccagggaagagatagggatacacagaatttgcaggctcaagaggaagagcgtgagttctacaatgcgcggaggcgagagcatcgacagaggaacgacgtggggggagggggctccgagagccaagaattagtaccgagacccggcggcaataataaagagaaggaagtgccggccaaggaaaaaccaagtttcgaactgagcggcgctcttctcgaagataccaacactttcagaggcgtggttatcaagtactcagagccccctgaggctcgaattcccaaaaaacgctggaggctgtaccccttcaagaatgatgaggtgctgcccgtgatgtacatccacagacagagtgcatatttgctcggtaggcacagacgcatcgcagatattcctatcgaccacccttcctgtagcaagcaacacgctgtctttcagtataggcttgtggaatatacgcgcgcggacggcacagtgggccgacgcgttaagccttatattattgatctgggaagcggtaatggcacttttctgaataataagagaatagaaccacagagatattacgaactgaaggagaaggacgtgctcaaattcggtttctcctctagggagtatgttctgctgcacgaaagtagcgacacaagcgaaatagataggaaagacgacgaggacgaggaagaggaagaggaagtgtcagatagttag

SEQ ID NO: 134562 - DNA, 1143 bp, synthetic construct
  misc_feature 1..1143: note = Description of Artificial Sequence: Synthetic coding sequence
  source 1..1143: mol_type = other DNA
atgaaagccgtaaagagcgagcgagaaggcgtagtggtcaagcaggaaagactctcacccgaggtggctccacccgcacatagaaggccggaccatagcgggggaagtcctagcccaccaacatcagaaccagccagatctggacatcggggtaacagggcaaggggggtttcacggtctccaccaaagaaaaagaataaggcctctggccgacggagtaagagtcccagaagtaaacggaatcgctccccccaccactccactgtgaaggtgaaacaggagcgcgaagaccacccacgccgcgggcgggaggaccgacagcatagggaaccctcagagcaagagcatcgaagagcgaggaactctgaccgagaccggcaccggggccacagccaccaaagaagaacatccaatgaaaggcctggtagcggccagggacagggccgtgaccgcgacacacagaacctacaggctcaggaggaggagcgagagttttacaacgcccggcgccgtgaacaccgacagcgcaacgacgtgggaggagggggatctgagagtcaggaactggttcctagacccggggggaataataaagaaaaagaggtgcctgctaaagagaagcccagttttgaactgagcggagcacttttggaagatacaaacaccttcaggggggtcgtaattaagtattccgagccccctgaagccaggatcccaaagaagaggtggagactttacccttttaagaacgatgaggtcctgcctgtcatgtacatccataggcaatctgcctaccttctgggcaggcatcgcaggatcgccgatatcccgattgaccatcccagttgcagtaagcagcatgcagtgtttcagtataggctcgtagaatacaccagagctgacgggaccgtagggcgacgcgtcaagccatatattattgatctgggatccggcaacgggacgtttctgaacaataagcggattgagccacaaagatactacgagttgaaagagaaggacgtgcttaaatttggcttctccagtagagaatatgtgctcctgcatgaaagcagtgacactagtgagattgacaggaaggacgacgaggacgaagaggaagaggaagaggtgtccgacagctag

SEQ ID NO: 134563 - DNA, 2274 bp, synthetic construct
  misc_feature 1..2274: note = Description of Artificial Sequence: Synthetic coding sequence
  source 1..2274: mol_type = other DNA
atgtctaatccaggaacaaggaggaatggttcttccattaaaattaggctgaccgttctttgcgctaagaacctggcaaaaaaagatttctttcggctcccagatccgttcgccaagattgtggtcgacggatctggacagtgccattccacggatacagtcaagaacacattggaccctaaatggaaccagcactacgacctctacgtgggcaagacagacagcattaccatcagcgtttggaatcacaaaaagattcataaaaaacagggagcaggcttcctggggtgtgtgcgtctgttgtccaacgctatctctcgacttaaagatactggctaccagcgattggatttatgcaagctcaatccatctgacactgacgctgtccgagggcaaatcgttgtgagtctacagactagagatcgcattggcaccggaggtagtgtagtcgactgtcgagggctcttggaaaatgaaggcaccgtgtacgaggacagtgggcccggaagacccctgtcttgctttatggaagaaccggcgccatataccgatagcaccggcgccgcagccggcggagggaattgccggtttgttgagagccccagccaggaccagcgcttacaggctcaacgacttaggaatccagatgtaagggggagtttgcagacaccgcaaaacagaccacacgggcatcagtcccctgagttacccgaaggctacgagcagcggactacggtgcagggccaggtgtactttcttcacacgcaaacgggtgtatctacatggcacgatccgcgcatcccttctcctagcgggacaatccctggtggcgatgccgcttttctttacgagttccttctgcaggggcacacttcagaaccaagagacctgaatagtgtgaattgtgacgagttaggccctttgccacccgggtgggaggtccgcagtaccgtgtctggcaggatctatttcgttgatcataacaatcgaaccactcaattcaccgacccaagactgcaccatattatgaatcaccaatgccagcttaaagagccctcccagcctctgcctcttccatccgaaggaagccttgaggatgaggagttacccgcacagagatacgagagagatctcgtgcagaagctgaaggtgctgagacacgaattgtccttacagcagcctcaggcaggacactgccggatcgaggtttcaagggaggaaatattcgaagagtcatatagacagattatgaagatgaggccaaaggacctgaagaagagactgatggtgaaattccggggagaggaaggtctggactatggaggagttgcaagggagtggctgtatctgctttgtcacgaaatgctcaatccctattacggactgttccagtatagcactgacaatatttatatgctgcaaattaatcccgacagcagcataaatcccgatcacctgtcttacttccactttgtcggtcgaatcatgggattagccgtttttcatggtcattatattaacggaggatttactgtgccattttacaagcagctgcttggtaagcctatacaactatcggacctcgaaagcgttgacccggagttgcacaagtcgctagtgtggatcctggaaaacgacattacccctgtattggatcatacattttgtgtcgagcataacgcgtttggacgcatactccaacatgaactgaagccaaacggaagaaatgtgccagtcacggaggaaaataaaaaggagtacgtgcgcctctacgtgaactggagattcatgaggggcattgaagcccagtttctggctctccaaaaaggtttcaatgagctcattccccagcatctgttaaagccttttgatcagaaggaactggagctgatcatcggcggcctggacaaaatcgacctgaacgattggaagtctaacacgaggttgaagcactgtgtggctgatagcaacatcgtgagatggttttggcaggccgtggagacctttgatgaggagagacgcgcccgcctcctgcaattcgtcaccggaagcacgagggttcccctgcagggttttaaggctttacagggctccactggggcagcaggcccacggttattcacaatacacctgattgacgccaatacggacaacttgcccaaggcccatacttgtttcaatagaatcgatattcctccatatgagtcctatgaaaaactgtatgagaagctgttgacagctgtggaagaaacttgcggattcgcagtggaatag

SEQ ID NO: 134564 - DNA, 2196 bp, synthetic construct
  misc_feature 1..2196: note = Description of Artificial Sequence: Synthetic coding sequence
  source 1..2196: mol_type = other DNA
atgtccaaccccggcacgcgccgaaacgggagctcgattaaaattagactgaccgtgctgtgtgccaaaaatctggccaagaaggactttttcaggctgcctgatcctttcgccaagattgtcgtggacggttccggacagtgccacagtactgacactgtgaaaaataccctcgatccaaaatggaaccaacattacgacctctatgtaggcaagacagactcgataaccatttcagtctggaatcataagaagattcacaagaagcagggggcaggcttcctcggttgtgtcagactgcttagcaacgccatcagtcggctcaaagacacaggatatcagcgcctggatctttgtaaactcaatccttcagatacagacgccgtgcgcgggcagatcgtggtgagtctccaaacacgcgacaggattggcacaggggggtcagtcgtggattgtcgtgggctgctggagaacgagggaactgtatatgaagactcaggcccaggacgtcccttgtcctgctttatggaggagccggctccctatacagacagtaccggcgcagctgcaggcggaggcaattgccgctttgtggaatccccttcccaggaccagcggctgcaggctcagagactgaggaatcctgacgtgagaggatctttgcaaacaccacagaatcgccctcatggacatcaaagcccggagctgccagaaggctacgagcaacggacgaccgttcaggggcaagtatacttccttcatacacaaacaggcgtctcaacttggcatgacccacggatacctagagatctaaactcagtaaactgcgacgagctcggacccctgccgccagggtgggaggtccggtctaccgtctctggaagaatctacttcgtggaccataacaacaggacaacacaatttacggaccctagactgcatcacatcatgaaccatcagtgtcaactcaaagagcctagccagccgctgccactgccttccgaaggctccttagaggacgaagaactgcctgcccagcggtacgaaagagatctggtccagaagctcaaagtacttagacacgagctgtcactccagcagcctcaggctggtcactgcagaattgaggtatcccgggaagaaatcttcgaagaatcgtatcgtcaaattatgaagatgagacctaaagacctgaagaagcggcttatggtgaaattccggggcgaagaaggtctggactacggcggagttgcccgcgaatggctctacctgctctgccacgagatgctcaacccttactacggtctctttcagtatagcaccgataacatctacatgctgcaaatcaaccctgactccagcatcaatcctgaccatctgtcgtacttccacttcgtggggagaattatgggactggctgttttccatggacactacataaacggcggtttcactgttcccttctataagcagttgctgggaaagcccatacagctcagcgacttggaaagcgtggatcccgaactccataagagcctagtgtggatacttgagaatgatataacgccagtgctcgatcataccttttgcgtggagcacaacgcattcggacggatcctgcagcatgaactgaagcctaacggacgaaatgtgcccgtgacggaagagaacaaaaaggagtacgtccgcctgtacgttaactggcggttcatgaggggcattgaagctcagttcctggcactacagaagggtttcaatgagctgatacctcaacacctgctgaaacccttcgaccaaaaagagctagaacttatcatagggggcctggacaaaatcgatttaaatgactggaaaagcaacactcggctgaagcactgcgtggcagattctaatattgtcagatggttttggcaggcagtggagacttttgatgaggagagaagggctcgcttactgcagtttgtcacaggctctactcgtgttccgctccagggatttaaggccctccagggctccacgggcgccgccggacctcgcctctttaccatccacttgatcgatgcgaacaccgacaacttgcccaaagcacacacatgcttcaaccggatagacatccctccttacgagtcatacgaaaagttgtatgaaaaactccttacagcagtggaagaaacatgtgggttcgcagtagaatag

SEQ ID NO: 134565 - DNA, 1323 bp, synthetic construct
  misc_feature 1..1323: note = Description of Artificial Sequence: Synthetic coding sequence
  source 1..1323: mol_type = other DNA
atggccacaaggagctgccgagaaaaggcacaaaagcttaatgagcagcatcagctgattctgtccaagctactcagagaagaggataacaagtactgtgccgactgcgaggcgaaggggccgagatgggctagttggaacatcggcgtatttatatgtattagatgcgcaggaatacaccgcaatctgggcgtgcatatcagccgggtgaaaagtgttaatttagatcagtggacagccgagcaaatccagtgtatgcaggatatgggcaataccaaagctcgcctcctctatgaagccaatctcccagagaacttcaggcggccccagaccgatcaagccgtggagttctttattcgggacaaatacgaaaaaaagaaatattacgataagaatgccatagccattacaaataaagagaaggaaaagaagaaagaggagaagaaacgagagaaggaacccgagaagcccgccaagcctcttacagccgagaagttgcagaaaaaggaccagcaattggaaccaaagaaatctacctcacccaagaaagcggcagaaccaaccgtggacttgttaggtctggacggacccgccgttgcccccgtgacaaatgggaatactacagtccccccgctgaacgatgatctcgatatttttgggcctatgatctccaatcccctgcccgccacagtgatgccacccgcacaaggaacacccagtgccccagcagccgctacactttctactgtaacctccggtgacttagatctattcactgaacaaaccactaaatccgaagaagttgcaaaaaagcagctatccaaagacagcatccttagcctgtacggaactggaacaatccagcaacaaagcacccctggtgtgtttatgggccccaccaacattccatttacgtctcaggcgcctgccgctttccagggatttccgtccatgggcgtgcctgtcccagctgctcccgggctgatcggtaatgttatgggccagagcccttccatgatggttgggatgccgatgccaaacggtttcatgggaaatgcccagacaggggtgatgcccttgcctcagaacgtggttggaccacaaggaggcatggtgggtcagatgggcgctccacaaagcaaatttgggctcccccaagctcaacagccccagtggagccttagccagatgaaccaacagatggccggtatgtccatcagctcagctacgcccaccgcaggattcggccagccctcgtcaacaaccgcggggtggtccggctcgagcagcggccagacactaagcactcagctctggaaatag

SEQ ID NO: 134566 - DNA, 489 bp, synthetic construct
  misc_feature 1..489: note = Description of Artificial Sequence: Synthetic coding sequence
  source 1..489: mol_type = other DNA
atgggcaataccaaagctaggctgctctatgaggctaacctccctgagaattttaggcggcctcagactgatcaggccgtggagttttttatccgcgataaatacgagaagaagaaatactacgataaaaatgccatagccatcactaacatttcaagtagcgatgcccctttgcagcccctggtgtccagtcctagtctgcaggctgccgttgacaagaacaagttggagaaggaaaaagaaaagaaaaaggaggagaaaaaaagagagaaggaacccgagaaacccgccaagccccttacagcggaaaaactgcagaagaaagaccaacagctggagccaaagaaatctacctcccccaagaaggcggcagagccaactgtcgacctcctgggactcgtctggcgtaaaattgaaaaagagaagagcgaaagacagttggttgaagtggaggagctcaccttcatgtactgctttcccaagaattag

SEQ ID NO: 134567 - DNA, 1311 bp, synthetic construct
  misc_feature 1..1311: note = Description of Artificial Sequence: Synthetic coding sequence
  source 1..1311: mol_type = other DNA
atggcaacaaggagctgtagggagaaggctcagaaacttaatgaacagcaccagctgatcctgtctaagctccttagagaggaagataataagtattgcgctgactgcgaggccaagggtcctcgatgggcatcttggaacattggggtattcatatgcatacgatgtgcaggcattcatcgaaatttgggagtccatatttcgcgagttaaatccgtaaatctcgaccagtggactgccgagcagattcagtgcatgcaggatatgggtaacactaaggctcgattgctttatgaggccaaccttccagaaaatttccgaaggcctcaaaccgaccaggccgtagagttctttatcagggacaagtatgaaaagaaaaaatactacgataaaaacgcaatagctatcaccaacaaggaaaaagaaaaaaagaaagaggagaagaagcgcgagaaagaacctgaaaagcccgccaagcccctgacagccgaaaaactccaaaagaaggaccagcagctcgagcccaaaaagtcaacttcccccaaaaaggctgcagaaccaaccgttgacctcctaggtttggatggccccgccgttgcccctgtcaccaacggcaacacaacggtcccacctctgaacgacgatctcgatatattcgggcctatgatctctaaccctctgcccgcaacggttatgccccctgctcaagggacacctagtgccccggcagcagccacgttgtcaactgtcacctccggagatctcgacttattcactgagcagactactaaatccgaggaggtggccaagaaacaactgtccaaggatagcatactctcactctacgggactggaacaatccagcagcagtccactcccggcgtcttcatgggtccaaccaacatcccattcacgtcccaagccccagcagcttttcagggatttccttctatgggggttccagtgccggccgcccccggcctcataggtaacgttatgggtcagtcccccagcatgatggtcggaatgccgatgccgaatgggttcatgggtaatgcccagaccggagtgatgccgttaccacagaacgtggtcgggccccagggcgggatggtgggccagatgggggcacctcagtccaagtttggccttccccaggcccagcagccacagtggagcctctcacagatcatgcagaaaggcgacgctgttctgcagcactcaatctctgccatttattggcctatgactagatggctgaaatgtccactggtcgacgaatcggccgatggttggcacgaatatcaatag

SEQ ID NO: 134568 - DNA, 1404 bp, synthetic construct
  misc_feature 1..1404: note = Description of Artificial Sequence: Synthetic coding sequence
  source 1..1404: mol_type = other DNA
atggccactaggagctgccgcgagaaggcccagaagttgaacgagcagcatcagttaattctaagtaagctgctgagggaggaggataacaaatactgtgcagactgcgaggctaaaggccctagatgggcctcatggaatattggcgtgtttatctgcatccgctgcgccggaatccatcgtaacctgggcgtgcacatctcaagggtgaagtccgtgaacctcgaccagtggactgcagaacagatccagtgcatgcaagatatgggcaacacaaaggccaggcttttatacgaagctaacttgcctgagaactttagacggcctcagaccgaccaggccgtggaattctttattagagacaaatacgagaagaaaaagtattacgacaaaaacgcgatcgcgatcactaatatctcctccagcgatgcccccttgcagccactggtgtcctctcctagcctgcaggccgcagtggacaaaaacaagctcgaaaaagaaaaagaaaagaagaaggaggaaaagaagcgagagaaggagccagaaaaaccggccaaaccactcaccgccgaaaaactgcagaaaaaggaccagcagctcgagcctaagaagtccacctccccgaagaaggctgccgagccaactgtcgaccttttagggctcgatggcccagcagtcgcccccgtgacgaatggaaatacaaccgtgccccctctgaacgatgaccttgatatctttgggcccatgatcagtaacccgctgcctgctaccgtcatgccgcccgcccaagggacaccttcggcccctgccgccgctactctgtcaacggtgacatctggagatctcgaccttttcactgagcagactacgaagtctgaggaggtagccaaaaaacagctcagcaaagactccattctaagtttgtacggcactggcacgattcagcagcagagtacacctggcgtgttcatgggccccacgaacatcccgtttacgagccaggcaccagccgcatttcagggttttccatctatgggggtgcccgtacccgcggcccccggacttattggtaacgttatgggccaaagcccttctatgatggttggtatgcccatgcctaatggatttatgggcaacgctcagactggcgttatgcccctcccacagaacgtggtggggccccagggggggatggtggggcagatgggggccccacagtccaaattcgggctgccacaggctcagcagcctcagtggagcttgagccagatgaaccagcagatggcaggaatgagcatcagctctgcaacccccacagccggtttcgggcagccaagcagtacaactgccggatggagcggatcctcaagtggtcaaactctgagcacccagctgtggaaatag

SEQ ID NO: 134569 - DNA, 414 bp, synthetic construct
  misc_feature 1..414: note = Description of Artificial Sequence: Synthetic coding sequence
  source 1..414: mol_type = other DNA
atggctacccgctcatgcagagagaaagcgcagaaactgaatgaacaacaccaactcattctgtctaaattgttacgtgaggaggacaataaatactgcgcagattgtgaggctaaaggaccaagatgggcgtcctggaacattggggtatttatttgcataaggtgcgctggcatccatcggaatctgggcgtgcacatctctagggttaaatctgtcaacctcgatcagtggacagcagagcaaattcaatgcatgcaggacatgggcaatactaaggccagactgctctatgaagctaatctgcccgagaactttcggagaccacaaaccgaccacgaggacatcattctagaaaccaccgcagtcattaccctactcttaaataaatgtctaccctatgccaaaccctag

SEQ ID NO: 134570 - DNA, 378 bp, synthetic construct
  misc_feature 1..378: note = Description of Artificial Sequence: Synthetic coding sequence
  source 1..378: mol_type = other DNA
tgaaagtactacgataaaaacgccatcgcaatcacaaatatcagcagctcggacgctccactccagccattggttagctcccccagcctgcaggccgccgtagacaaaaacaagctcgagaaagagaaagaaaagaaaaaagaagagaaaaagcgagagaaggagcctgagaaacccgcgaaaccgttgacggctgagaaacttcagaaaaaggatcagcagctggagcctaaaaagtctacctcaccaaagaaggcagccgaacctacggttgaccttcttggactggtgtggaggaaaatcgaaaaagaaaagagcgagaggcagctggtggaggtggaggaactgactttcatgtattgcttccccaaaaactag

SEQ ID NO: 134571 - DNA, 189 bp, synthetic construct
  misc_feature 1..189: note = Description of Artificial Sequence: Synthetic coding sequence
  source 1..189: mol_type = other DNA
atgcttttcctcaaactgagtgtgttccgcgccgtcgaattctttattagggataaatacgaaaagaagaaatactatgataagaacgcaatcgctattaccaacatctcgtcctccgacgctccactgcagcctctggtgagtagtccatctcttcaggctgcagttgacaagaacaaacttgagtag

SEQ ID NO: 134572 - DNA, 1200 bp, synthetic construct
  misc_feature 1..1200: note = Description of Artificial Sequence: Synthetic coding sequence
  source 1..1200: mol_type = other DNA
atgatctttaagggaccccgctgggcctcctggaacatcggcgtcttcatatgtatcaggtgcgcaggtatccatcgaaacctgggcgtgcatatttcccgcgttaaaagcgtgaacttggatcagtggacccaagagcaaatccaatgcatgcaggaaatgggcaacgggaaggccaatcggttgtatgaagcatacctcccagagactttccgcagaccgcaaatcgaccctgctgttgaggggttcattcgcgataaatatgaaaaaaaaaaatacatggataggtctctcgacatcaatgcctttcgcaaggagaaggacgacaaatggaaacgcggctccgaacccgtgcctgagaaaaaactggagcccgttgtattcgagaaagtcaagatgcctcagaaaaaggaagatccacaactcccaaggaagagttcacctaaaagcaccgcccccgtcatggatcttctgggtctcgacgccccggtggcttgttctatcgccaactctaagacttcaaataccttggaaaaggacctggacctgcttgccagtgtgccaagtcccagttcatccggctcgcgaaaagtggtcggcagcatgccaacagcgggatcggcaggttcagtaccggaaaacctcaatttgttccctgagcctggctccaaatctgaggagatcgggaagaaacagctgagcaaagattctatcctgagcctgtacggatcacagaccccccagatgcccacccaggccatgttcatggcgcctgcccagatggcctacccgacagcatacccaagcttccctggtgtgaccccccccaattccatcatgggctctatgatgcctccccctgtgggcatggtcgcccagcctggggccagcgggatggttgctcccatggccatgcccgctggatacatgggagggatgcaggccagcatgatgggcgtgcctaacggtatgatgaccacacagcaggcaggatatatggcgggtatggctgctatgccccagactgtctacggggtgcaaccagcccagcagctgcagtggaacctgactcaaatgactcaacagatggcaggaatgaacttctacggcgcaaatggaatgatgaattacggacagtccatgtcaggtgggaatggtcaggccgccaaccaaactctgtcaccacaaatgtggaagtag

SEQ ID NO: 134573 - DNA, 1290 bp, synthetic construct
  misc_feature 1..1290: note = Description of Artificial Sequence: Synthetic coding sequence
  source 1..1290: mol_type = other DNA
atgaccggaaagtcagtaaaggacgtcgatcggtaccaagcagttctggctaacctcctccttgaagaggataacaagttctgcgcagattgccaatccaagggacccaggtgggcatcatggaatatcggggtctttatttgtatccggtgcgccggcatacatagaaacttgggcgtgcacatttccagagttaaaagcgttaatctcgaccagtggactcaggaacagatccaatgcatgcaggagatgggcaacggtaaggcaaaccgcctctatgaggcatatttgccggagaccttcagacggccccagattgacccagcagttgagggctttatccgtgataagtacgagaaaaagaaatacatggatcgaagcttggatatcaacgctttcaggaaagaaaaggacgacaagtggaaacgcgggtctgagccagtccctgaaaaaaaactcgaacccgtcgttttcgagaaggttaaaatgccacagaagaaggaggacccccagttacctaggaagtctagcccgaagtccacagcaccagtgatggacctcctcggccttgacgcccccgtcgcttgcagcattgcaaattcaaagaccagtaatacactcgaaaaggatctcgacttactcgcaagcgtccccagtccttccagctccggttctcgcaaggtcgtcggtagcatgcccacggcgggaagcgctggctcagtgcccgagaatctgaacctgttccctgagccaggctccaaatcggaggagattggtaagaaacagctgagcaaggattccatcctctctttgtatggtagccagactccccaaatgccaacccaggcaatgttcatggctcccgcacagatggcatacccaaccgcttacccttcgttccctggtgtcacacctcccaactccatcatgggcagcatgatgccaccgccagttggaatggtggcacaaccgggggcctcaggtatggtcgcccccatggcaatgccagccggatatatgggggggatgcaagcaagcatgatgggtgtgcctaatggcatgatgactacgcagcaggctgggtacatggccggaatggccgctatgccacagactgtgtacggcgttcagcccgcgcaacagctacaatggaatctgacccagatgacacagcagatggcggggatgaatttctacggggcaaatggtatgatgaactatggccagtccatgtccggcggtaacggtcaagcagcaaaccagacactgagtccacaaatgtggaaatag

SEQ ID NO: 134574 - DNA, 684 bp, synthetic construct
  misc_feature 1..684: note = Description of Artificial Sequence: Synthetic coding sequence
  source 1..684: mol_type = other DNA
atgactggcaaatcggtcaaggatgtcgacaggtatcaggccgtgctggccaaccttctgctggaggaagataataaattctgcgctgattgtcagtcgaaaggcccaaggtgggcatcctggaacataggcgtgttcatctgcattcgttgtgccggaatccacaggaacctgggagtccacatttctagggtgaagtccgttaacttggaccagtggacacaggaacagatacagtgtatgcaagagatgggtaacggcaaagcaaaccggctgtacgaagcctatcttccagaaacattcaggaggcctcagattgaccccgctgtcgagggatttatccgcgacaaatacgagaaaaaaaagtatatggaccggtccctcgatattaacgcttttcgcaaggagaaagacgacaaatggaagcgaggctccgaacctgtgcctgagaagaagctggagcccgtggtcttcgaaaaagtaaagatgccacagaaaaaagaggatcctcagcttcccagaaagagttcccctaagtccacagcaccagtaatggacctccttggattagacgcccctgtggcctgctccatcgcaaacagtaaaacttccaacactttggagaaagatttggatttgctggcatctgtcccttccccatcaagcagcggttctcgaaagtag

SEQ ID NO: 134575 - DNA, 1050 bp, synthetic construct
  misc_feature 1..1050: note = Description of Artificial Sequence: Synthetic coding sequence
  source 1..1050: mol_type = other DNA
atgcaggaaatgggaaatggtaaagccaaccggctttacgaggcctatttgcccgagaccttccgaagaccacagattgaccctgccgtggaaggcttcattagggataaatacgagaagaaaaaatatatggacaggagcctggacatcaacgctttcagaaaggagaaggacgataaatggaagaggggctcagaaccagtcccagagaaaaaactagagcccgtggtcttcgaaaaagtgaaaatgccccagaagaaagaagacccccagctgccacgcaagtccagtccgaaaagcacagcacctgtaatggacctgctgggcctcgatgctccagtcgcatgtagcatcgccaattccaagacttctaacaccctggagaaagacctggacctcctggctagcgtgccaagtccatcttcctccggaagccgaaaagtggtgggcagcatgccgactgcaggctctgcaggatctgtgcccgaaaaccttaatctgttcccggaacccggaagcaaatccgaggaaattggcaagaagcaactctctaaggactccattctcagtctctacggaagccagacccctcaaatgccgacgcaagccatgttcatggctccggctcaaatggcttacccaaccgcctatccctcatttccaggtgtaactccacctaactcaataatgggctcaatgatgccaccgcccgtgggaatggtcgctcagccaggagcctctgggatggtcgctcccatggcgatgcctgcaggatacatgggtggcatgcaggccagcatgatgggagtcccaaatgggatgatgaccacacagcaggcaggctatatggctgggatggccgccatgcctcagacggtgtacggcgttcagccggcccagcagctccaatggaacctcacccagatgacccaacagatggcgggaatgaatttctacggggcaaatggtatgatgaactatgggcagtccatgtccggtggcaatggacaggccgctaatcaaaccctgtctcctcagatgtggaagtag

SEQ ID NO: 134576 - DNA, 189 bp, synthetic construct
  misc_feature 1..189: note = Description of Artificial Sequence: Synthetic coding sequence
  source 1..189: mol_type = other DNA
atggccagaggaaatcagagggaacttgcgaggcaaaagaatatgaagaaaacgcaggaaataagtaaagggaagcggaaagaagactccctgacagcctcccagcgcaaacagcgggacagcgaaattatgcaggagaaacagaaagctgccaacgaaaagaagagcatgcagactcgcgagaagtag

SEQ ID NO: 134577 - DNA, 333 bp, synthetic construct
  misc_feature 1..333: note = Description of Artificial Sequence: Synthetic coding sequence
  source 1..333: mol_type = other DNA
atggcgcgtggcaatcagagggaacttgccagacagaaaaacatgaagaagactcaagagatttcaaagggcaaacgcaaggaggactctctcacagcctcccagagaaagcagagctccgggggtcaaaaatccgagagcaagatgtccgcgggccctcatctgccattaaaggccccaagagagaacccttgctttccgctcccagctgcgggaggaagcagatactatctggcgtatggatctattacccccatatcagctttcgtctttgtcgtcttctttagcgtcttttttccaagcttttacgaagatttttgctgctggatctag

SEQ ID NO: 134578 - DNA, 147 bp, synthetic construct
  misc_feature 1..147: note = Description of Artificial Sequence: Synthetic coding sequence
  source 1..147: mol_type = other DNA
atgaaaaaaacgcaggaaatctcaaagggaaagagaaaagaagattccctgaccgccagccaacggaagcaacgtgacagtgagatcatgcaggagaagcagaaagccgccaatgaaaagaaatctatgcagacccgcgagaaatag

SEQ ID NO: 134579 - DNA, 63 bp, synthetic construct
  misc_feature 1..63: note = Description of Artificial Sequence: Synthetic coding sequence
  source 1..63: mol_type = other DNA
atgaagaagacacaggagatttcaaagggtaagcggaaagaagacagcctgactgccagctag

SEQ ID NO: 134580 - DNA, 291 bp, synthetic construct
  misc_feature 1..291: note = Description of Artificial Sequence: Synthetic coding sequence
  source 1..291: mol_type = other DNA
atgaaaaagactcaggagatatctaagggtaaacgcaaggaggactccttaaccgcgtcccaacgaaagcagagctctggtgggcagaaatcggagtccaagatgagtgcaggaccacacttgccactgaaagcaccacgcgaaaacccctgctttccgctgcccgctgcgggaggtagcagatactatcttgcctatggctcaattacaccgatctccgccttcgtcttcgttgtcttcttttctgtgttctttcccagcttctacgaggacttctgttgctggatctag

SEQ ID NO: 134581 - DNA, 270 bp, synthetic construct
  misc_feature 1..270: note = Description of Artificial Sequence: Synthetic coding sequence
  source 1..270: mol_type = other DNA
atgaagaaaactcaggagatctctaaaggcaaacggaaggaggacagcctgactgcttctcagcggaaacagtcctccgggggacagaagtctgaatcaaagatgagtgcggggccacacttacctctcaaggctcccagggaaaacccctgctttccactcccagctgcaggcgggagtcgatactatttggcctatgggtccataactcccatcagtgcctttgtctttgttgtctttttctccgttttctttccctcattttattag

SEQ ID NO: 134582 - DNA, 3156 bp, synthetic construct
  misc_feature 1..3156: note = Description of Artificial Sequence: Synthetic coding sequence
  source 1..3156: mol_type = other DNA
atgggatccgcagaggacgccgtcaaagagaagctgctctggaatgtgaagaaggaagttaagcagattatggaagaagccgtgacccgcaagttcgtccatgaagatagcagccacattatcgccctttgtggggcggtcgaggcctgcttgctgcatcagctacgcaggagggccgcagggtttttaaggtcggataagatggccgcgctattcactaaagttggtaagacgtgcccggtcgctggagagatttgtcacaaggtgcaggaactgcagcaacaggccgaaggcagaaaaccatctggggtctcccaggaggcactgaggcggcagggcagcgcgtccggtaaggctcccgctttatcaccacaagccttaaagcatgtgtgggtaagaaccgccctgatagagaaggtcctggacaaggtcgtgcaatatctggctgagaactgttctaaatattatgagaaggaagcactactcgcggatccagtcttcgggcccattctagccagtttgttagttggcccttgcgccctggagtacactaaattgaagactgcagaccattactggaccgacccaagcgctgacgagctggtgcagagacaccgcatacgcggacccccaacccgacaagactctcccgctaagcggcccgcactgggcatccgtaaacggcattcttctggctctgcttccgaggatcgccttgccgcttgcgcaagagagtgcgtggagagcctccatcagaatagtcggacgagactgctttacgggaagaatcacgtgttggttcagcctaaggaggacatggaggcagtgcctggatacttatcacttcatcagagtgccgaaagcctgacgcttaagtggacccccaaccagctgatgaacggaacattaggagatagcgagcttgaaaagtcagtctactgggactacgccctcgttgtgcccttcagtcaggtcgtgtgtatccattgccaccagcaaaagtcgggtggaacactggtgctagtgtcgcaggacggcatacagagacctccattacactttccacaaggcggacacctcctgagcttcctgagctgcctcgaaaacggcctgctcccccgcggtcaactcgagccacccctgtggactcagcagggtaagggcaaggtgtttccaaagctccgtaaacgatccagtattcgttctgttgatatggaggagatgggcactggaagggccactgattacgtttttcggataatctacccagggcaccggcatgagcacatcacaatcaattatcaccacctggcggcctccagggctgccagtgtagacgatgatgaggaggaggaagacaagctccacgcaatgcttagcatgatctgcagccgaaacctcaccgcacccaatccaatgaaagatgcgggagacatgattgagatgcagggcttcggcccaagcctccctgcgtggcacctcgagccgctgtgctcccaggggagttcctgcctgtcgtgcagctcaagctcaagcccccacgctacaccttctcattgttcttgtattcccgaccgtctcccactgaggctgctctgcgaatctatgaaacgccagattgtttcaagggcattctatggttggcttgcccactgcagacacctcagcaccgtgaggacacatctctctgctctggtccatcactccgtgattcccccggaccgccctcctggcgctagcgcagggcttaccaaggacgtgtggtccaagtaccaaaaggataagaagaactataaagaacttgagttactgcggcaggtgtactacggcggcattgaacacgaaattcggaaggatgtctggccatttctgctggggcactacaagttcgggatgagcaaaaaggagatggagcaggtagacgcggttgtggctgcacgatatcagcaggttctggctgaatggaaggcctgtgaggtcgtggttcgccaacgcgagcgcgaggctcatcccgcaacaagaacaaaattttcgtctggctcatctatcgattctcatgtgcaaaggttgattcaccgggatagcaccatatccaacgatgtgtttatctccgtagacgatctagaaccccctgaaccccaggaccctgaagactcgcgtcctaaacccgagcaagaagccggacctgggactccaggtaccgctgtggttgagcagcagcattcggtggagtttgattctcccgattcagggctgccctcgtctcgtaattactccgtggcgtcagggatccagtctagcctggatgaaggccagtccgtcgggtttgaggaagaagatggaggcggggaagagggtagttctggccccgggcccgccgcgcacacactgcgcgaacctcaggacccgagccaggaaaagccccaggcaggagaattggaggccggcgaagagcttgccgcagtctgcgcggccgcatataccatagaactgctggacactgtggccctcaacctgcatcgaatagataaagacgtgcagaggtgtgaccgaaattattggtactttaccccacctaatctggaaagactacgggacgtcatgtgctcctatgtttgggagcacctggatgttgggtacgttcaaggaatgtgtgatttactagccccactccttgtgacactcgataatgaccagctggcatatagttgttttagccatcttatgaagaggatgtctcaaaattttccaaacggtggcgctatggacacccactttgccaatatgcggtctctcatacagatcttagacagtgaactcttcgaactaatgcatcagaatggcgactacacacatttctacttttgttatcgctggtttcttctggacttcaagagggaactcttatatgaggatgtttttgccgtttgggaggtgatatgggccgcacgacacataagctccgagcacttcgtcttatttatcgctttggctctggtggaggcctatcgcgagatcatccgagacaacaacatggattttactgatataattaagttctttaatgaacgggcagagcaccacgatgcccaggaaatactgaggattgcacgcgacctcgtgcataaagttcagatgcttatagaaaacaagtag

SEQ ID NO: 134583 - DNA, 3021 bp, synthetic construct
  misc_feature 1..3021: note = Description of Artificial Sequence: Synthetic coding sequence
  source 1..3021: mol_type = other DNA
atggggagcgccgaagatgccgtcaaggaaaagctcctgtggaatgttaagaaggaagttaagcagatcatggaggaggccgtcactagaaaatttgtccatgaggactcttcacatataatagcactgtgtggcgctgttgaggcctgtcttttacatcagctcagacgaagagctgcaggatttctcagatctgataaaatggcggccctgtttactaaggtgggaaaaacctgtccagtggctggtgagatttgccacaaggtacaggaactgcagcagcaagccgaggggagaaagccttcaggtgtgtcccaggaggccctgaggcggcaggggagtgcctcaggaaaagcaccagctctaagcccccaggccctaaaacacgtatgggtacgtacagcactgattgaaaaagtactcgacaaggtggtgcagtatctggcagaaaactgttccaaatactatgaaaaagaagctctcttagccgatcctgtgttcggtcctatcttagccagtctcttagtggggccatgtgccctcgagtacaccaagcttaagaccgctgaccactattggaccgatccatcagctgatgaattagtgcagcgccatcggatcaggggaccaccaacgaggcaggatagcccagcgaagcgtccggctttgggaattcgcaagcgtcatagttcagggtctgcgagcgaagataggcttgccgcctgtgcaagggaatgcgtggaatccctccatcagaactctagaaccagactcctctatggcaaaaaccacgtactggttcagcccaaggaggacatggaggctgttccaggctacttatctctgcaccagtcggccgaaagtctgactctcaaatggacccccaaccagctcatgaacggcaccctgggggacagcgagctcgaaaaatctgtatactgggactacgccctggtagtgcctttctctcaagtggtctgcatccactgtcaccaacagaagagtggagggaccctggtcctggtcagccaagatggcatacagcgaccccctctccactttccgcagggggggcatcttttatcgttcctgagttgtctggagaacggccttctgccccgcgggcagttagagcctcctctttggacccagcaaggcaaaggcaaagttttcccaaaactgcggaaacgttcctccatcagatctgtggacatggaggaaatgggcactggcagggctaccgactacgtttttaggattatttacccaggccatagacacgagcataacgctggcgatatgatcgagatgcagggctttggaccaagcctccccgcttggcatctggagcccctgtgttcccagggatctagttgcctcagctgttcatcatcatcttcaccacatgccactccatcacactgtagttgcataccagacagactacctctgagattactgtgtgaatctatgaaaagacaaattgttagtcgggccttctacggctggctggcacattgtcggcatctctccactgtgagaacacatctgtcggcactcgtgcaccatagcgtcattccccccgataggccaccaggggctagcgctggcctcaccaaagatgtgtggtcaaagtatcaaaaagataagaaaaactacaaggaacttgagctgctgcgtcaggtgtactacggtggcatagagcacgagataagaaaagatgtgtggccgttcctcctggggcattataagttcgggatgtcaaagaaagagatggaacaagtagacgccgtcgtggccgccagatatcagcaggtgttggccgagtggaaggcttgcgaagtagtggtacggcagcgtgagcgcgaggcccacccagcaacaaggacaaagttcagtagcggttcctcaatcgatagccacgttcagcgactcatccaccgggactctactatatctaatgatgttttcatctctgtagacgacctcgagcccccagaaccacaggatcccgaagactcgcgccccaaacccgagcaggaagcgggacctggcacaccagggacagccgttgtggagcagcagcatagcgttgaatttgactcccctgacagcgggttaccttcgagccgcaattactcagtggcttccggtattcagtcttccctcgatgagggacagtctgtcggcttcgaagaagaagatggtgggggggaagaagggtcaagtggtccagggccagcggcccacacccttcgagagcctcaagatccttctcaggagaagccccaggctggagagttagaggccggagaagagctggctgctgtctgtgcagcggcttatacaatcgagctcctagacactgtggcattgaatctccaccgcatcgacaaggacgtccagcgctgcgacagaaactattggtactttacaccaccgaacctggagcgcctccgagacgtgatgtgcagctacgtttgggagcatttggatgtcggttatgtacagggcatgtgcgatctactggcaccgctcctggtgactttggacaatgaccagctggcctactcttgtttcagtcacttgatgaaaagaatgtcccagaactttcctaacggcggcgcgatggatacacactttgccaatatgaggagcctgatacaaatcctggactccgagttgttcgagttaatgcaccagaatggcgattacacccatttctatttctgctaccgatggttcctgctagacttcaagcgcgagctgctctatgaggacgtcttcgccgtttgggaggttatttgggctgccagacatatctcctctgagcatttcgtgctctttatcgcccttgcattggtggaagcttaccgcgagatcatcagggacaacaacatggattttacagacatcatcaagttcttcaacgagagagcagagcaccacgacgcccaggaaatcctaagaatcgcacgggatctcgtgcacaaagtacagatgctgattgagaacaaatag

SEQ ID NO: 134584 - DNA, 795 bp, synthetic construct
  misc_feature 1..795: note = Description of Artificial Sequence: Synthetic coding sequence
  source 1..795: mol_type = other DNA
atgtgccataagaacggctttccgcaggagggagggatcacagcggccttccttcagaagagaaaactacgactgagcaaaaatcatcgtccagcacgggctaaggtgacagagcacgtacggggcactagacccggacgggccacggcgggcccagcagcctcaacacgcgctgccggctctttattcttcgacagatggggaaaccggggcccagctggttgtcggggatcaagtcacctgccacagcagctcaaatttactacctctgactcctgtgatcgaattaaagatgagttccaactgctccaggcccagtaccactctctcaaacttgagtgtgataaacttgcttccgaaaagagcgaaatgcaacggcactatgttatgtactacgagatgagctatggactgaatatcgaaatgcataaacaagccgaaatcgtcaaacgtctcaatggcatttgcgcccaggtcctaccatatctgtcccaggagcaccagcagcaggtgctcggagccatcgagagagctaagcaagtgacggcgcctgagcttaatagcatcatccgacagcagctccaggcccatcagttatcgcagttgcaggcacttgccctgcccctaacccccctgccggtcggcctgcagcccccaagtctgcctgccgtcagtgcaggaaccggtctgctgagcctgtcagctcttggatcccaggcacacctgtccaaggaagataaaaacggtcacgacggagacacacatcaagaggatgacggcgaaaagtccgactag

SEQ ID NO: 134585 - DNA, 267 bp, synthetic construct
  misc_feature 1..267: note = Description of Artificial Sequence: Synthetic coding sequence
  source 1..267: mol_type = other DNA
atgaacatgagtaaacagcctgtgtccaacgtgagagccatccaggcaaacatcaacataccaatgggcgcctttagacccggagccggtcagcctcctcgccgcaaggagtgtaccccggaagtggaggaaggggtaccgcccacatccgatgaagaaaaaaagccgattcccggcgccaagaagctcccaggacctgcagttaacttgtctgaaattcaaaacatcaaatccgagctgaagtacgtgcctaaagcagaacagtag

SEQ ID NO: 134586 - DNA, 6411 bp, synthetic construct
  misc_feature 1..6411: note = Description of Artificial Sequence: Synthetic coding sequence
  source 1..6411: mol_type = other DNA
atggctgacgttactgcgagatcacttcagtacgagtacaaagcaaatagtaatttagtactgcaagcagataggtccttgatcgatcgtacgcgtagagatgaaccgacaggcgaagtgctgtcactggttggcaaactggagggaacgcggatgggagacaaggcacagcggacgaagccccagatgcaggaagagcgcagggctaaacggagaaagagagacgaggatcgacatgatataaataagatgaaagggtacacattactctctgaggggattgacgaaatggttggaatcatctacaagcctaagactaaggaaacccgagagacatacgaagttttgcttagcttcatccaggctgcactgggtgatcagccgcgggacattctgtgcggcgcagcggacgaagttctagcagtactcaaaaacgagaaactgagggacaaggagcggaggaaagaaatcgacctacttctggggcagaccgacgatactcgctaccatgtgcttgtgaatctgggtaaaaaaattactgactacggtggggacaaggagatccagaatatggatgacaatatcgacgagacctacggcgtcaatgttcagttcgagagtgatgaagaggagggagacgaagatgtgtacggcgaggtgcgtgaggaagcttcagatgatgacatggagggcgacgaggcggtggtacgctgtactctgagcgcaaaccttgtcgcttccggcgagcttatgtcaagcaagaaaaaggacctccacccgagggacatcgatgctttttggctgcagagacagctcagccgattctacgatgatgccatagtttcccagaagaaagccgacgaagtcctggaaattctgaagactgcttcggacgatcgagagtgtgagaaccagctagttctgcttctcgggttcaacacttttgactttataaaggtcctgcgtcaacaccggatgatgattttgtactgtaccctgctggcctcagctcaaagtgaagctgagaaagagaggattatgggaaagatggaggccgatccagagctgagtaaattcctgtatcagctccatgaaaccgagaaggaagatttaatcagagaagaacggtcgcgaagagagagagttcggcagtcacgcatggacaccgacttggagaccatggatttggaccagggaggcgaagccctcgctcctcggcaagtgctggatctggaagatctagtcttcacccaagggagccacttcatggccaataagaggtgtcaattacctgatggatcttttcgtcgtcagcggaaaggatatgaggaggtgcacgtacctgccctcaaaccaaagccctttggatctgaggagcagctgctgcctgtagagaagcttcccaagtacgcccaggcgggattcgaagggtttaaaacgctgaatcggattcaaagcaagctctacagggcagctctggaaacggatgagaatcttctcctctgcgctcccaccggagccggaaagactaatgtcgcccttatgtgtatgctcagggagatcggtaaacatatcaacatggatggaacaattaacgtcgacgatttcaaaatcatttacatagcacccatgcgctccctggtgcaggagatggtgggatcttttgggaagcgcctcgccacctatgggattaccgtggccgagctgacaggcgaccatcaactgtgcaaagaggagatttcggctactcagatcattgtgtgtactccagagaagtgggacatcatcacacgaaaaggaggagagagaacctatacccagctggtccggcttattattctcgacgaaattcatcttttgcacgacgaccgaggccctgtgcttgaggccctggttgccagggccattagaaatatagagatgactcaggaagacgtgagacttattggactctcagccaccctgccaaactatgaggacgtggccacgttcttacgcgtggacccggccaaagggttgttctacttcgacaactcgttcagacccgttccgctggaacagacctacgtgggcatcacagagaaaaaggcaatcaagaggttccagattatgaacgagattgtctacgagaagataatggagcacgctggtaagaaccaggtgctggtgtttgtgcatagtcgtaaggagacaggaaagaccgccagggcaatcagagacatgtgtctggagaaggacactcttgggctgttcctgagggaaggttctgcgtccactgaagttctgaggaccgaggccgaacagtgtaagaacttagagctcaaggacctgctgccgtacggattcgcgatccaccatgcgggcatgaccagagttgatcgaactctcgtggaagacctgtttgctgacaaacacattcaggttttggtgtctaccgcaacactcgcatggggcgtcaatctcccagcccacacagttatcattaagggcactcaggtgtattcacccgaaaaggggcgctggaccgaactgggcgccctggacatcctacagatgcttggtcgggccggacgtccacagtatgacacaaaaggcgagggcatccttatcacgtctcatggtgagctacagtactacctgtctttgctgaatcagcagctacccatagagagccaaatggtttccaaactccctgacatgttgaacgccgaaatagtcctcggcaacgtccaaaacgctaaagacgcagtgaactggctgggctacgcttacttatatatcagaatgttgcgcagccctaccctgtacggaatctcccacgatgacctaaagggtgatcccctgctggatcagagaaggctggacctcgtgcacaccgcggcactgatgctggacaagaacaatctcgtaaagtatgacaaaaagaccggcaacttccaagttactgaacttggcagaattgcctcccattactatatcaccaacgataccgtgcaaacatataaccagctactgaaacctactcttagcgagattgaactgtttcgagtgttctctttgtcgtcagagttcaaaaatattacagtccgggaggaagaaaagctggaactccaaaaactgcttgaaagagtccctatacccgtcaaggagtcaattgaggagccaagtgccaaaatcaacgtgctactccaagcatttatctcacaattgaagttggaaggtttcgccctgatggccgatatggtctatgtgactcagagcgccgggcgactgatgcgcgccatatttgaaatcgtactgaatagaggatgggctcagctcactgacaaaactcttaacttgtgcaaaatgatcgataagagaatgtggcagtcaatgtgtccgctgcgccagttcagaaaactgccagaagaggtagtgaagaagatcgagaaaaagaattttccttttgaacggctctacgatttgaaccataatgaaattggggagctcattcggatgcccaagatggggaagaccattcataagtatgtccatctcttccccaaactcgaactctctgtgcacctgcagcctataacccgttccactctgaaggtggagcttaccatcactcccgacttccagtgggatgaaaaagtgcacgggtcaagcgaagcgttttggatcctggttgaggatgtggacagcgaggtgattctgcaccacgagtattttctgctgaaagccaagtacgcccaagatgagcatctgatcactttttttgtgcccgtgtttgaacccctccccccccagtacttcatccgcgtggtatcggatcggtggttgtcctgtgagacacagttgcccgtctcattcaggcatctgatacttcctgaaaagtatccccctcccaccgagcttctcgatttacagcctctccccgtaagcgcgctgcgtaattcagctttcgagtccctttaccaggacaaattccccttcttcaatcctattcaaacccaggtgttcaacacagtgtataattccgacgataacgtgttcgtaggtgcaccaacagggtccggcaaaacaatttgcgcagagtttgctattctgaggatgctgttgcagagcagcgagggaaggtgtgtctatattacccccatggaagctttggccgagcaggtatatatggactggtacgagaagtttcaagaccgacttaataagaaggtggtccttcttacaggagagacttccactgacctgaagctgcttggcaaaggtaacattatcatcagtaccccagagaagtgggacatactcagccgcagatggaaacagcgcaagaatgtgcagaacattaatttgttcgtcgttgacgaagtccacctgattggcggagagaacgggccagtgctggaggtgatttgcagcaggatgaggtatatctcatcccagattgagcgacctattcgcatcgtagccctgtcaagttcactttccaatgccaaggacgtggcacactggttggggtgcagcgcaacttccacatttaactttcatccgaatgtcagacccgtcccccttgagctgcacatccagggattcaacatctcccacacccaaactaggctcttaagtatggctaaaccagtgtatcacgcgatcactaagcattcacctaaaaaacccgtaattgtgttcgtgccttcacgcaaacagacccgcttgaccgctattgatatactgacaacatgtgctgccgacattcagcgacaacgctttcttcattgcactgagaaggatcttattccctatctggaaaaactatccgacagcaccttgaaggagactttactgaacggggtcggataccttcacgagggcctatcccccatggagagacgccttgtagagcaattgttcagcagcggagctattcaggtcgtcgtggcgagccgaagcttatgttgggggatgaacgttgcagcccatcttgtgatcattatggatacacaatattataatggcaaaatccatgcctacgtggactatccgatctacgacgttctgcaaatggttgggcacgctaataggccactgcaagacgacgaaggacgatgtgtgataatgtgtcaggggtccaaaaaggatttcttcaaaaaattcctgtacgaacccttgcctgtggaaagtcatttggatcattgtatgcacgaccattttaatgctgagattgtaactaaaactattgagaacaagcaggatgccgtggattatctcacttggaccttcttgtatcgccgaatgacgcaaaaccccaactactacaatctgcagggcataagccaccgccacctgagcgaccatttgtcagagctggtggagcagactctgtctgacctcgaacaatcaaaatgtatttccatcgaagacgaaatggacgtcgcacccttgaatctgggcatgattgccgcatactactacataaattacacaactatcgagctgttctctatgtccctgaacgccaaaaccaaggtgaggggcctgattgaaataatcagcaacgctgctgagtatgagaacatcccaatccgccatcacgaggacaatttgctgcgccagttggctcagaaggtgccgcataaacttaacaacccaaaattcaacgatccccatgttaagactaatctgcttctacaagcccacctctctagaatgcaactctctgccgaactgcagtcagacaccgaggagattctgtccaaagctattcgcctcatccaggcttgcgtcgatgtcctgtcctcaaatggatggctgtccccagctctggccgctatggaactcgcgcagatggtgacgcaggctatgtggtcaaaggattcctacctgaaacagttgccccattttacaagtgagcacataaaaaggtgtaccgacaaaggcgttgaatcagtatttgatatcatggagatggaggacgaggagaggaatgctctgctacaattgacagatagtcagatagccgacgtggctcgattctgtaatcggtacccaaacatcgagttgtcatacgaggtggtggacaaggactccattcgctccggagggcccgtggtagtcttggtacagctcgagagagaggaggaggtgaccggacccgtaatcgctcccttgttcccacagaagagagaggaaggatggtgggttgtcattggtgacgctaagtctaacagcctcatctcaattaaacgcctcactctccagcagaaagccaaggtgaagttagattttgtagcacctgccaccggggctcataattatactctttattttatgagcgatgcttatatgggatgtgaccaggaatacaagttctcagtagacgtaaaggaagccgagaccgactcagattctgactag

SEQ ID NO: 134587 - DNA, 1878 bp, synthetic construct
  misc_feature 1..1878: note = Description of Artificial Sequence: Synthetic coding sequence
  source 1..1878: mol_type = other DNA
atggcagatgtgactgctaggtcactgcagtacgaatacaaggcaaactcaaacctggtgctgcaagccgacaggtcactgatagataggactaggagggacgaaccgaccggcgaggtgctttctctggtagggaagttggaagggaccaggatgggtgataaggctcaaaggacgaagccgcagatgcaagaggaaagaagagccaaaaggaggaaacgagacgaggaccgccatgatatcaacaagatgaaaggctatacgctgctctccgaggggattgacgagatggtgggcatcatctataaaccgaagacaaaagaaacacgtgaaacctacgaggtgttgctgtcatttattcaagcagcactaggggatcagcctagagatatcctctgtggtgccgctgacgaagtgctcgctgtgcttaaaaatgaaaagctgcgggacaaggagaggcgaaaagagattgaccttctcctgggacagactgatgacacaagataccacgtgctggtgaacctgggaaaaaagataactgattatggtggagataaggaaatacagaatatggatgacaatatagatgagacctacggcgtgaacgtacagtttgaatcagatgaggaggagggagatgaggatgtgtatggtgaagtgagagaggaggccagcgacgacgacatggagggcgacgaagctgtagtgcggtgtacactgagtgctaatttggttgccagcggggagttgatgtcctctaagaagaaagatctacacccacgcgacatagatgccttctggctccaaagacagctctctaggttttatgacgacgcaatcgtgagtcagaaaaaggccgacgaagtcctggagatcctcaagactgcgagcgacgaccgcgaatgcgagaaccagctagtgttattactcgggttcaatacattcgattttatcaaagttctgaggcagcatcgtatgatgatcctatactgtacattactagcgagtgcccaatctgaggccgaaaaagagaggattatgggtaagatggaagccgatcctgaactgtccaagttcctctatcaacttcacgagacagaaaaagaagacctgatacgggaggaaaggtctcggagggaaagagtacgccagtccaggatggatactgacttagagacaatggacctggaccagggcggagaggccctggcgcctcgtcaggtccttgaccttgaggacctagtgttcacccaaggctctcactttatggctaacaagagatgtcagctgcctgacggctcgtttagacgacaacgcaagggctacgaggaggtccacgtgccagccttgaaacccaagccctttggcagtgaggaacagttgctccccgttgagaaactgcccaaatacgctcaagctggcttcgagggtttcaaaacacttaatagaattcaatccaaactgtaccgggccgccctggagacggacgagaacctactgctttgtgctccgactggagcaggcaagactaatgtcgcactgatgtgcatgctgagggagatcggtaagcacattaatatggacgggactataaacgtcgatgatttcaagatcatctacattgcccccatgcggtctctcgtacaagaaatggttgggagttttggaaaaagggacgcgaaatcaaacagcctgatttccattaaacgcctcaccctgcagcagaaagcaaaggtgaagttggactttgtggctcctgctaccggtgcacacaattatacactttactttatgtccgacgcttatatgggctgcgatcaggaatataaatttagcgtcgacgttaaagaggctgagacagactcggattccgattag

SEQ ID NO: 134588 - DNA, 1788 bp, synthetic construct
  misc_feature 1..1788: note = Description of Artificial Sequence: Synthetic coding sequence
  source 1..1788: mol_type = other DNA
atgcgttatatctcttcacagattgagagaccaatcagaattgttgctctctccagttcactgtctaacgctaaggatgtagcacattggcttggatgttcggctacctcaacttttaacttccatccaaatgttcgacctgtacctctggagttgcacatccagggctttaatatttctcacacccagactaggctgttgtcaatggctaagccggtgtatcacgcaattaccaaacatagtcctaagaagcccgtaatcgtgttcgttccctcgaggaaacagacaaggctaacggccatagatatcctgaccacttgtgccgcagatattcagcgccaaaggtttctgcactgtactgagaaagaccttattccttacttagagaaactgagcgactcgaccttaaaggaaacactgcttaatggagtcggatacctgcatgagggactcagtcccatggagaggcggctcgtagagcaactgttttccagtggggctatccaggtggttgtcgcatcccggtccctctgttggggaatgaacgtagccgcccacctcgtgatcatcatggacacgcagtactataacggtaagatacacgcttacgtggactatcccatatacgacgtcttgcaaatggtgggccatgctaatcggcccctgcaggacgacgaagggcgctgcgtcattatgtgtcagggatctaagaaggattttttcaaaaagttcctctatgagcccctcccagtagaatcccatctcgaccactgcatgcatgaccatttcaacgcagagattgtgactaagaccatcgaaaacaagcaagacgccgtcgattacctgacttggacgttcctttataggagaatgacccagaatccaaattattacaatcttcaggggatttcacaccgacatctttccgaccacctgagcgaattagtggagcagacattatcagatctggaacagagcaagtgcatcagtatcgaggatgaaatggacgttgcaccccttaatctcgggatgatcgctgcttattactatatcaactacactactatagagttgttcagcatgtccctaaacgcaaagacgaaggtgagaggactgatcgaaatcatcagtaacgctgctgaatatgaaaacatcccgataagacatcacgaagacaatttactgaggcagctggctcagaaagtgccgcacaagctcaacaaccccaaatttaacgatcctcacgtgaaaacgaacttgttactgcaggcccacctgtcccgaatgcaactgtctgccgaactgcagtctgacacagaagaaattttgtccaaagccattcgcctgattcaggcttgcgttgacgtactgtcctccaatggctggctgagtccagcactggccgcgatggagctggctcagatggtgacccaggcaatgtggtccaaagacagctaccttaaacagctgccgcactttacgtcagaacacatcaagcgctgtaccgacaaaggcgtggagagtgtcttcgatatcatggagatggaggacgaagaacgcaacgccctcctacagctaactgatagccagattgccgacgtcgctcggttctgtaacaggtatccaaatatcgagctttcctatgaggtggtggataaagactctattcgttctggagggccagtcgtagtccttgttcagcttgaacgagaagaggaagtcaccggccccgtgattgcccctttattcccacagttcagggctggccgctcagggtcaaggctgtag

SEQ ID NO: 134589 - DNA, 1788 bp, synthetic construct
  misc_feature 1..1788: note = Description of Artificial Sequence: Synthetic coding sequence
  source 1..1788: mol_type = other DNA
atggcaaagcccgtgtaccacgccattacaaagcactcgcctaaaaaaccggtgatcgtgttcgttccatccagaaagcagacacgactcacagctatcgatatcttgaccacatgcgcggccgacatacaacggcaacggtttctgcactgcacagagaaggacctcatcccttatctggagaaattgtcagatagcacattgaaggagaccctcctcaatggcgtcggatacctgcatgagggcctgtcaccgatggagagacgacttgttgaacaactgttttctagtggcgcgattcaagtcgttgttgcatcaagatcgctgtgttggggaatgaacgtggccgcacacctggttattattatggatacacagtattacaacggcaagatccacgcctatgtggactaccccatatacgacgtcctgcagatggtgggccatgcgaaccggccattgcaggacgatgaaggacggtgtgtgatcatgtgtcagggttctaagaaggatttttttaaaaaatttctgtatgaacctctccctgtggagagccacctggatcattgtatgcacgaccacttcaatgctgagatcgtgaccaagaccatcgagaataaacaggatgcggtcgactatttaacatggacttttctgtacaggcgcatgacacagaacccaaactattataacctgcagggaatctcgcataggcacttgagtgatcatctctccgagctggttgagcagaccctgagtgatctggaacaatcaaagtgtatctctatcgaagatgagatggacgtggctccgctcaatctgggtatgatcgctgcctattactatatcaattacactacaatcgaactcttcagcatgtctttgaatgccaagactaaggtgaggggtctcatagaaattatctcaaacgccgctgaatatgagaacataccgatccgccatcacgaagacaatcttttgcggcagcttgcacagaaagtgccgcataaactgaataatccaaaatttaatgacccccatgttaagacaaatcttctcctacaagctcatctctcacggatgcagctgagcgcagaacttcaaagtgacacagaagagattctttccaaggcaatccgcctgattcaagcttgcgtggacgttctttcttcaaatgggtggctctcgcccgcactggcagccatggagctggctcagatggttacgcaggccatgtggtcaaaggacagttacctgaaacagttgccccactttacaagcgagcacatcaagcggtgtacagataaaggagtggagtctgtattcgacattatggaaatggaagacgaggagcggaatgcactcctacagctgacagatagtcaaatagcagatgtggcccgtttttgcaaccgttaccccaacatcgaattgagctatgaagtggtcgataaggacagcatcaggtctggagggcctgtagtggtgctagtccagttggaacgcgaggaagaagtgaccgggccagttatcgctcctctgtttccacagaaacgcgaggagggctggtgggtcgtcatcggagacgccaagagtaacagcctcatctccatcaaacggttgacattacaacaaaaagctaaggtgaagcttgatttcgtagcccccgcaactggcgctcacaattatacgctgtacttcatgagcgacgcctacatgggctgcgaccaggagtataagttcagcgttgatgtcaaagaagctgagacagacagcgactctgactag

SEQ ID NO: 134590 - DNA, 2325 bp, synthetic construct
  misc_feature 1..2325: note = Description of Artificial Sequence: Synthetic coding sequence
  source 1..2325: mol_type = other DNA
atgatgatactgtattgcactctgttggctagcgcgcagtcggaagcggaaaaggaaagaattatgggaaaaatggaggccgaccccgagttgtcaaagttcctctatcagctacacgagacagaaaaggaggacctgatcagagaggaacggagtaggcgggaacgggtgcgccagagccgcatggatactgacttggagacaatggacctggaccagggaggcgaagccctggcgcctcgccaggtgctcgatctggaagatctggtatttacccaaggctctcatttcatggctaacaagcgctgtcaactgccagatgggagttttcggaggcagagaaagggctacgaggaagtccacgtacccgctcttaaacctaagccattcggcagcgaggaacagctcttgcctgtagaaaagcttccgaagtacgcccaggcgggattcgaaggctttaagacactgaaccggatccagtcgaaactttacagagcggccctggaaaccgacgagaatctgctgttatgtgccccaacaggggctgggaagaccaatgtcgccctgatgtgcatgctgagagaaattggaaaacatataaacatggacgggacaataaatgtagacgactttaaaattatttacattgcccccatgcggagcctggtacaggagatggtggggtcctttggcaagagactggcgacatacggaataaccgtggccgaacttactggcgaccaccagctgtgcaaagaagagatttccgctacccagataatcgtgtgtacaccagagaagtgggatatcattacaagaaagggtggagaacgcacgtacacccaactcgttcgcttaatcattctcgacgaaatccacctgctccatgatgaccgggggcccgtgttggaggccttagtggctagggccataagaaacattgaaatgacccaggaagatgttaggcttattggcctttccgccacccttcctaattatgaggacgtggccacgttccttagggttgatccggcgaaaggcctgttttattttgacaacagttttaggccggtgcctctcgaacagacatatgtggggatcacggagaagaaagcaatcaaaagatttcagatcatgaacgagatcgtgtatgagaaaattatggaacacgcgggcaagaaccaggtgctcgtttttgtccactcaagaaaagaaaccggaaagacagcgagagcgatccgcgacatgtgtctcgagaaggacaccctgggactgtttttgagggagggtagcgccagcaccgaagtgcttcgcaccgaggccgagcagtgtaaaaacctcgaactgaaggacctactgccatacggcttcgctattcaccatgcagggatgacccgggtggataggactctggtggaagatttgtttgcagataagcacatccaggtgctcgtaagtaccgcaaccctggcatggggcgtcaaccttccagcacacaccgtcatcattaagggaacacaggtgtactcacctgagaaaggcaggtggacggaactgggcgcactcgacatactccaaatgttgggacgtgccggacgtcctcagtatgacactaagggagagggaatactcattacctcccacggcgaattgcagtattacctgagccttctcaatcagcaattgcccatcgaaagccagatggtctctaaattgccggacatgctgaacgccgagattgtcctgggcaatgtgcaaaacgccaaggacgccgtgaattggctgggctacgcctacttatacatcagaatgttgcggagtcccacactctacgggatatcccacgacgacctgaaaggcgaccccctgctcgaccaacgccggttggacctcgtacacactgccgccctgatgttagacaaaaataacttagtcaagtacgacaagaaaacgggcaatttccaggtcacagagttgggacgcatcgcgagtcactactacataacgaacgacacagtgcaaacatacaatcaactcttgaagccaacactgtccgagatcgaattatttcgggtgtttagtctgagcagtgagtttaagaatatcaccgttcgggaggaggagaagctcgaactgcagaagctgctggaacgggtacctattccagtgaaggaatccattgaggagcccagtgccaagattaatgtgctgttacaggcatttatctcccagctgaagctcgagggctttgctctgatggccgacatggtctatgtcacacagtcggctggacggcttatgagagccatattaaagctaagctag

SEQ ID NO: 134591 - DNA, 2160 bp, synthetic construct
  misc_feature 1..2160: note = Description of Artificial Sequence: Synthetic coding sequence
  source 1..2160: mol_type = other DNA
atgctgctccagagcagtgagggtagatgcgtatatattacaccaatggaggctttggccgagcaggtgtacatggattggtatgaaaaattccaggacaggctcaataagaaggtcgtgcttttgacaggcgagaacggtccagtgctcgaggtgatctgtagcaggatgaggtacattagttcgcagatcgagaggccaatccgaatcgtggccctgtcatcctcattgtctaatgccaaggatgttgctcattggctgggctgctccgcgacatctacttttaactttcatccaaatgtgcggcccgtgccattggagctgcatatacagggatttaacataagccatacccagactaggctgctcagcatggccaagccagtctaccatgcaatcaccaagcactctcccaaaaagcccgttatcgtcttcgtgccctctaggaaacagacacgacttactgcaatcgacattctgaccacctgtgccgccgatatccaaagacagagattccttcactgcactgagaaggacctgatcccgtaccttgagaagctgtcagacagcacgttgaaggaaacacttctcaacggagtcggctatcttcacgagggtctcagccccatggagcggcgcttagtcgaacagttgttctccagcggtgccatccaggtggtcgtagccagtagaagcttgtgttggggaatgaatgttgccgcccacctagtgattattatggatacccaatactataacggcaagattcacgcctatgttgattacccaatatatgacgtactccaaatggttggacatgctaaccggccactgcaggatgatgaaggccgttgtgttatcatgtgccaaggatcaaagaaggatttcttcaagaaatttctctacgagccattaccggtggaaagccatttggatcattgtatgcacgaccatttcaatgctgaaattgtcaccaaaaccattgagaacaaacaggatgcagtggactacctgacctggacatttctgtatagaagaatgacccagaaccctaattattacaacttacagggcatcagccacagacatcttagtgatcatttgagcgagttagtggagcagacactgagtgatttagagcagagcaagtgtatttcaatcgaagatgagatggacgttgctcctctcaacttaggaatgattgccgcctactattacatcaattataccacaattgagttattcagcatgtcgctgaacgcaaaaacgaaagttcggggcctgatcgagattatttccaatgccgccgagtacgagaatataccaatccgtcaccatgaggacaacctgctgcgacagctcgctcagaaggtgccacacaaactcaacaatcctaaattcaatgacccccacgtgaagactaatctgttgctacaggctcatctgtctagaatgcaactgtccgccgagctgcaaagcgacaccgaggagatcctcagcaaggccattcgcctgattcaggcgtgcgttgacgttctctcttccaacgggtggttgagtcccgccctggccgcaatggagctggctcagatggtcacacaagccatgtggtcaaaggactcctatttaaagcaattgccgcactttacaagcgaacacattaaacggtgcacagataagggtgtcgagtctgtcttcgatataatggaaatggaggacgaggaaaggaacgctttactgcagctaactgacagccagatcgccgacgtggcccgcttttgcaacaggtaccccaacatcgaactgagctatgaagtagtggataaagatagcatcaggtccggaggccccgttgtagtcttagtgcagctcgagagggaagaggaagtgacaggacccgtgatcgccccacttttcccacaaaaacgtgaggagggctggtgggtagtgattggggatgcgaagtctaacagcctaatcagcatcaaacgcctgacgctccagcaaaaagccaaagtgaagttggacttcgtcgctcccgcgaccggagctcataactatactctctattttatgtctgacgcttacatgggttgtgaccaggaatataaatttagtgtcgatgtgaaggaagccgaaactgactccgatagcgactag

SEQ ID NO: 134592 - DNA, 1074 bp, synthetic construct
  misc_feature 1..1074: note = Description of Artificial Sequence: Synthetic coding sequence
  source 1..1074: mol_type = other DNA
atgattgagcagcagaaaaggaagggtccagaactgcccctggtcccggtgaagcgccagcgccacgagttactgctgggggcagggtccgggcccggagccggccaacagcaggcaaccccaggcgctctgctgcaggccggacctccccgctgcagctcattgcaggctccaatcatgttgttaagcgggcacgagggcgaggtgtattgctgtaagttccatccaaatgggagcactttggccagtgcaggtttcgacaggcttattctgctatggaacgtatatggcgactgcgataattacgccactcttaagggccactctggggcagtaatggagttacactacaatactgacgggagcatgctgttcagtgcaagtacagacaaaacagtggcggtatgggacagtgaaaccggcgagagggttaagaggctcaagggccatacgagctttgtcaactcttgctacccagcgcgacggggtccacagttggtatgtacagggagcgacgatggcacagtgaaactgtgggacattagaaagaaggccgccattcagaccttccagaacacctaccaggtcctcgctgtcacctttaatgatacgagcgaccagataatttctggcgggatcgacaatgacatcaaggtgtgggacttacgccagaacaagctgacgtatacaatgcgcggccacgctgactctgtcaccggattaagtctgtcgtccgaaggcagctacctgttgtcaaatgctatggataatacagtgcgcgtgtgggatgtgcgcccctttgcgccaaaagaacgctgcgtgaaaatattccagggaaacgttcataactttgagaagaatttactgagatgctcctggtccccagacggtagcaagattgcagccggttccgcggacaggttcgtctacgtatgggacaccactagcagacgtatcttatataagctgcccggacacgcaggcagcatcaacgaggtggccttccaccccgacgagcctatcattatctctgcctcttccgataagcggctttatatgggcgagattcagtag

SEQ ID NO: 134593 - DNA, 384 bp, synthetic construct
  misc_feature 1..384: note = Description of Artificial Sequence: Synthetic coding sequence
  source 1..384: mol_type = other DNA
atgatactgattagcgctgggtgccctggcggactgtggcccattgtggtgctcgtaggtttgttcatatggatttgttttgctgtacgcgtgtgggacgtaagacccttcgcacccaaggagagatgcgttaaaatctttcagggaaatgttcacaactttgagaagaatcttctgcgatgcagctggtcaccggacggctccaaaattgctgccggatccgccgataggttcgtctatgtgtgggacaccacctcacggcgaatcctttacaaacttcccggccacgcagggagcattaacgaggtggctttccatcccgacgagccgataattatctccgcctcctccgacaaacgactttacatgggcgagatacagtag

SEQ ID NO: 134594 - DNA, 1230 bp, synthetic construct
  misc_feature 1..1230: note = Description of Artificial Sequence: Synthetic coding sequence
  source 1..1230: mol_type = other DNA
atgattgagcagcaaaagcggaagggacctgaactgcctctcgtgcctgtgaaaagacagagacatgaactactcttgggagcagggtccggaccgggagccggacaacagcaggctaccccaggcgctctgttgcaagcaggcccgccacggtgcagcagtctccaagcacccataatgctgctcagtggacatgagggtgaggtgtactgttgtaaatttcacccaaacgggtccaccctcgcctcagctggcttcgatcggttaatcctgttatggaacgtgtatggtgactgtgataactacgccactttaaagggtcattctggcgctgtgatggaactgcactacaataccgatggctcaatgctgttcagtgcaagcacagataagacagtagcggtttgggatagcgaaaccggtgaaagggtgaagaggctgaaaggacacacttcatttgtgaattcttgctaccccgccaggaggggtccccagttggtgtgcactgggtcagatgacggcaccgtaaaactgtgggacatccgaaagaaggctgctattcaaaccttccagaatacatatcaggtcttagccgttaccttcaatgacacttctgaccagattatcagcggcggcatcgacaacgacattaaagtatgggatcttagacagaataagcttacttacaccatgcgaggccatgccgattctgtgacagggctgagtctgagttccgaaggctcatacctgctgtcaaatgccatggacaacaccgttcgagtgtgggatgtgcggccgtttgccccaaaggagcgatgcgtcaagatcttccagggaaacgtccataatttcgagaaaaacttgctccgctgctcatggtctccggacggcagcaaaatcgcagctggaagcgcggaccgattcgtgtacgtatgggatacaacatctcggcgcattctgtacaaactgccaggccatgcgggcagcatcaacgaagtcgcattccaccctgatgagcctatcatcgaaacaggcttccaccggataggtcaggggggacatgagctcctgacctcttcaaatccacccgctagcgcatctcaatcagctggtataaccggggtgtcccactgtgctcaacttcagaccgtctttatgtgggtttcaatgagtgtgtcaccactgctgattagcggagaatcaaagtctaacgcccccttctcatcttag

SEQ ID NO: 134595 - DNA, 849 bp, synthetic construct
  misc_feature 1..849: note = Description of Artificial Sequence: Synthetic coding sequence
  source 1..849: mol_type = other DNA
atggctgtcccagagactcgaccaaatcacactatatacataaataacctgaatgagaaaattaagaaagacgaacttaaaaagagcttgtatgctatttttagccagtttggccagattctcgacatcctggtgagccgctccctcaagatgcgcgggcaggccttcgtaatcttcaaggaggtatctagcgcaaccaatgccctgaggtctatgcagggattccccttctacgataaacctatgaggatacaatacgccaagacggatagcgacatcatagctaaaatgaagggtacatttgtggagcgggaccgcaaacgtgaaaagcgcaagcctaaatcgcaggagactcctgccacaaagaaggccgtgcaggggggtggcgctacccctgtcgtaggtgctgtccaaggcccagtgcccgggatgcctccaatgacacaggccccgcggattatgcaccatatgccagggcagcccccttacatgcctccgccaggcatgatacctccacctggtctggccccaggtcagatccctcccggcgcaatgccaccccagcagctgatgccaggccagatgccccctgcccagccactctccgaaaatccacccaaccatatcctgtttcttaccaatttacctgaggagaccaacgaactcatgctctcaatgctgttcaatcagttccccggatttaaggaggtgagactggtccccggccggcacgatatcgcctttgtggaatttgacaacgaggttcaggccggcgcagctcgggacgccttacagggattcaagatcactcagaataacgccatgaagatctcctttgctaaaaagtag

SEQ ID NO: 134596 - DNA, 612 bp, synthetic construct
  misc_feature 1..612: note = Description of Artificial Sequence: Synthetic coding sequence
  source 1..612: mol_type = other DNA
atggccgtccccgaaaccaggccaaatcacaccatctacataattgcgaaaatgaaagggacattcgtggagcgggaccggaagagggaaaaaaggaagcctaagtcccaggagacccccgcgaccaagaaggcagtccagggcggcggtgccacacccgtcgtgggtgccgttcagggacccgtccctggaatgcctccaatgactcaggcaccaaggatcatgcaccacatgcctggccaacctccttatatgccgccgccgggcatgatccccccccctgggctcgcccccggtcagatccctcctggcgcaatgcccccccaacagttgatgccaggtcagatgccgcccgcacaacctctgtcagaaaatccgcccaaccatattctgttcctaaccaacctgcctgaggaaacaaacgaactgatgcttagcatgctattcaaccaatttcctggcttcaaggaggtgagacttgttcccggccggcatgatattgctttcgtggagttcgataatgaggtccaggccggggcggcgagggacgcactgcaaggtttcaagattacccagaacaacgcgatgaagatcagcttcgccaagaagtag

SEQ ID NO: 134597 - DNA, 768 bp, synthetic construct
  misc_feature 1..768: note = Description of Artificial Sequence: Synthetic coding sequence
  source 1..768: mol_type = other DNA
atggttaagctgaccgcggagctgatcgagcaggctgcacagtacaccaatgccgtgcgcgacagggaactggacttgagggggtataaaatcccggtcatagagaacctcggagcaactctggatcagtttgacgccatcgacttctccgacaacgaaatccggaagctcgacggtttcccgctcctgaggagacttaagactctgctggtgaataataacaggatatgccggatcggggaggggctggatcaggctttaccctgtctaactgagctaatattgaccaacaactccctcgtcgagctgggagatctagaccccctcgcgagtctgaaaagcctgacctacctatctatattaaggaacccagttacaaataaaaagcattaccgcctgtatgtgatatacaaagtgccccaagtgagggtcctagactttcaaaaggtgaaactgaaggagaggcaggaggcagagaaaatgtttaaaggcaaaaggggggcccaactagcaaaggatattgcccgcaggtccaaaaccttcaacccaggagccggcctcccaacagacaagaaaaagggcggtccttcaccgggcgatgtggaagcaatcaaaaatgccatagcgaacgctagcaccctggccgaggtcgaacggctgaaaggattgctccagtccggacagatcccagggcgggaacggagaagcggccctacggacgatggcgaagaggagatggaggaggataccgtgactaacggatcttag

SEQ ID NO: 134598 - DNA, 480 bp, synthetic construct
  misc_feature 1..480: note = Description of Artificial Sequence: Synthetic coding sequence
  source 1..480: mol_type = other DNA
atgccaaaattctactgcgattattgtgacacttatctgacgcacgactcgccatcagtgcgcaagacccactgtagcggtaggaaacataaggagaatgttaaagattactaccagaaatggatggaggagcaagctcagagcctcatcgacaaaaccacagctgcatttcagcagggcaagataccaccaacgccattcagcgcacctcctccagctggcgcaatgattccacctccacccagtctccccggcccaccccgcccaggaatgatgcctgcgccccacatgggaggaccgcctatgatgcccatgatggggccacctccaccaggcatgatgccggtgggaccagccccagggatgagaccccctatgggggggcacatgccaatgatgcccggtcctccgatgatgcgccctccagcacgtcctatgatggttcccacaaggccaggcatgactaggccggatcgctag

SEQ ID NO: 134599 - DNA, 543 bp, synthetic construct
  misc_feature 1..543: note = Description of Artificial Sequence: Synthetic coding sequence
  source 1..543: mol_type = other DNA
atgaacagtgccagcgttgacgggcatctcagcggatgcaggttgttcttgtttctctccccattattccggttctactgcgattactgtgacacataccttacgcacgactcaccgtcagtgcggaagacacattgctcaggtaggaagcacaaggagaatgtcaaggactactaccagaagtggatggaggaacaagcccaaagcctcatcgacaagactactgctgccttccaacaggggaaaattccgccgactccctttagcgcgccacctccagcaggggccatgatacccccacctcccagtttgcctgggcctccaaggcccggcatgatgcccgcacctcacatggggggccctccaatgatgcccatgatgggacctcccccccccggaatgatgcctgtcgggcctgctccagggatgcggcctcctatgggtggccatatgcccatgatgcctggcccccccatgatgcgcccccccgcaaggccgatgatggtgccgacaagacctggaatgacacgacccgacaggtag

SEQ ID NO: 134600 - DNA, 357 bp, synthetic construct
  misc_feature 1..357: note = Description of Artificial Sequence: Synthetic coding sequence
  source 1..357: mol_type = other DNA
atggaggaacaggcccagtcactgatagacaagactaccgccgccttccagcagggcaagattccacccactccattcagtgctcctccacccgcaggcgccatgatacctccccccccttcgttacccgggccacctcgacccgggatgatgcccgctccacacatgggcggacctcccatgatgccaatgatgggccctccacctccgggcatgatgcccgtcggtccagcccccggaatgcggcctcctatgggcggccacatgcctatgatgcccgggcccccaatgatgcggccaccagcacggccgatgatggtgcctacccgcccagggatgactcggccagacagatag

SEQ ID NO: 134601 - DNA, 159 bp, synthetic construct
  misc_feature 1..159: note = Description of Artificial Sequence: Synthetic coding sequence
  source 1..159: mol_type = other DNA
atgcgtattgagggatgcataattggcttcgacgagtacatgaatctggtgctggacgacgctgaggaaattcattcgaaaactaaaagtcggaagcagctgggcaggattatgctcaagggggacaacattaccttacttcagtcagtttccaactag

SEQ ID NO: 134602 - DNA, 279 bp, synthetic construct
  misc_feature 1..279: note = Description of Artificial Sequence: Synthetic coding sequence
  source 1..279: mol_type = other DNA
atggcttacaggggacaggggcagaaggttcagaaagtgatggtccagcctataaatttgatcttcagatatctccagaatcgaagccgcatacaggtgtggttgtacgaacaggttaatatgaggatagaagggtgtatcattgggtttgacgagtatatgaatttggtgctcgacgatgccgaggagatccacagcaagactaagagtcgcaagcagctcggacgaatcatgcttaagggagataacataacattgttacagagtgtgtcaaattag

SEQ ID NO: 134603 - DNA, 723 bp, synthetic construct
  misc_feature 1..723: note = Description of Artificial Sequence: Synthetic coding sequence
  source 1..723: mol_type = other DNA
atgacagttgggaagagtagtaagatgctgcaacacattgactatagaatgcgctgcattttgcaggacggacgtatctttattgggaccttcaaagcattcgataaacacatgaatctgatcctgtgcgattgtgatgagtttcggaagataaaacctaagaacgcgaagcagcccgaacgcgaggagaagcgggtactcggactggtgcttctgcggggcgaaaatctggtgtctatgacagtggaggggccccccccaaaggacacaggaatcgctagagttcctctggctggggccgctggcggcccaggcgtgggtcgcgctgcaggaaggggggtccccgcaggagtgcccattccacaagccccagcgggtctggctgggccagtgagaggggtgggaggccccagtcaacaagtgatgactccccaggggcgggggacagtagcagctgccgcggtggccgcaacagctagtattgccggcgctccaacccagtatccccctggcagagggactcctccacccccggtcgggcgggctactccacctcccgggattatggcacctccgcccggcatgcggccccccatggggcctcccattggccttccacctgctcgtggcactccgatcggcatgcccccaccagggatgaggccgccccctccggggattcgcggaccacccccccccggaatgagacccccccgaccctag

SEQ ID NO: 134604 - DNA, 723 bp, synthetic construct
  misc_feature 1..723: note = Description of Artificial Sequence: Synthetic coding sequence
  source 1..723: mol_type = other DNA
atgactgtgggaaaaagttctaagatgctgcagcacatcgactaccggatgcgctgcatcctgcaggacggacggatttttataggaacatttaaagctttcgataagcacatgaacctgatcttgtgtgattgcgacgagttccggaaaatcaagcccaaaaatgcaaaacagcctgagcgcgaggagaagagagtgcttggtttggttctgctgcgtggggaaaacctcgtcagcatgactgtcgagggccctcctccaaaggacacaggtatcgctagggtccctttggcgggcgcggctggaggccccggcgttgggcgagcagcggggagaggtgtcccagcaggggtgccgatcccgcaggcaccagccgggctggctgggcccgtcaggggagtgggaggcccgtcacagcaggtgatgaccccccagggaaggggcacagtggctgctgcagccgtggctgcaacagcgtctattgccggcgcccctacccagtacccacctggccgaggaacccctcccccgcccgtgggaagagctacccccccccccggcatcatggcgccgccccccgggatgaggcctcctatggggccccccataggactgccgccagcaaggggtactcctattgggatgccccctcccggaatgcgcccccccccccctgggatacgcggtccgcccccaccaggcatgcggccccctcggccatag

SEQ ID NO: 134605 - DNA, 723 bp, synthetic construct
  misc_feature 1..723: note = Description of Artificial Sequence: Synthetic coding sequence
  source 1..723: mol_type = other DNA
atgaccgttggcaagagttctaaaatgctgcagcacatcgattacaggatgcgctgcatccttcaagatgggcgaatctttattggcactttcaaggcgtttgacaaacacatgaatctgatactgtgcgactgtgatgagttccggaagataaaacctaagaatgcaaaacagccagagagggaagaaaagcgcgtgctcggactggtgctcctgcgcggtgagaaccttgtgtcaatgaccgtggaagggcccccacccaaagacaccggaatcgcccgtgtgcctctcgccggcgctgcaggcgggcccggcgttggtcgggccgccgggagaggggtcccagcaggggtgccgattccacaagctcctgccggtctggccggccccgtccgcggtgtgggggggccatcccagcaagtaatgaccccccagggcagaggaacagtggctgctgccgctgtcgccgctaccgcaagtatcgccggtgcgcctactcagtacccaccaggccgcggaactcctccaccacctgtcggccgagccaccccccctcctggcatcatggcacctccccccggtatgcgcccgcctatgggtcccccaataggcctgcctccagccaggggtactccaatcggtatgccccccccaggaatgcgcccacccccgcctggcatacgtggtcccccgcctccggggatgcggcccccgcgcccctag

SEQ ID NO: 134606 - DNA, 723 bp, synthetic construct
  misc_feature 1..723: note = Description of Artificial Sequence: Synthetic coding sequence
  source 1..723: mol_type = other DNA
atgaccgttggcaagtccagcaaaatgctgcagcacatagactaccggatgcgctgcatcctacaggacggtagaatattcattgggacctttaaagcattcgacaagcatatgaatctgattttgtgcgactgtgacgagtttcgcaaaatcaagccgaagaatgccaaacagcccgaacgagaggaaaaacgagtgttgggcctggtgctcctgagaggggagaacctggtaagcatgactgttgagggacctccaccaaaggacacgggtatcgctagggtaccgctcgccggggctgccggggggccaggggtggggcgagccgcgggaagaggtgttcctgcgggtgttccgatcccgcaagctcccgctggtcttgccggccctgtgcgaggtgtcggtggcccatctcaacaggttatgacaccacagggtagggggaccgtcgctgccgcggcagttgccgccactgcatccattgcgggggcccctacccagtacccacctggccgcggaacaccacctcctccggtggggcgcgctactcctccaccgggtatcatggctcccccccccggcatgagacctcctatggggccccccatcgggctgcctcccgcacgaggcaccccaattggtatgcctcctcccgggatgaggcccccacctcccgggatccgcggacctccacctcccggcatgcggccccctcgcccttag

SEQ ID NO: 134607 - DNA, 735 bp, synthetic construct
  misc_feature 1..735: note = Description of Artificial Sequence: Synthetic coding sequence
  source 1..735: mol_type = other DNA
atgatggattctcagaccgtgggtaagagtagtaaaatgttacagcacatcgattatcgcatgaggtgtatcctgcaagatgggaggatctttatcggcaccttcaaggcgttcgataaacacatgaacctgattttgtgcgattgcgatgaattccgtaaaatcaaaccaaagaatgcgaagcagcccgagcgagaggaaaagcgggtgctgggactcgtgcttttgcggggggagaatctagtctccatgacggtggaggggccgccacctaaggataccgggattgccagggtccctttggcgggagccgcaggaggacccggcgtaggcagagcagctgggcgcggggtgcctgctggtgtccccattccacaggctcccgccggattggctggacctgtccggggtgtcgggggcccatcccagcaagtgatgacaccccagggccgggggaccgtggcagccgcagcggtggcggctacggcctcaatagccggggcccccacccagtacccaccggggagaggcacacccccccctccagtgggtcgggctacgccccctcccgggatcatggcacctcccccaggcatgcggcccccaatgggtccacctataggcctgccacccgcccggggaaccccgattggaatgcccccgcctgggatgcgccctcctccccctggaatccgcggacctcccccacccggtatgcggccccctaggccttag

SEQ ID NO: 134608 - DNA, 945 bp, synthetic construct
  misc_feature 1..945: note = Description of Artificial Sequence: Synthetic coding sequence
  source 1..945: mol_type = other DNA
atgtctagagtgcctgcttttttgtccgctgcggaggtggaagagcacctgcgcagctccagcctactcattcctcctctcgagaccgctcttgctaacttctcttccggaccagagggtggcgtgatgcagcctgtgcgcaccgtggtgcctgtgaccaagcacagagggtaccttggggtgatgcccgcatatagcgccgccgaagatgcacttactacgaagctggttaccttctatgaagatcgcgggattacatcagtggtgccatcccaccaagccactgtcctcttgttcgagccaagtaatgggactctgctggctgtgatggatggcaacgtaatcacggctaagaggaccgccgcggtctctgccatcgcaacgaaattcctgaaaccaccctctagtgaagtactgtgtatcctcggggcaggtgtgcaagcatactctcactacgaaattttcaccgagcagttctccttcaaggaagtccggatatggaataggactaaagagaatgccgagaagtttgccgatacggtccagggagaggtccgggtctgttcctcagtgcaggaggccgtggcgggtgcagacgtcatcataaccgtgaccttggcaaccgagcccatactcttcggagaatgggtcaagcctggcgcccatatcaatgcggtaggagcttccaggcctgactggagagagttagatgacgaactgatgaaggaagcggtgctgtatgtggattcacaggaggctgcacttaaagagagtggcgacgtcttactgtctggcgctgagatcttcgcagagttgggagaggttattaaaggtgttaaacctgctcattgtgaaaagacaacagtttttaagtcccttggcatggctgtagaggacactgttgcagcaaaactgatttatgattcttggtcctctggcaagtag

SEQ ID NO: 134609 - DNA, 1248 bp, synthetic construct
  misc_feature 1..1248: note = Description of Artificial Sequence: Synthetic coding sequence
  source 1..1248: mol_type = other DNA
atggccactgttggggagtggtcctgcgtgcggtgcacatttctcaaccccgccggccaaagacagtgctccatctgtgaggccccaagacataagccggacctgaaccacattctgcgtctgtcagttgaggagcaaaagtggccgtgcgcaaggtgcaccttccgcaactttctcggtaaagaagcatgtgaagtctgcgggttcactcccgagccagcccctggtgccgccttcctgcccgtcctgaacggggtgctgccgaagccacctgccattctcggcgagcctaagggaagttgccaggaagaggcagggccggtccggaccgccgggctagtggccacggaacccgcgcggggacagtgtgaggataaagatgaggaggaaaaggaggagcaggaagaagaggaaggcgcggcagaacctcggggaggttgggcgtgccctcggtgcaccctgcacaacacaccagtcgcaagttcctgttccgtgtgcggtggccctcgacgtctcagtctccctagaattccccctgaggccctggtcgtgcctgaggttgtggccccagcggggttccacgtggtacccgctgccccacctcctggcctgccaggggagggcgccgaagcgaaccccccggcgacatcccagggaccggccgcagagcccgaacctccaagagtgccaccattctcgccctttagcagtaccttacagaacaaccccgtgccacggtctagacgtgaagttccaccgcagctgcagccccccgtacctgaggccgcccagccctcgccctctgcaggttgtcgtggcgcccctcaagggtccggatgggctggcgcctcgcgcctggcagaactgttgtcaggcaaaagactgagtgtgctagaggaggaggctactgaaggcggaacaagtagagttgaggctggctcgtctacctcagggagtgacataattgatctggctggcgacactgtgaggtataccccagcctccccttcatcgccagatttcacaacatggtcatgtgcaaaatgtactctgcggaaccctagccctccctctctgcagcctctagggagaggccctgagtctttaccccgtgctgccggcccccgcgctgggtgcgtgcagctcgaagccggccacgggggggcccggggctccccagcagatcacgctgggcgcagacatcatcctgcacaccgagagcctaggcgcgcggccagaggcccttag

SEQ ID NO: 134610 - DNA, 270 bp, synthetic construct
  misc_feature 1..270: note = Description of Artificial Sequence: Synthetic coding sequence
  source 1..270: mol_type = other DNA
atgagttcacagcagcaaaagcagccttgtacacccccaccgcagctacagcagcaacaagtcaagcagccatgccagcctccccctcaagaaccatgtatcccgaagacgaaggagccctgccacccaaaggtaccagagccttgtcaccccaaagtgcctgagccatgtcaacctaaggttcctgagccctgccatccaaaggtccccgagccctgcccgtccatagtaacacccgcccctgctcagcagaaaacaaagcagaagtag

SEQ ID NO: 134611 - DNA, 222 bp, synthetic construct
  misc_feature 1..222: note = Description of Artificial Sequence: Synthetic coding sequence
  source 1..222: mol_type = other DNA
atgtcttcccagcagcagaaacagccgtgcaccccacctcctcagttacagcagcagcaggtaaaacagccttgtcagccgcctccccaagagccgtgtataccgaaaaccaaagaaccctgccaccctaaggttccagaaccgtgtcaccctaaagtgcccgaaccctgtccttctatagtaacacctgcacccgctcagcaaaagacaaagcagaagtag

SEQ ID NO: 134612 - DNA, 219 bp, synthetic construct
  misc_feature 1..219: note = Description of Artificial Sequence: Synthetic coding sequence
  source 1..219: mol_type = other DNA
atgagctatcagcagcagcagtgcaagcaaccatgtcaacctccaccagtgtgtcctactccaaaatgtcccgaaccatgccctccgccaaaatgcccagagccctgccctcctcctaagtgtccacaaccttgcccaccccagcagtgtcagcagaagtacccacccgtgacaccgtctccaccttgccagtctaagtatccacctaaatcaaagtag

SEQ ID NO: 134613 - DNA, 219 bp, synthetic construct
  misc_feature 1..219: note = Description of Artificial Sequence: Synthetic coding sequence
  source 1..219: mol_type = other DNA
atgtcttaccagcagcagcagtgcaaacagccctgtcagcccccccccgtgtgtcccacccccaagtgcccagaaccctgtcccccgccaaagtgtcccgagccctgcccccctccaaagtgtccccaaccatgccccccgcaacagtgccagcagaagtatcccccggtgacccctagtcccccgtgccagccgaagtatcccccaaagagtaagtag

SEQ ID NO: 134614 - DNA, 219 bp, synthetic construct
  misc_feature 1..219: note = Description of Artificial Sequence: Synthetic coding sequence
  source 1..219: mol_type = other DNA
atgtcgtaccaacagcagcagtgcaaacaaccatgtcagcctccccctgtgtgtccaactccgaaatgtcccgaaccgtgccctccacccaagtgtccagaaccttgcccaccacctaaatgtcctcagccctgccccccccagcagtgtcagcaaaagtatcctcccgtcacacccagccctccctgccagcctaaatatccaccaaagtcaaagtag

SEQ ID NO: 134615 - DNA, 219 bp, synthetic construct
  misc_feature 1..219: note = Description of Artificial Sequence: Synthetic coding sequence
  source 1..219: mol_type = other DNA
atgtcatatcagcagcagcagtgcaagcagccctgtcagcccccacccgtgtgccctacccctaagtgcccagaaccctgcccccctccaaagtgtcccgagccatgccccccacctaagtgccctcagccgtgcccaccgcaacagtgccaacagaaatatcctcccgtaaccccctcccccccctgtcagcccaagtatcctcccaagtccaaatag

SEQ ID NO: 134616 - DNA, 510 bp, synthetic construct
  misc_feature 1..510: note = Description of Artificial Sequence: Synthetic coding sequence
  source 1..510: mol_type = other DNA
atgtcgagctatcagcagaaacaaacattcacccctccacctcaattgcagcagcagcaggttaagcagcccagtcagcctccaccacaggaaatctttgtgcccaccacgaaggaaccgtgccactcaaaggtgcctcagcctgggaatacgaaaattcccgaacctgggtgcaccaaggttccagaaccaggctgtacgaaagtgccggagcctggctgtaccaaagtccccgagccaggttgtacaaaggttccagagccgggctgtacaaaggtgcctgaaccaggctgcaccaaagtgcctgagcctgggtacacaaaagtccccgagcccgggtctattaaggtgcctgatcagggttttattaagtttcctgaaccaggtgctataaaagtgcccgagcagggttacaccaaagttcctgttcccggatataccaagttaccagaaccatgccctagtactgtgaccccgggtccggctcagcagaagaccaaacagaaatag

SEQ ID NO: 134617 - DNA, 510 bp, synthetic construct
  misc_feature 1..510: note = Description of Artificial Sequence: Synthetic coding sequence
  source 1..510: mol_type = other DNA
atgagttcataccaacagaaacaaacttttacccctcccccccagcttcagcagcagcaggtgaagcagccctcccagccacccccacaggagatcttcgtcccgacaactaaagagccctgtcattcaaaggtcccccagccaggcaacacaaagatcccagaaccaggttgcacaaaggttcctgaacctggctgtactaaggtcccagagcctggatgcaccaaggtgcctgagccagggtgcactaaagtgccagaaccgggatgcaccaaggtcccggagcccggctgtactaaggtgcctgaaccgggctacacaaaggtgcccgagccaggatccattaaagtacccgatcagggatttatcaaatttccagagccaggagcgatcaaagtccctgaacagggctacacgaaggtccctgtcccagggtataccaaactgccagaaccatgtcctagcaccgtgacacccggcccagcccaacagaagacaaagcagaaatag

SEQ ID NO: 134618 - DNA, 480 bp, synthetic construct
  misc_feature 1..480: note = Description of Artificial Sequence: Synthetic coding sequence
  source 1..480: mol_type = other DNA
atgagtagttaccaacaaaaacagacctttacaccacccccacaactacagcagcagcaagtgaaacagccctcacaacccccaccacaggagatattcgttcccacaacaaaagaaccttgccattctaaggttccacagcccgggaacacaaaaatccccgagcccggatgcacaaaagtgccagaaccaggctgcaccaaggtacccgaacctggctgcaccaaagtgccagagccagggtgcactaaggtccccgaacctggctgcaccaaagtgcccgagccagggtgtactaaagttcccgaacccgggtatactaaagtcccggagcctggctccataaaggtccccgatcagggtttcatcaagtttcccgaacccggagctatcaaagtgccggaacagggctatacaaaagtgcctgtaccaggctacaccaagttacccgagccatgtccctccacagtgaccccctag

SEQ ID NO: 134619 - DNA, 486 bp, synthetic construct
  misc_feature 1..486: note = Description of Artificial Sequence: Synthetic coding sequence
  source 1..486: mol_type = other DNA
atgagctcctatcaacagaagcaaactttcactcctcccccccagctgcagcagcaacaagttaaacagccaagtcagccgccgcctcaggagatattcgtgccgaccactaaggagccatgccacagcaaagtcccgcagcctggaaacacgaaaatacccgagccgggctgcacaaaagtaccggaacctggatgcactaaagtgcctgagccgggctgtaccaaggtgcctgagccgggatgtaccaaggtgcccgagccagggtgcaccaaggtgcccgaacccggctacaccaaggttccggaaccagggagcattaaagtcccggaccaggggttcattaagttccccgagcctggtgcgattaaggtgccagaacagggttacacaaaagttcctgtgccaggctatacaaagttaccagaaccctgtcccagcaccgtgactcccggcccggcccaacaaaagacgaagcagaagtag

SEQ ID NO: 134620 - DNA, 10989 bp, synthetic construct
  misc_feature 1..10989: note = Description of Artificial Sequence: Synthetic coding sequence
  source 1..10989: mol_type = other DNA
atgtctaggcgagcccctggcagcaggctctcttcgggaggcggaggcggggggaccaaatacccccgtagctggaatgactggcagccccgcactgacagcgctagcgccgatcccgacaacttgaagtacagctcttcccgagaccgcggtggtagctcctcctatggacttcagccaagcaactcggccgtggtgtctcggcagcgccatgatgatacacgcgtgcatgccgacatccagaatgatgaaaaaggaggatacagcgtgaatggagggagtggagagaacacatacggcagaaaatcactgggacaggagctgagggtcaacaacgttacatccccggaatttacctccgttcagcacggcagcagagccctcgccacaaaagatatgagaaaatctcaggagcgatctatgagctatagtgatgagagccgactctcgaatctcctgcgccgaattactagagaggacgatcgggatcggcgactggcaaccgtcaagcaactgaaggaattcatacagcagccagaaaacaaactggtcctggtgaaacagctggacaacatcttggcagccgtgcatgacgtgcttaacgagtccagcaaactgctccaggagttgcgacaggaaggtgcctgctgtctagggctactctgtgcctccctttcttacgaggctgagaaaattttcaagtggatctttagcaagttctcctcgagcgcgaaggatgaggtaaagctgctctacctgtgtgctacctacaaggcattggaaaccgttggagaaaaaaaggcattctcatctgtgatgcagttagtgatgaccagtctccagagcatcttagagaacgtcgacacacccgagctcctgtgtaagtgtgttaagtgtatactcttagtggcgaggtgctatccccatattttctctacaaacttccgcgacacggttgatatactggttggttggcacattgaccatacccagaaaccaagtctgacacaacaagtgtccgggtggctccagtcattggagccgttctgggtagcggacctcgctttctcaaccacattactggggcagttccttgaggacatggaagcctacgcagaagacctttctcacgtggcctccggggagtccgtggatgaagatgtgcctcctccctcagtctccctccccaagctggcagccttactgcgggtatttagcaccgtcgtgcggtcaatcggcgagaggttcagtcccataaggggtcctccgatcacagaggcgtacgtgacagacgtgctgtatcgagttatgcgctgcgtaaccgctgcaaatcaggtatttttctccgaagctgtgttgacagcagcaaacgagtgtgtaggcgtgctgcttggttcactggaccccagcatgaccatccactgcgacatggtgatcacctatgggctcgaccagctggagaattgccagacgtgcggaaccgactacataatcagcgtactgaatctcttgaccctaattgttgagcagattaacaccaagctgcccagtagctttgtagagaagctgtttataccatcgagtaagctgttattcttaagataccataaggagaaggaggtcgtggcagtcgctcacgcggtctaccaggccgtcttaagccttaaaaacatccctgtcctagaaaccgcatacaagctcatcctaggtgagatgacgtgcgcactgaataacctactgcacagtctgcagctcccggaagcttgcagcgagatcaagcacgaagcatttaaaaatcatgtttttaacgttgacaatgctaagttcgtagtgatcttcgaccttagtgccctgaccacaatagggaatgccaagaattctttgatcggaatgtgggcactcagccctaccgtcttcgctctacttagtaaaaatctgatgatcgtgcatagtgatcttgcagttcattttcccgccatccagtatgcagtgctttacaccctgtatagccattgtacccgacacgaccactttatcagctcctcactgagtagtagttccccctcactcttcgatggcgccgtcattagtacggtgacaactgcaaccaaaaaacatttttctattatccttaacctgctggggatccttctcaaaaaagacaatctcaaccaagatacccggaagctcctgatgacctgggctctggaggcagcggtgcttatgaagaaatcagaaacctacgcacccctgttctcactgcctagctttcataaattttgtaagggactgctggccaacacactggtggaggacgtgaacatttgcctccaggcgtgttcctccctgcacgcactctcctcatccctccccgacgacttactgcaacgctgtgtggacgtgtgccgcgtccagctcgtgcacagcggaacacgaatacgacaggccttcggtaagcttttgaaatcaattcctctggatgtggtcttgagcaataataaccatactgaaatccaggagatttctctagctctgcgctcccacatgtccaaagctccatcaaacacgttccatccacaggatttcagcgatgtgatctcttttatcctgtatgggaacagtcaccgaacaggtaaagacaattggctcgagcggctgttctatagctgccagcgcctggacaagagagaccagtcaacaataccgcgcaaccttctgaagaccgatgcagtactctggcagtgggccatttgggaggctgcacagttcaccgtgctgtcaaaactgagaactcccctggggagggcacaggacacattccagacaatcgagggcattatacgatcgctggctgctcatacactgaacccagatcaggacgtcagtcagtggactaccgccgacaacgacgaaggacacggcaataaccagttgaggctcgtgctgttgctgcagtatctggaaaatctcgagaaactgatgtataacgcttacgaggggtgtgctaatgccctgacgagtccgcctaaagtgatccgcacctttttctacaccaaccggcagacttgccaagactggttgactcggatcaggctgtcaattatgcgcgttgggctgctggctggacagccagcggttaccgttcggcacgggttcgatttgctcacggagatgaagaccacaagtctgtcccaggggaatgaactagaggtcaccatcatgatggtggtcgaagctctgtgtgagttgcactgccccgaggctatccaggggattgcagtgtggagctctagcattgtcggaaaaaatctgctgtggatcaattccgttgctcagcaggccgagggccggttcgagaaggcctctgtggaatatcaggagcacctgtgcgcaatgacaggcgtagactgttgcatcagctctttcgataaatcggttttaactctggctaatgccggccgtaattccgcttcccccaagcacagccttaacggtgaatccagaaagacggtgctgagcaagcccactgacagttcgcccgaggtgattaactacctgggaaataaggcctgtgagtgttacatcagtatagccgactgggctgccgttcaggaatggcaaaacgccatccatgatctcaaaaagtctacctcatctaccagcctcaatctcaaggccgacttcaactatattaagtctttaagttctttcgagagcggcaagtttgttgagtgtacagagcagctggaactgctgccgggcgagaacatcaatctccttgcaggaggatctaaggagaaaattgatatgaagaagctgctgcccaatatgctgtcccccgacccccgcgagctccagaagtcgattgaagtgcaacttctccgtagtagcgtttgccttgcaaccgccttaaatcctatcgagcaggaccaaaaatggcaaagcatcacggagaatgtcgttaagtatttaaaacagactagtcgtattgctataggaccgttgcgcctctccactctcacagtgtcgcagtcgctgcccgtcctttccacgctgcagttatattgctcttctgctctcgagaacaccgtgagtaacagattgtctactgaagattgcctcatccctctcttttccgaggcgctgcggtcctgcaaacagcatgatgttagaccttggatgcaggcgctgaggtatacaatgtaccagaaccagctccttgagaagatcaaggagcagacagtgcccatacggtcccaccttatggagcttggattgactgctgctaaattcgcacgtaaaaggggaaatgtgtccctcgcaacccgccttcttgcccaatgcagcgaagtgcagttaggcaaaacaaccacggcgcaagatcttgtacagcactttaaaaagctgtccactcaggggcaggttgatgagaagtggggacccgaactggatatagagaaaaccaagttgctttataccgctggacagagtacacacgcaatggagatgctgtccagctgcgcaataagcttttgtaaatccgtgaaagccgagtacgctgtagctaaaagcattctgacgctggccaagtggattcaggccgaatggaaagagattagtggccagctaaaacaggtataccgcgcccagcatcagcagaacttcaccggactcagcacattgtctaagaatatcctgacactaatcgagttgccatcggttaacactatggaggaggaatacccacggatagagagcgaatcgaccgtacatataggggtgggcgagcccgattttatcctgggacagctgtaccacctttcttctgttcaagcacccgaagtggccaagtcttgggccgccctcgcaagttgggcctaccgctggggacgcaaggtggtggacaacgcctcacagggcgaaggcgtgagactgctccccagggagaagtccgaggtccagaatctgttgcccgatacgattactgaagaggagaaggagaggatctacggcatactgggccaggccgtatgtcgcccagcaggtattcaggatgaggatattactttgcagataaccgagtccgaggataacgaggaagatgatatggtagatgttatctggaggcagctaatttcctcctgcccctggctctccgagcttgatgagagtgctacagagggcgtcatcaaggtctggaggaaagtggtcgacaggatcttctcactgtataagctgtcatgctctgcttacttcactttcctgaagctgaatgctggacagatccccctggacgaggacgacccacgactgcatctgagccaccgggtggaacagtcaaccgatgacatgattgtgatggccacactacgactgctccggttgctggtaaagcacgccggcgagttacgccagtatttagagcatggactcgaaaccaccccaactgccccttggaggggtataatccctcaattattttccagactgaaccatcccgaagtttatgtacgccagagcatttgcaacttactgtgtagggtggcccaggactcgccacacctgatcttataccccgcaatagtggggacaatttccctgagcagtgaaagccaagctagcggcaataaattctcaactgcaatccccacattattaggcaacatccagggcgaggagctgctagtatcggaatgcgaaggcggctcaccaccagcgagtcaagatagcaataaggacgaaccaaaatccggactaaatgaggatcaagcaatgatgcaagattgttactcaaagatcgtggacaaactcagcagcgcaaatcccaccatggtactgcaggtgcaaatgcttgtggctgagttgcggcgcgtcaccgttctttgggacgaattatggctcggcgtgttgcttcagcagcacatgtacgtcctgaggcgaatccagcagttggaagatgaagtcaagcgcgttcaaaacaacaacactctacgaaaggaggagaaaatcgccataatgcgagagaagcacactgctctgatgaaacccattgtattcgcactcgagcatgtaaggagtatcaccgctgcacccgcagaaacccctcacgaaaagtggtttcaggataattatggggatgccattgagaatgcgcttgaaaagctcaagacccccctcaaccctgctaaaccagggagtagctggattcctttcaaagaaatcatgttgagcctccagcagagagctcagaaacgagcctcctatatactccggctggaggagatctccccttggctggctgccatgaccaataccgagatcgctctcccaggagaggtgagtgcccgtgatactgtaaccatccatagtgtcggaggaaccatcacaatcctccctaccaagactaaacccaaaaagctacttttcctgggcagcgacggtaaatcatacccctatctgttcaaggggttagaggaccttcatctggacgagcgcatcatgcaatttttaagcatagtgaacaccatgttcgcaactataaatagacaagaaacaccacgatttcacgctcggcactactcggttacgccacttggcaccagaagtggcctgattcagtgggtggacggcgcgacacccttgttcgggctgtataaacggtggcaacagcgggaagcagcccttcaggcccagaaagcccaggattcctaccagactccccagaatcctggcatcgtgcctaggccaagcgaactgtactactcaaagatcggcccagcccttaagactgtgggcctctctctcgacgtctcacggcgggactggccattgcatgtgatgaaggccgtcctggaagaacttatggaagccactccccctaatttgctggccaaggagttgtggtccagttgtaccacacctgatgagtggtggcgcgtgacccaatcatacgccaggtctaccgcggtcatgtctatggttggctacatcatcggtcttggggacagacacctcgataatgtgctgatcgacatgactacaggggaggttgtgcatatcgactacaatgtttgcttcgaaaaaggcaagtcactgagggtcccagagaaggtgcctttcagaatgacacagaacattgaaactgcacttggggtgaccggagtggagggggtgtttcggctgtcatgtgagcaagtgctgcacatcatgagaagaggtcgcgagaccttgctgacactgctggaagcattcgtatacgaccctctcgtggattggactgccggtggtgaggcaggttttgctggggccgtttatggcggagggggccagcaagcagagagcaaacagagtaaaagggagatggaacgagagatcacgaggagtcttttttcctccagagtcgccgaaatcaaggtgaactggtttaaaaaccgggatgagatgctggtagtgctgccgaaactggacggctctctggacgaatacctgagccttcaggagcaacttaccgatgtcgagaagctgcagggaaagctcctggaggagatcgagttcttagaaggggctgagggcgtggatcacccttcccatactctacagcatagatactccgagcacacccagttgcagacccagcaaagggccgtgcaggaggcaattcaggtaaagctgaacgagttcgagcagtggattacacattatcaggccgcttttaacaatctggaagcgacccaactagcaagcttgctgcaagaaatctccacacagatggatctgggcccgccgtcttatgtccccgctaccgccttccttcagaacgcggggcaggcccacttgatttctcagtgtgaacaactggagggggaggtgggagctctgctgcagcagcgtcgctcggtgctccgaggttgccttgaacagttgcatcactacgcaaccgtggccctgcagtatcctaaagccatctttcagaagcaccgaatagagcaatggaagacatggatggaagagctcatctgtaatacaacagtcgagcgatgtcaggagctttatcgtaagtacgagatgcagtatgcaccccagccaccacccacggtctgtcaatttattacagcaactgagatgaccttacagcggtatgccgcggacatcaatagccgtctgattcgccaggtcgaacgcctgaagcaagaggccgtaacagtgccagtgtgcgaagatcagctgaaggagatcgaacggtgtatcaaagtttttctgcacgaaaatggggaggagggaagccttagcctagcctctgtgataattagcgccctttgtacgctgactcggaggaatctaatgatggaaggcgctgcatctagcgctggcgagcagttggtcgatctcacgagccgagatggggcatggttcctggaggaactgtgttctatgtcaggaaacgtgacctgcctggttcagctgctgaagcagtgtcacctggtgccgcaggacctggatatcccaaaccctatggaggcatctgagactgtgcatttagccaacggagtctatacctcacttcaggagctcaatagtaactttagacagattatcttccctgaggccctacgctgcctcatgaagggagaatacaccctcgagtcaatgttacatgaactggacgggcttatcgagcaaacaaccgatggcgtgccccttcagaccctagtggagtccctgcaagcatacttgcggaacgctgccatggggctggaggaggagacccatgcacattacattgatgtggcacgtctgttgcacgcccaatatggcgagctgatacagccccgcaacggttcagtagacgagacgcctaaaatgtctgccggccaaatgctgctggtggcgtttgacggcatgtttgcccaggttgagactgcatttagcttgttagtcgagaaactgaataaaatggaaatcccaatcgcctggaggaaaatcgatatcatcagggaggctaggtctacacaggtgaactttttcgatgatgacaatcatcggcaagtgctcgaagagatcttctttctgaaacggctgcagactatcaaggaatttttccgcctgtgcggcacgttctcaaaaaccctctcaggctctagttctctggaggatcagaatacagtgaacggtcccgtgcagatcgttaacgtaaaaacgctgtttagaaatagctgtttcagtgaggaccaaatggctaagccgatcaaagccttcacggcagattttgtacgtcaactactgataggactcccgaatcaggctttaggcctgacactgtgttcttttatctctgcactgggggtggatataatcgcccaagtagaggcgaaggattttggagccgagtctaaggtttcagtggatgacctgtgtaaaaaagcagtagaacataacatccagatagggaagttttcgcagttggtgatgaaccgggcaacagtgttggcctccagctatgacaccgcctggaagaaacatgaccttgtgcggcggctggagacatcaatctcttcatgtaagacttccctgcaacgcgtgcagctgcacattgccatgtttcaacagtggcagcatgaagacctgttgataaaccgacctcaggcaatgagcgtgaccccccctcctaggagcgccatcctgacgtccatgaaaaaaaagttgcacacgctcagccagatagagacctcaatcgccaccgtccaggaaaagctggccgccctcgaaagcagcatcgaacaaagactcaagtgggctgggggagcgaacccagccctggcccctgtgctgcaagattttgaggctacgatcgctgaaagaaggaaccttgtgcttaaggagtcccagagggccagccaggtgacattcctctgttcgaacatcatccactttgagagtctgcggactcgaacagcagaagccctgaatctggacgccgccctattcgagcttatcaaacgatgccagcaaatgtgctcttttgcgtctcagtttaatagttccgtcagtgagctggaactgcggcttctccagagggtggacactggacttgagcacccaattggctccagtgaatggctgttgtctgcgcacaaacaactcacacaggacatgtcaactcagcgggcaatacaaacggaaaaggagcaacagattgagaccgtgtgtgagacaatccagaatcttgtggataacataaagaccgttttgaccggacacaataggcaattgggggatgttaaacacttactgaaagccatggctaaagacgaagaggctgcacttgccgatggcgaagatgtcccatacgaaaactcggtaaggcagttcctgggagagtacaaaagctggcaagacaatatccagaccgtgctgttcactctggtgcaagctatgggacaagtacggagtcaggagcacgtcgagatgctgcaggagattacacccaccttgaaggagctgaagacacagtcccagagcatctataacaatttggtgagcttcgcgtccccactcgtcaccgacgccactaacgaatgcagctcacctacttcatctgctacttaccagcctagctttgccgctgctgtacgctctaatacaggccagaaaacccaacctgatgtgatgagtcagaatgctaggaagctcatccagaaaaatttagctacttctgccgatacccctccaagtacagtgcctgggacaggaaagagcgtggcctgcagccctaagaaggccgtcagagatcctaaaactggtaaggctgttcaggaacgcaactcctatgctgtgagcgtgtggaagcgggtcaaggccaagcttgaaggccgggatgtggatccaaatcgcagaatgagcgtggccgaacaagtggattacgtcatcaaagaagcgactaacctggataatttggcccagctgtacgagggctggacagcatgggtgtag

SEQ ID NO: 134621 - DNA, 10986 bp, synthetic construct
  misc_feature 1..10986: note = Description of Artificial Sequence: Synthetic coding sequence
  source 1..10986: mol_type = other DNA
atgagccggcgcgctcctggaagccgcctgtcgtcaggggggggcggaggcggaactaagtaccctcgcagctggaatgactggcagccccgaaccgattctgcatctgccgaccctgacaacttaaagtactcttccagcagggaccgcgggggatcatcttcttacggtctccagccaagcaattccgcagtagtgtcaaggcagcgccacgatgacactcgggtccacgccgacatccagaacgatgagaagggcgggtactctgttaatggcggttccggggaaaatacatacggccgaaagagcttgggacaggagttgcgcgtgaacaacgtgaccagtccggaatttacctcagtacaacacgggtcaagggccctggctacaaaggacatgcgcaagtcccaggagcggtctatgtcatactccgacgaatcccgtctgagtaatttactgcgcaggatcactagggaggatgaccgagatcgacgccttgccactgtcaaacagttaaaggagttcattcagcagccagagaataaattggtactggtgaagcagctcgacaatatcctagcggctgtacacgacgttctgaacgagtcatcgaaacttctccaagagctgcggcaggaaggggcctgctgccttggcctgctctgtgcgtccttgtcttacgaggctgagaagatcttcaaatggatcttttccaagttctcctccagtgctaaggatgaagtgaagttgttatacttatgtgccacgtacaaggccctggagaccgtgggcgagaaaaaagccttcagtagcgtgatgcaacttgtgatgacctccctacaatctattctcgagaatgtcgataccccggagctcctgtgcaagtgcgtgaagtgcattcttttagtcgcccgatgttatccccatatattctctacgaacttccgagacacagtggacatcctggtaggttggcacattgatcatacccagaaaccttcgttgacccagcaagtttcgggctggctacagagcctggagccgttctgggttgctgaccttgccttctcgaccacacttctggggcaattcctggaggacatggaggcctatgccgaagatcttagccacgtggccagtggagaaagtgtggacgaggatgtgccccccccgagtgtgtctctgcccaagttggcagcgctgctgagggtgttctccactgtggtccgtagcataggcgaaagattctcaccaatcagggggcctcctataaccgaggcatatgtgacagacgtcttataccgggtaatgagatgcgttactgctgcaaaccaagtgtttttctcagaagccgtgcttaccgctgctaacgaatgtgtgggggtcttgctcgggtcacttgatccaagtatgacaatccactgtgatatggtaatcacttacggcctggatcagctcgagaactgccaaacttgtggaactgattacatcatatcagtcctgaatctgttgacactcattgtcgaacagatcaatactaaactcccttcgtcatttgtggagaagctgttcattccctcttccaagttactattccttcgctatcataaagagaaggaggtggttgctgtcgctcacgcggtctaccaagcggtgctctcgctcaagaacattcccgtgctcgaaactgcctataagctcatattaggcgaaatgacttgcgccctcaacaacctactgcattcactgcaactgcctgaggcctgctccgaaatcaaacacgaggcttttaagaaccacgtgttcaacgtggataacgccaaatttgtcgttatttttgacctgagtgcccttacaacaatagggaatgctaagaactcattgattgggatgtgggcgctaagccctaccgtgtttgctcttctcagcaagaacttgatgatcgtccattctgacctcgcagtgcacttcccagcaatccagtatgcggtcttgtatacgctgtatagtcattgtacaaggcacgatcattttatttcctcaagtctgtcttcctcctccccctcactgtttgacggcgcggttattagtaccgtgaccaccgccacaaaaaagcacttctcaattattctaaacctgttggggatcttgctcaagaaggataacctcaaccaagatacccgtaagctactgatgacatgggctctggaggcggccgtgctaatgaaaaagagcgagacctacgcacccctgttctctcttcccagctttcacaaattctgtaaaggactgcttgctaacacgctcgtcgaagacgtgaacatctgcttgcaagcctgcagctcactgcatgcactctcttcatcactccccgatgacctgctccagagatgtgtggatgtgtgtcgcgtgcaacttgtgcatagtggcacaaggataagacaggccttcggcaaactactgaaatcaatcccgctggatgtcgtgctgtctaataacaatcatacggaaattcaagaaatttcactggcgttacgatctcacatgagcaaggccccgtccaacactttccacccacaggacttttcggacgttataagctttatcttatacggaaactcacatcgcacaggaaaggacaattggttagaacgccttttttactcatgccagcggctggataaacgggaccaaagcacaatcccccgcaatctgcttaaaaccgacgcggtgctttggcaatgggccatctgggaggccgcccagttcaccgtgctgagcaaattgcgcaccccactgggccgggcccaggacactttccagactattgagggcatcatccgcagcttagcagctcatacacttaaccccgatcaggacgtcagtcagtggaccaccgccgataacgacgaggggcacggtaacaatcagctcaggctggtccttctgctccaatacctggaaaacctggaaaagctgatgtacaacgcgtacgagggatgtgcgaacgctctaacatcgccccccaaggtaattaggacattcttttatactaatcggcagacatgccaggattggctgaccaggattcgattgtcaatcatgcgggtcggccttctggccggacaaccggctgtgactgtacggcacggatttgatttgctgaccgagatgaagacgacatcattgagccaaggcaacgagctcgaagttactatcatgatggtcgtggaggcactgtgcgagctccactgtccggaagctatccaaggcatcgcagtttggtcatccagcatagtgggtaagaatctgctctggatcaactccgtagcccagcaggccgaggggcgctttgaaaaggcttccgtggaataccaagaacacctgtgtgccatgactggggtggactgctgcatctcctccttcgacaagtccgtgcttaccttggcaaatgccgggcgcaactccgcctcacctaagcactcgctcaacggtgagagtaggaaaacggtcctgtcaaagcccaccgacagttctccggaggttatcaattatctgggcaataaggcctgcgaatgctacatatcgattgctgattgggccgcagtccaggaatggcagaacgcgattcacgatctcaaaaagagtacttcatccaccagcttgaatcttaaagcagacttcaactacatcaagtccctgagctcgttcgagtcagggaagtttgtggagtgtactgagcagctggagctcctgccaggtgagaatatcaatctgctcgctggaggatcaaaggaaaagatcgatatgaagaagctattgcctaacatgttgagtcccgatcccagggaactccagaaaagcatagaggtgcagttgctgcggtccagcgtatgtcttgctacagcccttaatccaattgagcaggaccagaagtggcagtctatcactgaaaacgtggtgaagtatctcaagcagacgagtagaattgctatcggaccgctgcgattaagcaccctcaccgtgagccagtccctgccggtcttgagcacacttcagctgtattgcagcagcgccctggagaacacagtttccaaccgactgtctacggaagactgcctgattcctctttttagcgaggcactgaggtcgtgtaagcaacatgatgtacggccatggatgcaggctctgcgctatactatgtatcaaaatcagctgctagagaaaatcaaagaacaaaccgtgcccatcaggagccatctaatggagttagggctcactgccgctaaattcgcaagaaaaagggggaacgtatccctggccacccgattattggcccaatgcagtgaggtgcagctgggaaagacaacaaccgcacaggacctggtgcagcactttaagaagctatcaacacagggccaggtggatgagaaatgggggccagagctcgacatcgagaagacaaagctgttgtacactgccggccagagtacccacgccatggaaatgcttagtagctgcgcaatctcgttctgtaagtcggtgaaagcagagtacgccgttgctaagtccatcctgacattagctaaatggattcaggctgaatggaaagaaataagcggtcagctgaagcaggtgtatagagctcaacatcaacagaatttcaccggcttgtccacactgtccaaaaatatcctcaccctgatcgaactcccgagcgttaacactatggaggaggagtatcccaggatcgagagcgagagtacggttcacattggggtcggagaaccagacttcattctcggccagctgtatcacctgtccagcgttcaagcgccggaggtggctaaaagttgggcagctctagcgtcctgggcataccggtggggccgtaaagtagtggataacgcaagccagggagagggggtccggctattgcctcgcgaaaagtctgaagtgcagaacctcctgccagatactatcaccgaggaggaaaaagaacgcatatacggtatcctgggacaggcagtctgcagacccgccggcattcaggatgaggatataacattgcaaattacagagagcgaagataacgaggaggacgatatggtggatgtgatatggcgacaactcattagtagctgcccctggctttctgagctggatgaatccgccaccgaaggagtgattaaagtctggcgcaaggttgtagataggatcttcagcttgtacaagctgtcctgtagtgcatacttcacattccttaaattgaacgccggacagatccccctcgacgaggacgatccgagactgcatctgtcacaccgggtcgaacaaagtaccgatgacatgatcgtaatggccactttacggctgctccgactgctcgtcaagcacgctggtgaactgaggcagtatttggaacacggactcgagaccacacccacagccccctggcggggcattattccgcagctcttctctcggcttaaccaccctgaggtttacgtgcggcagagcatctgtaatcttctctgccgtgtcgcacaggacagcccgcatctcattctatatcctgcaatcgtgggcaccattagccttagctccgagtcccaggctagcggcaataagtttagtactgcaattccaaccctgctagggaacatccagggcgaggagctcctggtgtccgagtgcgagggcggctccccaccggcatcacaggactcgaataaggatgagccaaagtctgggctcaacgaagatcaagcaatgatgcaggactgttattccaaaatagtggacaagcttagcagtgctaatcctactatggtgctgcaggtgcagatgcttgtggcagaattgaggcgggtgacagtgttatgggacgaactttggctgggagtgcttctgcagcaacacatgtatgtgctgaggaggattcagcagcttgaggacgaggtcaaaagagtacagaataataatacactcagaaaggaggaaaagatcgcaattatgagagagaaacataccgccctgatgaaacccatcgtgttcgccctggagcatgtcaggagtattactgccgcacccgccgaaacccctcatgagaagtggttccaggacaactacggagacgcaatcgaaaatgcgctggaaaaacttaaaactcctctcaatccagcgaaaccaggcagctcatggattccattcaaggaaattatgctctcgcttcaacagcgcgctcagaaacgggcatcctacattctgaggctagaagaaatcagtccctggctcgctgctatgacgaacaccgagatagctctgccaggcgaagtgtcagccagggataccgtcacaatacatagtgtggggggcacaatcactattttacctactaaaacaaaacccaaaaagctgctgtttctaggttcagatggcaaaagttatccgtaccttttcaagggcctcgaagacttgcatctggatgagcgcattatgcagttcttgtctattgtcaataccatgttcgcgaccatcaatcgccaagaaacccctcggtttcacgctcgacactactccgtgactcccctagggacgaggtcggggctcatccagtgggtggatggtgccactccactgtttggtttgtacaagaggtggcagcaacgagaagcggcattacaggcccagaaggctcaggactcctatcagaccccacagaatccagggatagttcctcggcctagtgaattatattatagtaaaatcggccctgccctgaaaaccgtcggcctgtcactggacgtgtctcgccgagattggcctctccatgttatgaaggctgtcttagaggagctcatggaggctactccccccaaccttctggctaaggagctgtggagttcttgcacgactcccgacgagtggtggcgggtaactcaatcatacgccagatccacagctgtgatgtccatggtgggctatattatcggccttggcgatcggcaccttgacaacgttttgattgacatgacgacaggagaggttgtgcacatagattataatgtttgctttgagaaagggaagtctcttagggtgcctgaaaaggtacctttccgcatgacacagaacattgaaaccgcactcggggttacaggcgtggaaggtgtattccgtctttcctgcgaacaggtgctgcacatcatgcggcgagggcgcgaaacacttctcaccctgttagaagcttttgtttatgatcctctcgttgattggacagccgggggcgaagcaggattcgccggagctgtgtacggaggtggaggacagcaggcagagagcaaacaatctaaaagagaaatggagcgggagattacccgctccctgttctcttcccgtgtggccgaaattaaggtgaactggttcaaaaacagagatgagatgttggtggtcctgcctaagttggacgggagtttagacgagtatctctctctgcaggagcagctgactgacgtggaaaaactccaggggaagttgctggaggagatcgagtttctcgagggggctgaaggggtagatcacccgtctcatacattgcagcatcggtattctgaacacacacagctccagacccagcaaagggcagtccaggaggccattcaagttaagctgaacgaatttgagcagtggatcacccactatcaggcagcttttaataacctagaggcaacccagctcgcttctctgctgcaggaaatcagtacccagatggacttgggtccaccaagctatgtccccgctaccgcatttttgcagaatgcaggtcaggctcacctgatctctcagtgcgagcaactggagggagaagtcggagccctattacaacaacgccgctccgtcctgcgggggtgcttggaacaattacatcattacgctacagttgccctgcagtacccgaaggccatcttccagaagcaccggatcgaacagtggaaaacttggatggaagagttaatctgtaacacaaccgtggaaaggtgtcaggaactctatcggaagtacgagatgcagtatgcgccgcaacctccaccgactgtgtgccagttcatcacagccaccgagatgacactgcagcggtacgccgccgacatcaactccagacttataagacaggtcgagagactcaaacaggaggcagtaaccgtgcctgtctgcgaggaccaattgaaagagatagagagatgcatcaaggtgttcctgcatgaaaacggtgaagagggaagtctttccctggcttcagtgattatcagtgccttatgcacactgacccgcaggaacctgatgatggaaggcgccgccagttcggctggggagcagttagtggatttgaccagtagagatggcgcctggtttcttgaagaattgtgcagtatgtctggcaatgtgacctgcctggtgcagctgctgaaacagtgtcacctggtgccccaggacctcgatattcccaatccaatggaagcatctgagactgtgcacttggcgaatggggtatatacgtcactgcaggagctgaactccaactttagacaaattattttccctgaagccttgaggtgcctcatgaagggtgagtacacactggagtcaatgctgcacgaactagacggactgatcgagcagactaccgacggcgtacctctgcagactctggtggagtcactccaggcttacttgagaaacgctgccatggggcttgaggaggaaactcatgcacattacattgatgtggccaggctactgcatgcgcagtatggagagctgattcagccccgcaatgggtctgtggatgagactcccaagatgtctgccggtcagatgctcctcgttgcattcgatggtatgttcgcccaagtagaaacagctttctccttactggtagagaaattaaacaaaatggagatcccaatcgcctggcgcaagattgacatcattagagaagctaggtctacccaggtaaacttctttgatgacgataaccacaggcaggtgctcgaagagatctttttcctcaaacgactccagactataaaagagtttttccgattgtgtggcacattctctaagaccttgtcagggtcaagctctctcgaggatcagaacaccgtgaatgggcccgtccagatcgttaacgtgaagaccctctttcgtaacagttgcttctcagaagaccagatggctaaacctatcaaggccttcacagctgattttgtgcgccaattacttattgggctgcctaatcaggccctgggactcaccctttgttcttttatctcagcactgggggtcgacattatagcgcaggtagaagctaaagactttggcgccgagtctaaagtttccgttgacgatctctgcaagaaggcagtggagcacaacattcagataggaaaattcagccaactagtgatgaatagagccacggtcctggctagttcctacgatacagcatggaagaagcatgacctggtgcgtagactggagacttctattagctcctgtaagaccagcctgcagagggtgcaactccatatagctatgttccagtggcagcacgaagatcttttaatcaacagacctcaagccatgagcgtgacccccccccccaggtcagccattctgaccagcatgaaaaagaagctccacactctgtcccaaatagagactagcattgccacggtccaagaaaagctggcagcattggagagtagtatcgaacagcggttaaaatgggccggaggtgctaatccggccctagcccctgtcctgcaggattttgaggcaactatcgccgagagaaggaacctggtcctgaaggagagccaacgtgctagtcaggtgacttttctgtgctccaatattatccacttcgaatctctgaggacccgaacggctgaagctctcaacttggatgctgcgctgtttgagctgatcaagcgctgtcaacaaatgtgctcttttgcaagtcagtttaactctagcgtgagcgaactggagctccgattactccaacgtgtcgacacaggtctggaacaccccatcgggtccagtgagtggctgctgtccgcacacaagcagctgacacaggacatgtctacgcagagggccatccagactgaaaaggagcagcagattgaaactgtctgcgagactatccaaaaccttgtcgataatattaaaactgttctcactggtcacaacagacagctgggggacgtgaagcatctgctcaaggctatggcaaaggacgaggaggcagctctggcggatggcgaggacgtgccctacgaaaattccgtgcgtcagtttctgggggaatacaaatcatggcaggacaatatacagaccgtgctgttcaccctggtgcaagccatggggcaggtcagatcgcaggaacatgttgagatgctccaggagatcacccccacattgaaagagctgaagacccagtcacagtccatctataacaatctggtttccttcgcctcccccctggtgactgacgccaccaacgagtgcagcagtcctacaagcagcgccacgtaccaaccttcctttgcagcagcagttagaagcaacaccgggcagaagacacaacccgatgttatgtctcagaatgcacggaagctcatccaaaagaatctagctacgtccgccgacactccgccttccaccgttccgggtacgggtaagagcgttgcatgttcccccaaaaaggcggttagagaccccaagactggtaaggcagtccaggaacgcaacagctacgctgtgtccgtttggaaaagagtgaaggccaagttagagggtagagacgtggatccaaacaggcgaatgtcagtggccgagcaggttgattacgtgatcaaagaagccacaaacctggataacctcgctcagctctatgagggctggacggcttgggtctag

SEQ ID NO: 134622 - DNA, 3051 bp, synthetic construct
  misc_feature 1..3051: note = Description of Artificial Sequence: Synthetic coding sequence
  source 1..3051: mol_type = other DNA
atgagccagggcccgcccactggtgagtcctctgagcctgaagcaaaggtattgcataccaaacggctctaccgggcggtcgtcgaggcagtccaccgactggacctcatcctttgcaataaaacagcctaccaggaggtattcaagcccgagaacatttcgttgcggaataagttacgcgagttatgcgtgaaattgatgtttctgcacccagttgactacggcaggaaagccgaagaacttctttggaggaaagtatattatgaggtcatacagctgatcaagaccaacaaaaaacacatccactctaggtccacgttagaatgcgcctataggactcacctggtggccggcatcggcttctaccagcatctgctactgtacatacagtcccattaccagctggaacttcaatgctgcatagactggacgcacgtgacggatccattaatcggatgcaagaaacccgtctcagcttctgggaaggagatggactgggctcagatggcctgccaccgttgtttggtataccttggagatttaagtcgttatcagaatgagctggctggcgttgacacagaactgctagctgagagattctactaccaggctctatctgtggcccctcagataggtatgcctttcaatcagctggggactttagctggatcaaaatactacaatgttgaggcaatgtattgttatctgcggtgtatccagtccgaagtgagctttgagggtgcttatggaaatcttaagcgcttgtatgataaggcagctaagatgtaccatcagctcaaaaaatgtgaaacacgcaaactttccccaggcaaaaagaggtgcaaggatatcaagcggttgctcgttaatttcatgtacctgcagtcactgctacagccaaagtcaagctccgttgattctgaactgacctctctttgccagtctgtactggaggacttcaacttgtgcctcttttacctgcccagttcccccaatctgagcttagcctctgaggatgaagaggagtacgaatccgggtatgccttcctgccggacttacttatttttcaaatggtgattatttgcctgatgtgcgtgcacagtctggagcgggccggaagcaagcagtactctgccgcaatcgccttcacactcgcgcttttttcccacctggtgaaccacgtgaatataagacttcaggccgagttagaggaaggagagaacccggtgcccgcatttcagagcgacggcacagacgagcccgagtccaaagagcctgttgaaaaggaggaagagcctgatcctgagcctcctcccgtcacacctcaggtcggagagggaaggaagtctaggaaattttctagactgtcctgtctgcggcggcgtagacaccctcccaaagtgggggacgattccgatctgagcgagggctttgagagtgattcctcccatgacagtgcaagagcctctgaaggaagcgactctggctccgacaagtcgcttgaaggcggaggcacagccttcgacgcagaaacagattcagaaatgaactcccaggaatcccgttccgacctcgaggacatggaagaggaagaaggcactaggagtcccacgctagagccaccgcggggacgctctgaagcaccagatagccttaacgggcctctgggcccttccgaggcctcaatagcttctaacctgcaggctatgagcacgcagatgttccaaacaaagcgatgctttcgcctcgcccccactttttcaaacctgctgctgcagcctactacgaaccctcacacaagtgctagccaccgcccatgcgtcaatggcgacgtcgataaaccctcagaacccgcctccgaggagggttcagagtcagaagggtccgaatcctcaggtcgttcctgcaggaatgaaagatcaatacaagagaagttacaggtgctcatggctgaaggactgttgcccgccgtgaaggtgttcctggactggcttcggacaaatcccgacctcatcatagtttgtgcacagtcttcccagtccttgtggaatagactgtccgtcctcttgaatcttctgccagcagcaggagaattacaggaaagcggattggccttatgtcctgaagtgcaggacctcctcgagggctgcgagctgccggatttaccgagctcactgctgctgccagaagatatggccttacggaacctgcccccactgcgcgccgcccaccggcggttcaatttcgataccgatagacctctcctcagcacactcgaggagtcagtggtgagaatttgttgcataaggtcctttggccactttatagctaggctgcaggggtcgatattgcagttcaatccggaggtgggcatcttcgtgtcaatcgcccagagtgagcaggaaagtctgctccaacaggcccaggcacagtttaggatggcccaagaagaagcccgccgcaataggctgatgcgcgacatggctcagctgagactgcagttagaagtgagccaactcgagggcagcttgcagcagcccaaggcccagtccgccatgtcgccttacctggttcctgacacacaggcactctgccaccatcttccggtgatcaggcagctggccaccagcggacggttcatcgttatcataccgaggaccgttattgacggactggatctactgaagaaagaacaccctggagctcgtgacggcatccgctacctagaggcagagtttaagaaaggaaatagatatattcggtgccagaaagaggtgggaaagagcttcgaacggcacaaactgaagaggcaggacgcagacgcttggacactgtacaaaattcttgattcctgcaagcagcttaccttggcgcagggtgccggtgaagaagacccatccggcatggtgaccattataacaggcctaccactggacaaccccagtgttctcagcggaccaatgcaggccgccttacaggccgcagcccacgccagcgtggacatcaaaaacgtcttagacttctacaaacagtggaaagaaatcggatag

SEQ ID NO: 134623 - DNA, 1125 bp, synthetic construct
  misc_feature 1..1125: note = Description of Artificial Sequence: Synthetic coding sequence
  source 1..1125: mol_type = other DNA
atgagtcagggaccaccaacaggcgaatcgagcgaaccagaggcaaaagtactgcacaccaagcgcctgtaccgggcagtcgtggaagcagttcatcgccttgatctgatcctgtgcaataagaccgcttaccaggaagtgttcaagcccgaaaatataagcctgcgcaacaagctgcgggaattgtgcgtgaagctgatgtttctgcatcccgtcgattacggaaggaaagccgaagagctgctgtggcggaaagtgtactacgaggttatccagcttattaagacaaacaagaagcacatccacagccggtcgaccctggaatgcgcctaccggacccatctggtggcagggatagggttctaccagcatctgcttctttatattcagagtcactaccagcttgagctgcaatgctgtatcgactggactcacgtgaccgatccactgatcggttgcaaaaagccagtctcagcctccggtaaagaaatggattgggcccagatggcttgccatcgctgccttgtgtacctgggggacctctccagatatcagaatgagctcgcgggggtggataccgagttactggccgagaggttctattaccaggctctgtcggtcgccccacagataggcatgccatttaaccagctgggcaccctcgcaggttcgaagtattataatgtggaggctatgtactgctatcttaggtgcattcagagcgaggtcagcttcgagggtgcttacgggaatttgaagcggctctacgataaagccgcaaagatgtaccatcaactgaagaaatgcgagacgaggaagctgagccctggcaagaagcgctgcaaggacataaaaagattgctcgtgaatttcatgtatctgcagagcttactccagcccaagagtagaggatgcacttctcactgtcccacttctgccctgtgcttgcccctgtctagcttccagggtagagaacaggctcccccccgggcggcaggctccctagcttgcgccagcacggtctcttgcgcccaccagccgcataggtgttgtgctctctgctcgtggctgctatgctgggaccgcatgggctgtcaagaggagaagaagggcggcgccgtgtag

SEQ ID NO: 134624 - DNA, 417 bp, synthetic construct
  misc_feature 1..417: note = Description of Artificial Sequence: Synthetic coding sequence
  source 1..417: mol_type = other DNA
taatttatcgtgattattccacgcactgttattgatggtctggatctcctcaagaaggaacaccctggcgcacgagatggtatacggtacttggaagctgagtttaagaaagggaaccgctacatacgatgtcagaaagaggttgggaagagtttcgaacgacataaacttaaaaggcaagacgccgacgcctggactctatacaagatccttgactcttgcaagcagctgacactcgcccagggtgccggggaagaagacccaagcggaatggtgaccattatcacaggcctacccttggacaacccctccgttctgtccggacccatgcaggccgctctgcaggcagcagcccacgcatcggtcgacatcaagaacgttcttgacttctataaacagtggaaggagattgggtag

SEQ ID NO: 134625 - DNA, 3438 bp, synthetic construct
  misc_feature 1..3438: note = Description of Artificial Sequence: Synthetic coding sequence
  source 1..3438: mol_type = other DNA
atgctcgtgaccgatctcgaatacgcactggataaaaaagttgagcaagatttatggaatcatgcctttaaaaaccagatcaccacgttgcagggccaagccaaaaatcgggctaatccaaaccgcagcgaggtccaggccaatttgagcctgttcctggaagctgcctcaggattttacactcagctgctgcaggagctgtgcacagtcttcaacgtggatctgccgtgtcgtgtgaagagctcacaattaggaatcatctctaataagcaaacacacacatccgccatagtaaagccccaatcaagctcgtgctcctacatttgccagcactgtcttgtccacctgggggacatcgctaggtaccgcaaccagaccagccaggccgaaagttattatcggcacgcagcccagctggtgccctccaacggtcaaccctacaaccagctggccatcctagcgagctcgaagggcgaccacctgacgacaatattctactattgtcggtccattgctgtaaaattcccattccctgctgctagtactaacttacagaaagctttaagcaaggcactggagtctcgggacgaggtgaaaactaagtggggagtatccgacttcatcaaggctttcatcaaattccacggacacgtgtatctgagcaaatccctcgagaagctcagtccacttagggagaagttggaagagcaatttaaacgtctgctgtttcagaaggcctttaatagccagcaactcgtgcacgtgaccgtgatcaacctgttccagttacaccacctgagggacttttctaatgagactgagcagcatacctactcgcaggatgagcagctgtgctggacccagctgctggcattattcatgtcgttcctgggcatcctgtgcaagtgtcctctccaaaatgaatctcaagaagaatcgtataatgcgtatcccctgcccgccgtgaaagtcagtatggactggctgcggctccgaccccgtgtctttcaggaggccgtggtggacgagagacaatacatatggccttggttaatatctctgctgaattctttccaccctcatgaagaagacctctcatccattagcgcaacaccccttcccgaagagtttgagctgcagggatttctcgcactacggcccagtttcaggaacctcgactttagcaaagggcatcaagggattaccggcgataaagaggggcagcagcggaggattcgccagcaacggcttatctctatcggcaagtggattgccgataatcaaccacgcttgatccagtgcgaaaacgaagtaggcaaattgctcttcattaccgaaattccagaattgatcctggaagaccccagcgaagccaaggagaacttaatcttgcaagagacaagcgttattgagtctctggcggccgatggatccccaggtctgaagagtgttctgtccactagccgaaatctttcaaacaactgcgacacaggtgagaaaccagttgtgactttcaaggaaaacatcaagacccgcgaagttaaccgcgaccaagggaggagtttcccgccaaaggaggtgaggagagactatagcaaaggcatcactgtgaccaagaatgatggtaagaaagacaacaacaaacggaagacggaaactaagaagtgcaccctcgaaaaactgcaggagacgggcaagcagaacgttgctgtccaagtgaagtcccagacagagctaaggaagacacccgtgtcagaggctcgtaaaaccccagtcacacagacaccgacccaggcctcgaatagccagtttatccccatccatcatcctggggctttcccgccactgccaagccgcccaggatttcccccgccaacatacgtgatcccacctccggtcgccttttcaatgggcagtggctatacttttcctgctggtgtgtccgtgccaggcaccttcctgcaacctacggcgcattcaccggcaggtaatcaggttcaggccgggaaacaaagccacattccctattcacaacaacggccctcaggcccagggccaatgaaccaaggcccacagcaaagccaacctcctagtcagcagcctctgacgtccctgcctgcgcagccgactgcgcaatcaacaagtcaactgcaagttcaggctctgactcagcagcagcaatctccaaccaaggccgtgcccgccttggggaaatccccaccccatcactcaggcttccagcagtaccaacaggctgatgcttcgaagcaactgtggaatccccctcaagtgcagggtcctcttgggaaaattatgcccgtgaaacagccatactatttacagacacaagacccgataaagttgttcgaaccgagcctgcaaccccctgtaatgcaacaacagccactagagaaaaagatgaaaccgttcccgatggaaccttacaatcacaacccctcagaggtgaaggtgccagaattctactgggattcttcctattccatggctgacaacaggagtgtgatggcccagcaagccaacatcgaccggcgcggcaagaggagccccggagtgtttcggcccgaacaggatcctgtgccaagaatgccgttcgaggatcccaaatctagccccttattgcctccagatctgttgaaatcactggctgccctcgaggaagaagaggagttgatcttctctaatcctcccgatctgtaccctgccctgttgggacctctggcaagtcttcccggcaggagcctgttcaaaagtttgctggagaagccttctgagctgatgagtcattcctcttctttcctcagcctaactggatttagcctgaatcaggagagataccctaacaacagcatgttcaatgaggtttatggcaaaaatctgacatcaagcagcaaagccgagctgtcacctagcatggcacctcaagagacgtccctgtattcccttttcgaggggaccccctggagccccagtttgcctgcctcgagcgatcattctacgcctgcctcccagtcgcctcacagctcgaacccttcctctcttcctagctctccaccgacccataatcacaacagtgtccccttttccaacttcggccctattggtacccctgataatcgtgatagacggacagcggaccggtggaaaaccgacaaaccagctatgggcggctttgggatcgattatttgtcggcaacctcatcaagcgaatcgagttggcatcaagcctccaccccctccggcacttggaccggtcatggtccctcaatggaggattcttccgctgtgctgatggaatccctgaagagtatttggtcctctagtatgatgcaccctggtccctccgcgttggaacagttgctgatgcaacagaaacaaaaacagcagagaggacagggaactatgaatccccctcattag

SEQ ID NO: 134626 - DNA, 3414 bp, synthetic construct
  misc_feature 1..3414: note = Description of Artificial Sequence: Synthetic coding sequence
  source 1..3414: mol_type = other DNA
atgtcactgcagtctgcacagtacctgaggcaggcagaggttcttaaggccgacatgacagactccaaacttgggcctgccgaggtctggacatccagacaggcacttcaggacttatatcaaaagatgcttgttacagacctggagtatgcgttggacaaaaaggtagagcaggatctgtggaaccatgccttcaagaaccagatcaccactttgcagggacaggccaaaaacagagctaacccaaatagatcagaagtgcaggctaacctctccctatttctcgaagccgcctccggcttttacacacaacttctgcaagagttgtgtacggtattcaacgtcgacctcccatgtagagtgaagtcgtcccaactcggaataatatctaataagcaaacacacacaagtgcgatcgttaaaccacagagcagtagctgctcttacatatgtcagcattgcttggttcacctcggggatatcgctaggtatagaaatcaaacctcacaggcggaaagctactatcgccacgcagcccagctggtgcccagcaacggtcagccctataatcagctcgctattctggcgagctccaagggagaccatctgacaactatcttttattactgtcgctccatcgccgtgaagtttcctttccctgccgcaagtactaatctccagaaggctctaagcaaggctctcgagagtagggacgaggtgaaaactaaatggggcgtgtcggacttcatcaaagcattcataaaatttcacggacacgtgtatttgtcaaaatccctggaaaaactctctccgctgagggaaaagctggaagaacagtttaaaagattgctgtttcagaaagcctttaacagtcagcagctcgtccacgtgactgttattaacctgtttcagctgcaccacctgcgggatttctctaatgagaccgagcagcatacctattcccaggatgaacagttgtgctggacccaactcctcgcgctgttcatgtcctttctaggaattctatgtaagtgcccgttgcagaacgaatcacaggaggaatcctataacgcctaccccctgcccgccgtcaaggtgtccatggattggttgcgtcttagaccccgcgtgttccaggaggctgtcgtagacgagcgccagtacatttggccctggttaattagcttgctgaattcatttcatccgcacgaggaggatctgtcctctatatcggccacccctctccctgaagaattcgaactgcagggcttcctggccttacgccccagcttcaggaaccttgatttcagcaagggtcaccaggggatcactggcgataaggagggtcagcaacgtcgcatccgtcagcagcgccttataagtatcgggaaatggattgccgacaaccagcctcgcctcatccagtgtgaaaacgaggtgggcaaacttctatttataacagaaattcctgagctgatccttgaagaccctagcgaggctaaggagaatctgattctccaagagacttccgtcatagaaagccttgcggccgatggttcacctgggttgaagtccgtgctaagtactagccgaaatctcagtaataactgtgatacgggagaaaagcccgttgtgaccttcaaagaaaacatcaaaactcgtgaggtgaatcgggaccaaggtcgctctttcccccctaaagaagttaggcgcgactacagtaagggcattaccgtgaccaagaacgacggaaaaaaagacaataacaaaagaaagacggaaacgaagaaatgcactctggagaaactccaggagacgggaaagcaaaacgtagctgtccaggtgaaatcccagactgagctgcgcaagacacccgtttccgaggcaaggaagacacctgttacccagaccccaactcaggcgtctaactcccagtttatccccatccaccatcctggcgcgtttcctcctttgcctagccgccctggattcccccctcccacctatgttattccccctccagtagctttctcaatggggagtggctatacatttcctgccggtgtctctgttccaggaacttttttacagcctacagcccattccccagctgggaatcaggtgcaagccgggaagcaaagccacattccttacagtcagcagcgcccaagcgggccaggaccaatgaatcaggggccgcagcagtctcaacctccttcccaacagcccctgacgtccctgcccgcacagcctacggcacagtccacgagccaactgcaggtccaggctctgacacagcagcaacagagtcctaccaaagctgtgcccgctctgggcaaatcaccaccccatcactcaggatttcagcagtaccagcaggctgatgccagcaaacagctttggaacccccctcaggtccagggtcccttggggaaaatcatgccagtaaagcagccatactatctgcagacgcaagacccaattaagcttttcgagccatctctgcagcctccagtgatgcagcagcagccactggagaagaagatgaagccgtttcccatggaaccatataatcataacccatccgaggtgaaggtgcccgagttttactgggactcgagttattcgatggccgataaccggtccgttatggcacagcaggctaacatcgaccgaaggggaaaacgttctccgggtgtgttcagacccgagcaggaccccgtgccaaggatgccattcgagaagtccctgctggaaaagccttcagaactgatgagtcacagctcatccttcctgagtctgacaggatttagcctaaatcaagagagatacccgaataatagcatgttcaacgaggtatatggaaagaacttgacctcaagttccaaggccgagctgtctccaagtatggctccacaagagaccagtctgtactctctgtttgagggtaccccatggagcccctcattaccagcgtcttccgaccactccactccggctagccagtccccccactcgtctaacccttcatcattgcctagctctccacccacccacaaccacaactctgttcctttctccaactttggtcctatcgggaccccagacaaccgggatagaaggaccgctgatagatggaaaaccgataaaccagccatgggtggctttggaattgactatctgagcgcaacaagctcttctgagtcatcatggcaccaggccagcactccaagcgggacatggaccgggcatggaccaagtatggaagatagcagtgcagtgctaatggagagcctcaagtcaatctggagcagcagcatgatgcatcccggcccaagtgccctggagcagctattgatgcagcagaaacagaaacagcagcgtggacaggggaccatgaaccccccccactag

SEQ ID NO: 134627 - DNA, 3513 bp, synthetic construct
  misc_feature 1..3513: note = Description of Artificial Sequence: Synthetic coding sequence
  source 1..3513: mol_type = other DNA
atgcggaactggatgtttctccagatagtgatcgtgggcgagaatgtgtcttttaagtcccagatgaggactgaaaatctgaaatccgaagagcaccttaagagctcaaatatcagacaggcagaggttctcaaagctgacatgacagactctaaacttggacccgccgaggtttggacttcccggcaggctctacaggatctctaccagaagatgctggttaccgacctggagtacgccctagacaaaaaagttgaacaggatctttggaatcatgcgttcaagaatcagattactaccctacaggggcaggcaaagaatcgagcaaatcccaacagaagcgaggtccaggcgaatctaagcctgtttctggaagccgcatcagggttttacactcagctactccaggagctttgtacagtttttaatgttgacctgccttgcagagtgaagagctcccaacttggtataatatcaaacaagcagactcacacaagtgcaattgtgaagccccagagctcctcatgcagctacatctgtcagcattgcctggtgcatttgggagatattgcgagatatcgtaatcaaaccagccaggctgaatcatactaccgccacgcagcccagttggttccatcaaacggacagccttataatcagcttgccatactcgcaagttctaagggtgatcacctgacaaccatcttctactattgtaggtccattgccgtgaaatttccatttcctgctgcctcaacaaacctgcagaaagccctgagcaaagcactggagtcaagagacgaggtgaagacaaagtggggtgtaagcgatttcataaaggctttcattaaattccacggccacgtgtatctatctaagagccttgagaagctgagccctctcagggagaaactcgaggagcaatttaagaggctgcttttccagaaggcatttaacagccagcagctcgtgcacgtcacagtgattaacctgttccagctgcaccacctccgcgattttagcaacgagactgaacaacatacttatagtcaagatgagcaactgtgttggacgcaactactggccctgtttatgagtttcctgggaatcctttgcaaatgccctttgcagaacgaatctcaggaagagtcttataacgcatacccgctgcccgctgtaaaggttagtatggattggctccgccttcgtcctagagtgttccaggaagcagtcgtggacgaacggcaatacatatggccatggctcatcagtcttcttaattcatttcatccgcatgaagaggatctgagttctatctccgcgacaccccttcctgaagagtttgaactgcagggattccttgcgttgcggccctcattccggaacttggacttttctaagggccatcagggaattacaggcgacaaagaaggccagcagagacggattcgtcagcagcgccttataagcatcgggaaatggatcgcggacaatcagccacggttaatccagtgtgaaaatgaggtcggcaagctgctgttcatcactgaaatcccagaactcatcctcgaagatcctagtgaggccaaggaaaacctgattctccaggaaacgagtgtcattgaaagcctggccgccgacggtagcccgggactgaagtccgtcctttccacgagtcgaaacctgagcaacaactgtgatacaggcgagaagcctgtggtaactttcaaagagaacatcaagaccagagaggttaatagagaccaggggcgcagcttcccccccaaagaggtgaaatctcagacagaattacgtaaaaccccagtatccgaagcaaggaagacgcccgtgacgcagactccgacccaggcttcgaactcccagtttattccaatacaccatccgggcgcattccctcccctcccatctcgacctggttttccccctcctacatacgtcattcctcccccagtagctttttcaatgggaagcggctacacttttcccgccggggtgtcagttccagggacttttctacaaccaaccgctcacagcccagcaggaaaccaggtccaggcaggcaagcagtcacatatcccctactctcagcagcgtccatcaggccccggtccaatgaaccaggggccccagcagtcacagccacccagccagcagcccctgacaagcctacctgcgcagccaacagcccagtcaacctctcagctgcaggtgcaggctttaacccagcagcagcagtctccaaccaaagctgtcccggccctgggaaagagccccccgcatcactccgggttccaacagtaccaacaggccgatgccagcaagcagttgtggaacccaccccaagtgcaaggacctctcgggaaaatcatgccggtgaaacaaccctattatttacagacccaggatcccattaagttgttcgagccgagtctgcagcctccggttatgcagcaacaaccgctcgagaagaagatgaagcccttccctatggaaccatacaatcacaatccgtccgaggtaaaggtgccagaattttactgggactcatcttattcaatggctgataacagatccgtaatggcacagcaggcaaacattgaccgacgcggaaagaggtcacccggagtgtttaggcccgagcaagatcccgttccccggatgccatttgaggaccccaagagttcaccactccttccacccgatctcctgaagagccttgctgcactggaggaggaggaagagttaatattctcaaacccacccgacctctatccagccctgcttgggccacttgcttctcttccaggccgctcactgttcaaatccctactcgagaagcccagcgaacttatgtcccacagctctagcttcctgagcctaaccggtttctcattaaaccaagagagataccctaataacagcatgttcaacgaggtttacggaaagaaccttactagcagctctaaagcagaactttctcctagcatggcacctcaagagacatctctgtacagcctattcgaaggcacaccatggtctccgagcctccctgcttcaagcgatcacagcacccctgcatcccaatcaccccactcttcaaatcccagcagcctaccctcttccccacccacgcacaatcacaactcagtacccttttccaacttcggccctatcggaacaccagacaatagggacagacggaccgcagacagatggaaaaccgacaaacctgccatggggggctttggcattgattaccttagcgcgacctccagcagcgagtcctcttggcatcaggccagtacaccctctggaacctggaccggacatgggccaagcatggaagattcctcagccgtcttaatggaatctttaaagtcaatttggtctagtagcatgatgcacccaggtccatcggcactagaacagctccttatgcaacagaaacagaagcaacaacgggggcaggggaccatgaatcctccccactag

SEQ ID NO: 134628 - DNA, 2274 bp, synthetic construct
  misc_feature 1..2274: note = Description of Artificial Sequence: Synthetic coding sequence
  source 1..2274: mol_type = other DNA
atgctggtgaccgacctggaatatgccttagataagaaggtggagcaggacctgtggaaccatgcctttaaaaatcagataaccactttgcagggtcaggcaaaaaaccgcgcgaatccaaaccggagtgaggtccaggccaatctttcactgttccttgaagccgcctcaggcttctatactcagctgctgcaagagttgtgcacggtttttaacgtagacctgccctgtcgggttaagtcgtcgcagctggggatcatttccaataaacagacacatacatcagctattgtcaagccacaaagcagttcatgcagctatatctgccagcactgtctagtgcacctgggtgatatcgctagataccggaaccagacctcccaggcagaaagctactacagacacgccgcacagctggttccgtctaatggccagccttacaaccagttagcaatactggcctctagtaaaggcgatcatctcaccactattttttactattgtcgcagtatcgctgtgaaattcccattcccggcagcttccactaacttgcagaaggcgctatctaaggcgttagaatcacgggatgaggtcaagacaaagtggggcgtgagcgacttcattaaagccttcatcaagtttcatggtcacgtctacctgtctaagagtttagaaaagctgtcacctctccgcgaaaagctcgaggaacagttcaaaaggctactgttccagaaagccttcaacagtcaacaactcgtgcacgtgaccgtgatcaacctgtttcagctccaccacctccgtgacttcagcaacgaaacagagcagcacacctacagccaggatgagcagctttgttggacccaactgcttgcgttattcatgtccttcttaggaattttgtgtaagtgtccactgcagaatgagagccaggaggaatcctataacgcatatccccttccggcagttaaggtctccatggactggcttagactgaggcctagggtgttccaggaagcagtagttgatgagagacagtacatttggccctggctgatctctttacttaattcctttcacccccatgaggaagatttgtcctctatttcagccacccccctccctgaagaatttgaactgcagggttttctggcactccgtcctagcttccgaaatctggatttctcaaaggggcaccaaggaataactggcgacaaggagggacagcagaggcgcatccgtcagcaaagactgatatccataggtaagtggattgctgataaccagcccagactcattcagtgtgagaatgaagtgggcaaactcctctttattacggaaatcccggaacttattctggaagacccctcagaggccaaggagaacctcattctgcaagagacgtcagtaatcgaaagccttgctgcagatgggagccctggcctgaagtccgtgctcagtacttcgcgaaacctgtctaacaattgtgatactggggaaaaacctgtggtgactttcaaggagaacatcaaaactcgtgaagtgaacagggatcagggcagatccttccctcccaaagaagtcaaatcgcagacagagttgcgtaagacccccgtgagtgaagcccgcaagaccccagtgacccaaacaccaactcaggcctcaaacagccaatttatcccgatccaccaccccggagcgttcccaccactgcccagccgtcccggatttcccccccctacctatgttattcctccccctgtggccttttctatgggcagcggctacacgtttcccgctggtgttagcgtcccagggacattcctgcagccgacggctcatagtccggccggcaaccaggttcaggctggcaaacaatcacatattccttactcacaacagagacccagcggtccaggacctatgaatcagggacctcagcagagccagccacctagtcagcagccattgactagtctcccagcccagccaaccgcacagtccacctctcaattgcaggtccaggctctgacacagcagcagcaatctcccactaaggccgttcctgccctggggaagtctcccccccaccactccgggttccagcagtatcagcaagctgacgcatccaaacagctctggaacccaccacaggtgcaggggcctctgggaaagatcatgcctgtcaagcagccctattacctacagactcaggaccccatcaaacttttcgaaccctccctgcagcctcctgtgatgcagcagcagcccctgtag

SEQ ID NO: 134629 - DNA, 3150 bp, synthetic construct
  misc_feature 1..3150: note = Description of Artificial Sequence: Synthetic coding sequence
  source 1..3150: mol_type = other DNA
atgctggtgacagacttagaatacgctttggataagaaggtggagcaagatctgtggaatcatgcttttaagaaccagattaccaccctccagggccaggccaagaatagggcaaacccgaatcggagtgaagtacaggccaacttatctctgtttctcgaggccgcctctgggttttacacccaactgctgcaagagctctgcaccgttttcaatgtagatctgccctgtagggtcaagtcctctcaacttggcattatctcaaataaacaaacccacaccagtgctatcgtgaagcctcaaagctcgagctgcagttatatctgccagcattgcctggtgcacctcggagacattgccagatatcggaaccaaactagccaagctgagtcctactacaggcatgcagctcagcttgtgcctagcaatggccagccatacaaccaactagccattctcgccagcagcaaaggcgaccatctgaccacaatcttctactactgtaggtcgatcgccgtgaagtttccctttcctgcagcctcaacgaatcttcaaaaagccctgagtaaggctcttgagtcaagagacgaggttaaaaccaagtggggtgtatccgattttataaaggccttcataaagtttcacgggcacgtttacctgtcaaaaagcctggagaaactgtctcctctaagagagaagttggaggaacaatttaagcggctcctcttccaaaaagcctttaactctcaacaactggtacacgtgaccgttattaacctatttcagttgcatcatctccgagacttttccaacgagactgagcagcacacttactctcaggatgaacagttgtgctggacccagttgctggccctcttcatgtcctttctggggatcctgtgtaagtgtccactgcaaaacgagtctcaggaggaatcctataatgcatacccattgcccgccgtgaaagtgtcaatggattggctccggctgcggccacgtgttttccaggaggcagtcgtcgatgagcggcagtatatttggccttggcttatttccctattgaattcctttcaccctcacgaggaagacctttcatccatatcggctacgccgctccccgaggaattcgagctccaaggctttttggcattgagacccagtttccggaatctggatttctcaaaaggacaccagggaattacaggcgacaaagaaggtcagcagcgtcgaatcagacagcagcgcctgatctctataggcaagtggatcgctgacaaccagcctaggctcatacagtgcgaaaacgaagtcggcaagctcttgtttatcacagagattcctgagctcatcctggaagatccgtctgaggccaaggagaatctgatcttgcaggagacttctgtgatcgagagtctcgctgcggacggctcccccggactgaaatccgttcttagtactagccggaatctctcaaacaattgcgacacgggagaaaagccagtggtcacctttaaagagaatataaagactcgtgaggtgaaccgcgaccagggtcgatcgttcccaccaaaggaggtgaaaagccagaccgaacttagaaagaccccggtgagcgaggctcgaaagaccccagtcactcagactcctacacaagccagcaactcccagtttatccccatacatcatcccggagctttccccccactcccatcccggcccggttttcccccaccaacttatgtgattcctccgccagtggcttttagtatggggagtggctacaccttccctgcaggcgtcagcgtgccaggcaccttcttacagcctaccgcacacagccctgcaggcaaccaggtgcaggctgggaagcaaagtcatataccttactcccagcagagaccatccggcccaggtcctatgaaccagggaccccagcaaagtcagcctccctctcagcagcctttaaccagcctccccgcacagcccacagcccagtctacttctcagttacaggtgcaggccctgactcagcaacagcagtctcctacgaaggccgtgccagctctgggtaaatcccctcctcatcatagcgggtttcagcaatatcaacaagcggatgcatctaagcagctctggaatcctccccaggtccaggggcctctgggaaagattatgcctgtgaagcagccgtattacttgcagactcaggacccaattaagcttttcgaaccatccctccaacctcctgtgatgcaacagcagccattagagaaaaagatgaagccttttcctatggaaccatacaatcataacccttccgaagtgaaggtccctgagttctactgggactcctcttattccatggcggacaaccgctctgttatggcgcagcaggcaaatattgaccggcgaggtaagagatcgcccggcgtgttccgacccgagcaggacccagttccccgcatgccttttgaaaagtccctgctcgaaaaaccctctgaactcatgagtcattctagttccttcctctctctcacaggcttttctcttaatcaggaacgttacccaaacaatagtatgtttaacgaagtctatggcaagaaccttactagtagctccaaggcagaactctctccttccatggcgccacaggagaccagcttgtactccctcttcgaaggcactccttggagtccctcacttccagccagctcagatcacagcacacccgcctcacagtcaccacacagttccaatccatcctcccttccatccagtccccccacacataatcacaactccgtgccgttctcaaattttgggcctattggaactcccgataaccgggaccggcgcaccgccgacaggtggaagactgacaagcccgcaatgggggggttcggcatcgactatctatccgccacttcaagctccgagtcctcgtggcaccaggctagcactccctcaggaacatggactggacacgggccgagcatggaagactcctctgccgttcttatggaatccttgaaatcgatttggtcctcctctatgatgcatccaggtcccagtgctctggagcagctgttgatgcagcaaaagcagaagcagcagaggggccaaggtactatgaacccaccccactag

SEQ ID NO: 134630 - DNA, 3537 bp, synthetic construct
  misc_feature 1..3537: note = Description of Artificial Sequence: Synthetic coding sequence
  source 1..3537: mol_type = other DNA
atgtccttacagtcagctcagtacctgagacaagccgaagtgctgaaggccgatatgaccgacagtaaactgggccctgctgaggtgtggacctcccgccaggccctccaagacctgtatcagaagatgctggtaaccgacctagagtacgctctcgataagaaggtggagcaagacttatggaaccatgccttcaaaaaccaaatcaccactctgcaggggcaggcaaaaaaccgcgcgaatcctaatagatcagaagtccaggccaacttgagcttattcttggaggcggccagcggcttttacacccagctacttcaggagctgtgtaccgtgtttaatgtcgacttgccttgtagagtgaaatcctcacagctgggcattatcagcaacaaacaaactcacacctcggccatagtcaagcctcagagtagctcctgtagttacatctgccaacactgcctcgtacatctgggtgacatcgcaaggtacaggaaccagacttcccaggccgagagttattacaggcatgccgctcagttggtgccgtccaacggccaaccctacaatcagcttgctatattggcttctagtaaaggggaccacctcactaccatattctattactgcagatccatagccgtcaaattcccgttccccgccgcatcaacgaacctgcagaaggccctctctaaagccctggaatccagggacgaagtgaaaactaagtggggggtgtcagattttatcaaggcgttcattaagtttcacggccacgtgtacctgagcaagagcctggaaaaactgtcgccattgagagagaagctggaagagcagttcaaacggctcctgtttcaaaaggcattcaattctcaacagcttgttcatgtcaccgtgatcaacctgtttcagctgcatcatttgcgcgatttttccaatgagacagagcagcacacctattcgcaggatgaacagttatgctggacacagttgctggccctgttcatgagcttcctcgggatcttgtgcaagtgtcccctccagaatgaaagccaggaggaatcttacaatgcctacccacttccagccgtcaaggtatcgatggactggctgaggctgcgtccacgggtttttcaggaggcagtggtcgacgagcgacagtatatctggccctggctgatttccttgctcaattccttccaccctcatgaggaagatctctcatccatcagcgctactccgctgccagaagagtttgagctccagggcttcctcgccttacggccttcttttcgcaatctggactttagcaaggggcatcagggcatcaccggagataaggaagggcaacaacggcgaattcgacagcaacgtctgatctccattgggaaatggattgccgataatcagccgcgcttaattcagtgtgaaaacgaggtaggcaagctactcttcatcaccgaaatcccagaactcatcctcgaagacccatctgaggccaaggaaaaccttatcctccaggaaacaagtgtaattgaatcactggcggccgatggcagcccaggcctcaaaagcgtcttgtcgacttctcggaacctcagcaataattgtgacaccggagagaagcctgtagtcacttttaaggaaaatattaaaacgcgtgaggttaatcgcgatcagggccgctcttttccacccaaggaggtgaaaagccagacggagctgcgcaaaactccagtgagcgaagcccggaagacacccgttactcaaactcccacgcaagcatctaacagtcaatttatccctatccaccaccctggcgccttcccccccctgccatccagacccgggtttccacctccaacctatgtcatacccccccctgttgccttcagcatggggtctggctacacgttccccgctggcgtgtctgtgcctggcactttcttgcagcctacggctcattctccagccggaaaccaggtgcaggccggcaagcagtcccatatcccatactctcagcagcgtccttcaggaccaggtcctatgaatcaagggcctcagcaatcccagccgcctagccaacaaccacttacttccttgccagcccagccaactgcacagagcacttctcaattgcaggtgcaggctctgacccagcagcagcagtccccaacaaaagcagtgccagctcttgggaagtctcccccccaccactctgggttccaacagtaccagcaggccgacgcttcaaagcagctttggaacccaccacaggtacagggccccctggggaaaatcatgccagttaaacagccgtactatctgcaaacccaggaccccattaagctgttcgaacccagcctgcaacctccagtgatgcagcagcagccattggagaaaaaaatgaaaccattccctatggagccatacaatcacaacccttccgaggtcaaagtgccagagttctactgggatagttcttattcaatggccgataaccgcagcgtcatggctcaacaagccaatattgaccgccgaggcaaacggtctcccggtgtgtttaggcctgaacaggatccagtgccaagaatgcccttcgaggaccctaagtctagtccacttctgccccccgaccttctgaaaagccttgccgcccttgaagaggaggaagagctaattttctcaaacccgcccgacctgtaccccgccctccttggcccactggcctcactgcctggccggagcctctttaaaagtcttctggagaagccatcggagcttatgtcacatagctcaagtttccttagtctcaccggattctctttgaaccaggaacggtatccaaacaattcgatgtttaatgaagtctacggtaaaaatctcacttcaagctccaaggcagagttatctccaagcatggcaccacaggagacatccctttattcactattcgagggcacaccctggtctccttcgctgccagctagcagcgatcactcaaccccggcaagtcagtctccacattcgagcaatccatcatccctgccgtcttcccctccaacacataaccataacagcgtacctttttctaacttcggtcctattggaacacccgataatcgggatcggcgcacggctgacaggtggaagaccgacaagcctgcaatgggaggcttcggaatcgattacttgtctgccacttcctcatccgagtccagctggcaccaggcgagtacgccatccggcacatggaccggccacggcccaagtatggaggactcatctgccgtgctgatggagtccttgaagaagcagcagcacggcgtgcagcagttggggcctaagcgccagtctgaagaggagggatccagtagtatctgcgtggcacaccgaggccctcggcctctcccttcttgttcccttccagcctccacatttcgagtcaaattcaaagcagcaaggacttgcgcccatcaagcacaaaagaaaactcgtagacggccgttctggaagcgccggaaaaaagggaaatag

SEQ ID NO: 134631 - DNA, 3276 bp, synthetic construct
  misc_feature 1..3276: note = Description of Artificial Sequence: Synthetic coding sequence
  source 1..3276: mol_type = other DNA
atgtctctgcagtcagctcagtatttacgacaggcagaagttctcaaggcggatatgaccgatagcaagctggggccggcagaagtctggacatcgaggcaggcgctgcaggacctctaccaaaaaatgttggtgacagacttggaatacgctctggataagaaggtggagcaggatctgtggaaccacgccttcaagaatcagattaccactctccagggacaggctaaaaacagagccaatcccaacaggagcgaggtgcaggcaaaccttagcttatttttagaggccgcctctggattctatacgcagctgctgcaggagttgtgcacagtcttcaacgttgacctcccgtgccgcgtgaagtctagtcagctggggataatttctaacaagcagacgcacacaagcgctatcgtcaaaccccaatcgtcctcctgcagctacatctgccagcattgtctcgttcaccttggcgacattgcccggtaccgtaaccagacgtcacaggccgagtcttactacaggcacgctgcccaattggtccctagcaatggacaaccttataaccagctcgccattctggcctcttctaagggagaccatctcacgactatattttactactgtagatccatcgcggtgaaattcccattccccgctgccagtaccaatctccagaaagcattaagcaaagctcttgagtctagggatgaggttaaaacaaagtggggcgtctctgattttatcaaagcatttatcaagtttcacggccatgtgtatctcagtaaatcactggaaaagctgtctccactaagagagaaactggaagagcagttcaagcgcctcctctttcagaaagcattcaacagccagcaactggtgcatgtaactgtcattaacttgtttcagctccaccacttgagggacttctcaaacgaaaccgaacagcatacttacagccaagacgagcagttgtgttggacccagctactcgcgttattcatgagctttctgggtattctgtgcaaatgcccactacagaatgagagccaggaagaatcatataatgcttacccactacccgcagtgaaggtatcgatggactggttgagactcaggccccgtgtcttccaggaagcagttgtcgatgaacgtcagtatatttggccatggctgatttctctgctgaactctttccatcctcatgaggaagacctgagcagcatctcagcaaccccactccccgaggagtttgagctgcaggggtttctggctttgaggccatctttccggaatctggatttttccaagggccatcaagggattacaggagataaagaaggccagcaacgcagaatcagacagcaaagactgatttcaattggcaagtggatcgctgataaccaacccaggttgatacagtgcgaaaatgaggtcggaaaattactgtttatcactgagatccccgaactgatccttgaggaccctagcgaagcgaaagagaatctgatactgcaggagacaagcgtgattgagtctctcgccgccgacggaagcccaggcctaaagagcgtactgtcgacctcccgcaacctgtcgaataactgcgataccggcgaaaagcccgtagtgacctttaaagagaacattaaaacacgggaggtcaatagggatcaggggagatcattccctcccaaagaagtcaagtcgcaaactgagctacgcaaaacgcccgtgtcggaggccagaaaaacacccgttactcagaccccaactcaggcgagcaactcacagtttatcccaatacatcaccccggcgccttcccccccctgccctccaggcccggcttccctcctcccacctatgttatacccccgcctgttgccttttccatgggaagcggttatacctttcctgctggggtctccgttccagggacatttttacaaccaacagcccatagtcccgcaggaaaccaagtgcaggccggcaagcaaagtcatatcccttactcgcagcaacgcccatcaggccccggcccaatgaatcagggcccccaacaatctcagccaccttcgcaacagcccctgacctcgctgcctgcccagcccaccgctcagtctacatctcagctgcaagtgcaagcgctgacccagcagcaacaaagcccgacaaaggccgtgcctgctctcggcaaaagccctcctcaccattccggctttcagcaataccagcaggcagacgcatccaagcagctgtggaatcctcctcaggtgcaagggccacttggaaagattatgccagtcaagcagccatactacctgcagactcaggacccaattaaattattcgagccttccctccaacctcccgtgatgcagcagcaacctctagaaaaaaaaatgaaaccttttcccatggagccttataaccataatcctagcgaagtaaaggtcccagaattctattgggattccagttactccatggccgacaaccgatccgtgatggctcagcaggctaatatagacagacggggtaagcgttccccaggtgtgttccggccagagcaggacccggttcctagaatgccttttgaaaaaagcctgttggagaagccatccgagttgatgtctcacagctccagctttttgtccctaaccggcttctccctcaatcaagaaaggtacccgaacaactccatgttcaatgaagtgtacggaaagaacctaacaagctccagtaaggccgagctgagtccctcaatggcacctcaggagactagcctgtactctctttttgagggcaccccctggtctccgtccctgccagcatcatccgaccacagtacccccgcaagtcagtccccacattcatccaacccgagcagcctgccaagctcccccccaactcataatcataactctgtaccctttagcaattttggaccaatcggtacacctgataatcgagaccggaggacagctgataggtggaaaacagacaagccagcaatggggggttttgggattgattatttgagtgccacctcatcctcagagtctagctggcaccaggctagcacacctagtggtacctggactggccacggtccatctatggaggacagtagtgccgtcctgatggagtcactcaaatcaatatggtcctctagtatgatgcaccctggtccatcggccttagaacagttgcttatgcagcagaaacagaagcagcaacggggccaggggaccatgaaccctccacattag

SEQ ID NO: 134632 - DNA, 2976 bp, synthetic construct
  misc_feature 1..2976: note = Description of Artificial Sequence: Synthetic coding sequence
  source 1..2976: mol_type = other DNA
atggccgggcctgtctctttaagagacctcttgatgggtgccagcgcttggatgggcagtgagagcccaggcggctcccctaccgagggtgggggttccgcagctggcggaccagaacctccctggagagaggacgagatctgtgtggttggcatctttggcaaaacagcgctgcgcctgaattctgagaaattctcccttgttaatactgtttgtgacagacaggtgttcccccttttccgccatcaggaccctggagatcccgggcctgggattcggacagaggccggggccgtcggcgaggctgggggagccgaggaccctggggccgctgccggcggctccgtgcgtggttccggggccgtcgctgagggtaataggacagaggcgggtagccaggattactcacttctgcaggcctactactcacaggagagcaaggtgctgtacttattgctgacctcgatctgtgataattcccaactgctgcgagcctgtcgggccctgcagagcggagaggcgggcgggggactgtccctgcctcacgcagaggcccatgagttctggaagcatcaggaaaagcttcagtgcctgagccttctttacttattttccgtatgtcacatcctgctgcttgtgcaccccacttgttcatttgatattacctatgaccgagtgtttagagcactggacggattgaggcaaaaggtccttcctcttctgaagacagcgatcaaagattgtcccgtgggaaaggattggaagctcaattgccgcccttgcccgcctcgcctgttgtttttgtttcagcttaatggcgctctcaaggttgaaccccccaggaaccaagatcccgcccatccggacaaacctaaaaagcatagccctaaaaggcgcctgcagcacgccctcgaagaccagatatacaggattttccggaagtcacgagtgttgaccaaccagtccatcaattgtctttttaccgtgcctgccaaccaagcatttgtctacatcgtgccagggagtcaggaggaggaccccgtcgggatgcttctggatcagcttagatctcactgtacagttaaggaccccgagtcactattggtcccggctcccttgtcagggcctcgtcgataccaagtgatgcgtcaacattccagacagcagctctcattccatatcgacagcagctcgtcctcatcttctggacagctggtggactttacactaagggaattcctctggcaacacgtggagttagtgctcagcaagaaagggttcgatgattccgtgggcaggaatccccagccaagtcatttcgagctccctacatatcagaaatggatcagcgctgcctcaaaactctatgaagtcgcaatcgatgggaaagaggaagatctcgggagtcctaccggggaacttacttccaagatcctcagctcaataaaggtacttgaggggtttctggacatcgatacgaagtttagcgaaaaccgctgtcagaaagccctgccgatggcgcactcagcatatcagagtaatctaccacacaactacaccatgacagtgcataagaaccagctagcgcaagccctgagagtttattcccagcatgcaagaggacctgccttccataagtacgcaatgcagctgcatgaggattgttataagttctggagcaatggccaccagctctgtgaagaaagatcactcactgaccagcattgtgttcataaatttcactctctgccaaaatcgggcgagaagccagaagcggatcggaatccaccagtcctataccacaattctcgcgctcggagcactggcgcttgtaattgcggtcgcaaacaggcaccacgcgacgacccatttgacattaaagccgccaattacgacttctatcagcttttggaggagaagtgctgcgggaaactggatcatattaattttcccgtgttcgaacctagtacccccgaccccgcacccgccaaaaatgagagcagtcccgctccccccgacagcgacgccgataaactgaaagagaaagagccccagactcaaggtgagagcacttctctgtctctggccctttctcttgggcagagtaccgattccctgggcacataccctgccgacccccaggcaggtggcgacaatccagaagtgcatggacaggtcgaagtcaaaaccgagaagcgaccaaacttcgtcgatagacaggcatctactgtggagtacctccctggaatgttgcacagcaattgtcccaagggactgttgcccaaattcagtagctggtctttagtcaaactgggaccagctaagtcatataacttccatacaggcctggaccagcaggggtttattcccgggacaaactatctcatgccatgggacattgtgatcaggacccgcgccgaagatgaaggggacctcgacacaaatagctggcccgcacccaataaagcaattccaggaaaaaggagcgctgtggtgatgggacgcggccggaggagagacgacattgcccgcgcgtttgtggggtttgagtatgaagattcccgcgggaggcgatttatgtgttctgggcccgacaaggtgatgaaagtgatgggatccggccccaaggaaagcgctttgaaggctctaaacagtgatatgcctttatacattctcagcagttcccaaggacgcggtcttaaacctcattacgctcagttgatgcgcctgttcgttgtcgtgcctgacgctcccttgcagatcatccttatgcctcaggtccaacccgggccacctccttgccctgtcttctatcctgaaaaacaggagatcacactgccgccggatggcctgtgggttttgcggtttccctacgcttatgtcaccgagagaggaccgtgttttccccctaaagagaacgtgcagttgatgagctataaggtcctgcggggtgtgctgaaggcagtaacgcagtag

SEQ ID NO: 134633 - DNA, 2925 bp, synthetic construct
  misc_feature 1..2925: note = Description of Artificial Sequence: Synthetic coding sequence
  source 1..2925: mol_type = other DNA
atggctggccctgtctcgctgagagatctcttaatgggagccagcgcttggatgggcagcgaaagccctggggggtcccctacagagggaggtgggagcgccgcaggtggtcctgaacctccttggagggaagatgagatttgcgtagtggggattttcgggaaaaccgccctccggcttaacagcgaaaaattctctctggtgaatactgtgtgtgaccgacaggtttttcctctgttccgtcaccaagatccaggcgatcctggaccagggatccgcacagaagcaggggccgtgggagaggccggaggggccgaggaccccggagctgccgctgggggctccgttagaggcagcggtgcagtcgcggagggcaaccgcaccgaggctgggagccaagattattcgcttttgcaggcttattacagtcaagagtcgaaggtactttacctgctcttgaccagcatctgcgacaatagccagctacttcgggcttgccgggcactacagagcggcgaagcaggggggggtctgtctctgccccatgcagaggcccatgagttctggaagcaccaagagaaactgcaatgtctgagcctcctatacctgttttctgtgtgtcatatcctactcctcgtgcacccaacatgcagctttgatatcacgtacgaccgtgtctttcgagccttggacggacttcgacaaaaagtgctgcccttgttaaagactgctatcaaagattgccctgttgggaaagactggaaactgaactgtcgcccgtgccctccacggcttttgttcctgttccagctgaacggagccctcaaagtggaacctccacgaaaccaagatcccgcacatccagacaagcctaagaaacactcccccaagcggcggctacagcacgctctggaggaccagatatacaggatcttccgcaaatctcgcgtacttaccaatcagtccattaactgtctctttacggtgcctgcaaatcaggccttcgtgtacatcgtgccagggagtcaggaagaggatcccgtgggcatgctactggatcaacttcgctcccattgtaccgtcaaggacccagagtccctgcttgtgcctgcaccattatccgggcctagaagataccaggtcatgcgccaacactctcgccagcagttgtcattccacatcgattcatcatcatcgagtagctccggacaactcgtcgactttacactgagggagttcctatggcagcacgtggagctagtattaagtaagaaaggatttgacgactctgttggacgaaacccccagccttctcattttgaactgcctacgtaccaaaaatggattagcgcagcctccaagttgtacgaagtggcgatcgatggtaaggaagaagatctgggctcgccaacgggagagcttacgagcaaaattctgagctccattaaagtgctcgaggggtttttggacatagataccaagttttcagagaatcgctgccaaaaggcgctcccgatggctcactccgcataccagagtaacctgccccacaattacacaatgacagtccacaaaaatcagctggctcaggccctgcgggtatatagccaacacgcgaggggccccgctttccataaatacgccatgcagcttcatgaggattgctataaattctggtccaacggccaccagctgtgtgaggagcgttctctgacagatcaacattgtgtgcataagttccattctttgccaaagagtggtgagaagcccgaggccgaccggaatcctcctgtcctttaccacaattccagggctcgtagcaccggcgcctgtaattgcgggaggaaacaggcccctcgtgacgatccgttcgatattaaggctgctaactatgacttctatcagctactggaagaaaaatgctgtggtaaactggaccacatcaacttccctgtgttcgaaccatctacgccagacccagcgcccgctaagaatgagagcagcccagcaccacccgattctgatgcggataaactgaaagaaaaagaacctcagactcagggagagtccacctcgttgagtctggcattgtctcttggacaaagcacggattcattagggacttaccctgccgaccctcaggctggaggcgataacccggaggtacacggccaagttgaagtaaaaaccgagaagcggcctaactttgtggaccggcaggctagcaccgtcgagtatctacccggaatgctccatagtaactgtcccaagggattattgccaaagttctcttcctggagcctagtcaagttaggccctgctaaatcatataactttcatacagggctggaccagcagggcttcattcccggcaccaactacctcatgccttgggacatagtcatacgcaccagggctgaggatgaaggtgaccttgacacgaactcttggcctgccccaaataaggcaattcctggcaagcgttctgccgtggtcatgggacgtggtaggcgccgcgacgatattgccagggcctttgtcggctttgagtatgaagactcaaggggcaggcgattcatgtgcagtggcccagacaaagtgatgaaggtgatggggtcaggtccaaaagagtctgcactcaaagccctgaactctgacatgcctctatatattctgagctcttctcaggggcggggcctgaagcctcactatgcacagttgatgagattgtttgtggtagtccctgacgctcctcttcaaatcattctgatgcctcaggtccagccaggtcctcccccctgtccggtgttttacccggaaaaacaggagataacgttaccacctgatggattatgggtgctgagattcccatatgcgtacctccgggaggacctggtctctcctttgcgtaaaatgtgcagctag

SEQ ID NO: 134634 - DNA, 1563 bp, synthetic construct
  misc_feature 1..1563: note = Description of Artificial Sequence: Synthetic coding sequence
  source 1..1563: mol_type = other DNA
atgagcgaaagtggacatagccagcctggcctgtacggcatagagcggcggagaaggtggaaagaacccggatccggcgggcctcagaatcttagtggacctggagggcgggaaagagattacatcgcgccgtgggagcgggagcggagggatgcgagcgaagagactagtacatctgtgatgcagaagaccccaatcatcctgagcaagccaccggccgagcgttctaaacagccacctccacctacagctccagccgctccccctgctccagcaccactggaaaagccaatcgttctcatgaagcctagggaggaaggtaaggggcccgtggcagtgactggcgctagcaccccagaggggacagccccacctcctcccgcagcacccgctccacctaagggggagaaagaaggtcagcggcctacccagcccgtgtatcagatacagaaccgaggcatgggaactgcagcacctgccgccatggaccctgtggtaggccaggcgaaactgcttccccctgaaagaatgaaacactcgatcaaactggtggatgatcaaatgaattggtgtgattccgcgatcgaataccttctggatcagacagacgtattagtggttggagtcctcggcctgcaggggacaggaaagtccatggtgatgagcctcctgtcggcaaacacaccagaagaagaccagcgtacctacgtttttcgcgcgcagtctgctgaaatgaaagagaggggcgggaaccagaccagtggaatcgactttttcatcacccaggagaggatagtgttcctcgatacacagcctattctgtccccctcaattctggaccatctgatcaataatgatcgcaaactgccccccgaatataacttaccccatacatatgtggagatgcagagcctgcagatcgctgcctttttattcactgtttgtcacgttgtgatcgtcgtgcaggattggtttactgacctaagcttataccgttttttacaaactgctgagatggttaaaccatcaactccaagtcccagccacgagtcaagcagtagctccggttccgacgaaggcaccgagtactatccccacctcgtgtttctccagaacaaggcaagaagagaagatttttgtccgaggaaacttagacagatgcatctgatgatcgatcaacttatggcccactcccatttacgatacaagggcaccctctcaatgctgcagtgcaacgttttcccaggattgccacccgattttctcgactctgaagtaaatttattcctagttccctttatggattctgaggccgaatctgagaatccccctagagccggcccaggtagcagccccctcttttcccttctacctgggtatcgcgggcacccttccttccagagtcttgtaagtaagttgagaagccaggtgatgtctatggccagaccacagttgtcgcataccatcttgacagagaagaactggtttcattacgcagcccggatctgggacggcgtgcgtaaatcgtctgcacttgctgagtattcgcgactgctggcatag

SEQ ID NO: 134635 - DNA, 2742 bp, synthetic construct
  misc_feature 1..2742: note = Description of Artificial Sequence: Synthetic coding sequence
  source 1..2742: mol_type = other DNA
atggccgatgaagctctggcgggcctggatgagggcgccttgcgaaagctacttgaagtaaccgctgatctcgctgagcggcggcgtattcgcagcgccatccgcgaactgcagagacaagagctagagcgggaagaagaagcactggcttctaagagatttcgggcagaaaggcaggacaacaaggaaaattggctgcacagtcagcagcgagaggctgagcagcgcgccgccctggctcggctggcagggcagctggaatccatgaatgacgttgaggagctcacggccttgctgaggagtgccggcgagtatgaagaacgcaagttaatcagagcagccatacgacgcgtgcgggcacaggaaatcgaggccgcaactctggcggggcggctgtattctggtcgtcccaactctggaagcagagaagactctaagggcctagcagcccacaggttagagcagtgcgaagtgccagagcgggaagaacaggagcagcaagctgaagtctccaaaccaaccccaaccccggagggaactagccaggacgtaactaccgtgactttgctgctgagagccccgcccggctccacaagcagctcccccgccagtcccagctcttctcctacacccgcttcaccggaacctcctttggaacctgctgaggcacagtgtctgaccgccgaggtccctggatctccagaacctcctccaagtccaccaaaaaccacttccccagagcctcaggagagcccaactctccctagtacagagggtcaggtggtcaataagctgctgtcaggcccaaaggagactcccgcagcccaatcgcccacgagaggaccaagcgacactaaacgagccgatgttgccggaccccgcccctgtcagcggtcgctgtcagtgctatcacctaggcaacccgctcagaacagagaaagtacccctctcgcgagcgggccgtctagttttcaacgcgccgggtctgttcgggatcgcgttcacaaatttaccagcgattcaccaatggcagctaggctgcaggatggaaccccccaagcagccctttcccctctgcctcgtaaggcacccggccctctgccccatcagcatcacccatgtcttttgttacagcgcctgttgctctcaggccccgacaccagcagccggtttagtaaggagcaaaggggtgtggcgcaacccttagcccagcttcgtagttgtccacaggaggaaggacccaggggccgaggccttgccgcccggcctctggagaatcgggcaggaggaccagtcgcacgctccgaagagcctggagcaccgctaccagttgcggtgggcaccgcagaacccggcggaagcatgaaaacaaccttcaccatagaaattaaagatggccgaggacaagctagcaccggccgcgtcctgttacctacaggaaatcagcgagctgagttgacactggggttaagagctcctcctaccctgctgtcgacatcttctggaggaaaatctacaattactcgagtgaattcccctggcacactcgcgaggctgggctccgtaactcatgtgacatccttctcacacgccccccccagctctcgcggagggtgtagcatcaagatggaggctgagcctgctgagcctctggctgccgctgttgaagctgcaaatggtgccgagcagacccgggtcaacaaagcaccagagggacgctcccctctgtccgccgaggagctgatgaccattgaggacgagggcgttcttgataagatgttggatcagtctacagacttcgaggagagaaagttgattcgtgccgccctcagagaactgcgacaaaggaagcgagatcagagggataaggagcgggagcgcaggcttcaggaagctaggggcagacctggcgagggccgcgggaacaccgcgactgaaacgaccactcgccatagtcaacgcgcagcagacggctcagccgtgagtaccgtgacgaagacagaacgcttggtccacagcaatgacggcaccagaaccgcccgtacaaccactgtcgaaagtagctttgttcggcgtagcgaaaatggcagtggctcgacaatgatgcagaccaaaacctttagcagttcttcttcctccaaaaaaatgggttccattttcgaccgggaagaccaagcatccccgagggcgggctctctcgccgccttggagaagcgacaagcagaaaagaagaaagagttgatgaaagcacagagcctcccaaagacctcggcgtctcaggctcgtaaagccatgatcgaaaaattagagaaggaaggtgcagccggctccccaggaggcccccgagctgccgtccagaggagcactagctttggcgtgcctaacgctaactccatcaagcagatgctgctcgactggtgccgggccaaaactcggggttatgagcacgtggacattcaaaacttttcttcttcttggtctgatggtatggccttctgcgccttggtgcataacttcttcccagaggcctttgactacgggcagcttagtcctcagaatcggcgccagaactttgaggtcgcgttttcctcagcagagacacacgccgactgcccccaactattagacacggaggacatggttcggctccgggagccagattggaagtgcgtctacacgtacattcaggagttttatcgatgtctggtgcagaagggactcgtaaagacaaaaaagtcttag

SEQ ID NO: 134636 - DNA, 2748 bp, synthetic construct
  misc_feature 1..2748: note = Description of Artificial Sequence: Synthetic coding sequence
  source 1..2748: mol_type = other DNA
atggcagacgaggcattagcagggttagacgagggtgctctgcggaagctgctggaagtgaccgcggatttagctgagcgtcgcagaattaggtctgctatccgcgaattgcaaaggcaggaactggagcgcgaggaagaggcattggccagcaagcgatttagggccgagaggcaggataacaaggagaattggttgcacagccagcagcgcgaggcagagcaacgtgccgcccttgccagattggcgggccagttggagagtatgaacgatgtcgaggagctgacagcactgctccggtcggctggagaatatgaagagaggaaactaattcgcgctgccatccgccgagtcagagctcaggagatcgaggcagccaccctcgccggaaggctgtatagcggcaggccaaacagcggctcccgagaagatagcaaaggtctggcggctcaccgcctagaacagtgtgaggtgcccgaacgtgaggaacaggagcagcaagctgaggtgagcaagccaacaccaacccccgaaggaacttcccaagacgtgaccacggtgaccttactcctcagggctccacccggttcaacttcctccagcccggccagtccgagcagcagtccaacgcccgcaagcccggaaccacccctcgagccggcagaagctcaatgtctcaccgctgaagtgcctggttcccctgagcctccgccctcccccccgaaaacaacatctcctgagccacaagagagccctacattaccctcaactgaggggcaggtggttaacaagctcctgtctggacccaaagagacaccggctgcccaatcccccaccagggggcccagcgatactaaaagggctgatgtcgccggacctcgtccctgccagcgcagcctaagcgttctttccccccgtcagccggctcagaaccgtgaatctacccccctagcaagtggtccgtcctccttccaacgggccgggtccgtacgcgaccgagtgcataagtttactagcgactcccccatggccgctcggttgcaggatggcacaccacaggcggccctctcccccctgacgccagcacgtctgctgggaccaagcctgaccagcacaacgcctgcgtcttctagcagcggctcaagtagtagagggccctccgatactagttctcggttctctaaggagcagaggggtgtcgcacagccccttgctcagctgcgatcctgtccccaggaagagggtccacggggtagaggtctcgccgccagacctctggagaaccgagcaggcggcccagttgccagaagcgaagagccaggcgctcccctgcctgttgccgttggcacagctgaacccggcggctccatgaagacgacattcacaatcgagattaaggacgggcgaggacaggcttccactggacgagtccttctgcctacaggcaatcagagggccgaactgactctaggactacgagccccgccgaccttgctgagcacctctagtgggggaaagagcactattacgagagttaattcccccgggacacttgcccgcttaggatcagtgactcatgtcacctcgttctctcacgcccccccctcttcacgcggaggctgctccatcaaaatggaagctgaacctgcagagccattagcagcagcagtggaagcagctaacggagcagagcaaactcgggtcaataaagcccccgaggggcgaagtccactctctgccgaggagctcatgaccattgaggatgagggtgtcctggacaaaatgctggaccagagtacagacttcgaagaacgcaaactgattcgggctgcccttcgagagcttcgacaacggaagcgcgatcagcgcgataaagagcgagaaagacgactacaagaagccaggggaagaccaggagaggggcgtggaaacactgctaccgaaacgaccactcgccactcacagagagctgctgatggcagcgccgtctcaactgtgaccaaaacagagagactggtgcactcgaatgatggtaccagaaccgcgcggacaactaccgtggaaagttcatttgtccgccgcagtgaaaacggctcggggagcacgatgatgcagacgaagactttttcaagctcctcctcaagcaaaaagatgggcagtattttcgatcgagaagatcaggcttccccccgagctggcagcctcgcagcgctagagaagagacaggccgaaaagaagaaagagcttatgaaggcccagagcctgcccaaaacctcggctagccaggcgcggaaggctatgatcgagaagctcgagaaggaaggagctgccggttctcccgggggccctcgcgccgcagtccaaaggagtacaagttttggagtgccgaatgcaaactcaattaagcagatgctcctggattggtgccgcgctaaaactcgcggatacgaacacgtagatatacaaaacttttcaagttcttggagcgacggcatggccttctgcgcgctggtgcacaacttttttccagaagccttcgattatggccaactaagtcctcaaaatagacggcagaacttcgaggtcgctttttctagtgcagaaacccatgccgattgtcctcaactcttagacaccgaggatatggtgaggcttagggagcctgattggaagtgcgtgtatacttatatccaggagttctatcgctgtctagtacagaaaggcctggttaaaacaaaaaaatcttag

SEQ ID NO: 134637 - DNA, 2754 bp, synthetic construct
  misc_feature 1..2754: note = Description of Artificial Sequence: Synthetic coding sequence
  source 1..2754: mol_type = other DNA
atggcagatgaagcattagccgggctggatgaaggggcgctccgcaaattgctggaggtgaccgccgaccttgcagaaagacgcaggatcagaagcgccatccgggaattgcaaagacaggagttagagcgggaagaggaagctttggcaagtaagcggttccgggcggagcgccaggataataaggaaaattggctccattcacagcagagggaagccgaacagagagccgctttggcccggctggccggacagctggagtctatgaatgatgttgaggagttgaccgcattactccgctctgctggagagtacgaagagagaaaattaatcagggcagcaatcagacgggtgcgcgcacaggagatcgaggcggcaaccctcgcgggtaggctgtactcaggacggcctaacagcgggagtcgtgaggatagtaaagggctcgcggcccacagattagaacaatgtgaagtcccagaacgggaagagcaagagcagcaagctgaagtgtcaaaacctaccccgactcccgagggcacctcccaggacgtcaccaccgtgacattgcttttgcgagcaccacctggaagcaccagttcatctcccgcctcaccgagctctagccctactcctgcctcgccagaaccccctttagagccagccgaggcccagtgcctgaccgccgaagtcccaggctctcccgaacccccaccatccccccctaagacaacaagcccggaaccgcaggagtcaccaactttacccagtacggagggccaggtggtgaacaagctgctgtctggtcccaaagagacgcccgccgcccaatcacccactagagggccgtctgataccaagagggcagacgtagcgggtccccgcccatgccaacgctccctgagcgttctatctcctagacagcctgcccagaaccgtgagtcaaccccactggcctccggaccatcttcctttcagagggccgggtcggtgcgagatagagtgcacaaatttacctctgatagccccatggctgctagactgcaggacgggacaccccaagccgcactatcccccctgactcctgcccgactattaggtccaagccttacctcgaccaccccagccagcagttccagtgggtccagcagtcgggggccctctgatactagctctaggttctctaaggagcagaggggcgttgcccagccgctagcccagctgcgctcatgccctcaggaagaaggccctcggggacgtggtcttgccgccagacctctggagaatagagcgggcggacccgtggcccgctccgaggagcccggcgcaccacttcccgtggcggttggcactgccgaaccagggggatcaatgaaaacaacattcaccattgagattaaggatggccgcggacaggcctctaccggcagagtactgctcccaacaggaaaccaaagagctgagcttacactcggactgagggcgcctccaacgctcctgagcacctccagcggaggaaaatccactattacacgcgtgaacagtccaggaacactggctcgcctgggatctgttacccatgtgacatcattctctcacgcccctccttccagcaggggcggatgtagtattaagatggaagccgagcccgctgaacctctggcggcagctgttgaagccgccaatggcgccgaacagacaagggtgaataaggctcctgaagggcggagccccctttcggccgaagaactgatgaccattgaggacgagggcgttttggacaaaatgttggatcaatccaccgatttcgaggagagaaaattgattcgagctgcgctacgggaattgagacagcggaagcgcgatcagagggacaaggagagggaaaggaggctacaggaagcaaggggccgcccaggcgaagggagggggaataccgcaaccgagacaacaacaagacacagccagagggccgccgatggaagtgccgtgtccaccgttacaaagactgagcggcttgtccattccaacgacgggactcggactgcaaggacgacgaccgtcgagtcttcctttgtgaggagaagtgagaacggtagtggcagcactatgatgcagactaagaccttctcttcctcatcctctagtaagaagatgggaagcatcttcgacagagaggaccaagcatcccctcgggcaggtagtctggcagcactggagaagcgacaggccgaaaagaagaaggaactcatgaaagcacagagccttcctaaaacttcagcctctcaggcgaggaaggctatgattgaaaaactcgagaaggagggcgcagccgggtctccaggcgggcctagagcagcagtccagaggtccacttcatttggcgtgcctaatgccaattctataaagcagatgttattagactggtgccgtgcaaaaaccaggggctatgaacatgtggacatacaaaattttagctctagctggtcagatgggatggcattctgcgcactcgtgcataatttctttcctgaggctttcgactacggccagcttagtccgcagaatagaagacagaatttcgaagttgcgttcagttcggcagaaatgttagtggactgcgtgcccctggtggaagtcgacgacatgatgataatggggaagaagccggatcctaagtgtgtgttcacctacgttcagagtctgtacaatcacctgaggaggcacgagctgagactgcgtgggaaaaacgtgtag

SEQ ID NO: 134638 - DNA, 888 bp, synthetic construct
  misc_feature 1..888: note = Description of Artificial Sequence: Synthetic coding sequence
  source 1..888: mol_type = other DNA
atggaagccgaacccgctgaacccttagccgccgcagtcgaagccgctaacggcgctgaacaaactcgggtcaacaaggcaccggaaggcaggagtccgctgtccgccgaagaactgatgaccattgaagatgagggagttttagacaagatgctggatcaaagcaccgacttcgaagaacgcaaattaatccgggcagcacttcgtgaactaaggcaacggaaacgagacggctccggatccacgatgatgcagacaaaaaccttctccagctcgtcttcgtctaaaaagatgggcagtatatttgatagagaagatcaggcttctccccgggccggttcactcgccgctttggaaaagaggcaggcggaaaaaaagaaggagctgatgaaagcccaaagcctgccgaagaccagcgccagtcaggctagaaaagccatgattgaaaagctggaaaaggaaggagctgccggcagtcctggtggcccgcgggctgcagtgcagcgctctacctctttcggggttcccaacgcgaattctattaaacaaatgctgctcgattggtgcagggctaagacacggggctatgaacacgttgacatccagaatttctcgtccagctggtctgatgggatggctttctgcgctctagtgcacaactttttcccggaagccttcgattacggtcagctctcccctcagaaccggcgtcagaactttgaagtggccttttcctcagccgagacccacgcagattgtccccagcttctcgacacagaggacatggttcgcctgcgcgaacccgattggaaatgcgtgtacacttatatccaggaattttaccggtgcctcgtgcagaagggccttgtgaagacaaaaaagtcctag

SEQ ID NO: 134639 - DNA, 2817 bp, synthetic construct
  misc_feature 1..2817: note = Description of Artificial Sequence: Synthetic coding sequence
  source 1..2817: mol_type = other DNA
atgacctgcctgtcacacccactgcagctggaggtgactgctgatctggctgagagaagacgcattaggtcagcaattagagaactgcagcgccaggagctggagcgcgaggaagaggcactggcaagtaaacgattccgcgccgaaagacaagataacaaggagaattggctgcattcccagcagagggaagccgaacaacgggctgcactcgcccgcctggccggccagctggaatctatgaatgacgtggaggagttaacggcactcctgaggtctgccggcgaatatgaggaaagaaagttgattagagccgccatcagaagggtgcgcgcccaagagatcgaagctgccacacttgctggaagactctacagcggtcgaccaaacagcgggtccagggaggacagcaaagggctcgccgctcacaggctggaacaatgtgaagtaccggagcgcgaagagcaggagcaacaggcagaagtatccaagcccacgcccaccccggagggtaccagtcaggatgtcactacggtcaccctgttgttaagagccccccccgggtccactagctcatcccctgcgtcgccctcatcatcaccaaccccagctagccccgagccacccctcgaacccgcggaggctcagtgcctcactgccgaggtgcccggatcacccgaaccgccccccagccctcctaagacaacaagtccagaacctcaggagtcgcccacactgcccagtacagaggggcaggtggttaataagttactctcgggacccaaggaaaccccagcagctcaatcccctacacgtggcccgtctgacacaaagagggcggacgtggcaggtcctcgaccatgtcagaggtccttgtccgtgttgtcaccgcgccagccagcccagaaccgggaatctacccctctcgcttcaggaccttccagcttccagagagccggatcagtcagggaccgcgttcataaattcacatccgattctcccatggcagcacgcctgcaggacggcaccccccaggctgccttgtctcctctgacaccagctcgcctgctcgggccaagtcttacctctacaactcccgcttctagttcaagcgggtcctcatccagaggcccatcagacacaagtagtaggttttccaaggaacagagaggggtagcccaaccactggcccagctgcggagctgtcctcaggaggagggtcctcggggccgcggcctcgccgctcggcctctcgagaacagagccggcggcccagtggctcgctctgaggaaccgggagcccccctgccggtggctgtgggaaccgcagagcccggaggatcaatgaagacaacctttaccatagaaatcaaggatggacgcgggcaggcctcgaccgggagggtactcctgcctacaggcaaccaacgcgccgagttgactctcggcctgcgtgctcctcccactttactgtcaacgagctctgggggcaaatctacaattacacgtgtgaactcacctggaactctcgcgcgccttggctcagtgacgcatgtcaccagcttttcacatgccccaccctcgtcacggggtggatgctccatcaaagctgcggaggatgcaggcacacccgtagcccacccgcctgcgtttagtacaagaaggcggagttctactggcacgactcgcagtactagcttgatggaagcagaaccagctgagccactggccgcagcggtagaagctgccaacggcgccgaacaaacgagagttaacaaagcacctgaggggcggtccccacttagtgcagaggaactgatgactattgaagatgagggggtcctcgataagatgctcgaccagtctactgacttcgaagaacgaaagttaattcgcgccgccctgagggaattgcggcagcgcaagagggatcagagagacaaagagcgggagagacgcctgcaggaagcaagaggccgtcctggggagggacgtggcaacactgccacagaaaccacgaccaggcattcgcagcgcgccgccgacggatctgcagtcagcaccgttaccaaaacagagagactagtgcacagtaacgatggcacacgaactgcaagaactacaacagtagagtctagttttgtgagacgctctgagaacggctccgggtctaccatgatgcaaaccaagacattttcctcgtcttcttcaagtaagaaaatgggctctatcttcgatagagaagatcaggcttccccgcgtgccggctctctcgccgccttggaaaagaggcaggcagagaaaaagaaagagctgatgaaagctcaatcattgccaaagacatctgcatcacaggccaggaaagcgatgatagaaaagttagagaaggagggcgccgctggcagtcctgggggccctcgggcagcagtccaacggtctaccagttttggcgtgccaaatgcaaactcaatcaaacagatgctgctcgactggtgtcgcgcaaaaaccagagggtacgaacatgttgacatccagaacttctccagcagctggtccgacggaatggcgttctgtgcactggtccataatttttttccagaggcattcgattacggccagctgtcacctcagaacagacggcaaaacttcgaagtcgccttctcatccgcagagacccatgccgattgcccacagcttctcgacacagaagacatggtgaggcttagagagcctgattggaaatgcgtctacacttacattcaagagttttaccgttgccttgtccagaaaggcctggtgaagaccaaaaaatcctag

SEQ ID NO: 134640 - DNA, 114 bp, synthetic construct
  misc_feature 1..114: note = Description of Artificial Sequence: Synthetic coding sequence
  source 1..114: mol_type = other DNA
atggccgacgaggcgctcgcgggcctggatgaaggagcgctgcgcaagcttttagaggtgactgctgacttagccgagcgcagacgaattcgaagtgccatccgcgagttgtag

SEQ ID NO: 134641 - DNA, 2823 bp, synthetic construct
  misc_feature 1..2823: note = Description of Artificial Sequence: Synthetic coding sequence
  source 1..2823: mol_type = other DNA
atggcagatgaggcccttgccggcctcgacgagggggcgctccggaaactcctagaggttaccgcagacttggccgagcgtcgccgtataagatccgcgattagagagctgcagaggcaggagctggagagagaggaggaggccttggcctctaagcgcttccgggctgaacggcaagacaacaaggagaactggctgcacagccaacagcgggaggcagagcaacgggcagccctcgccaggctcgcaggacagctggaatcaatgaacgacgtggaagagctgacagccctgttgagatcagcaggcgagtatgaggagcgcaaactgatcagggccgctatccgtcgcgtccgcgcacaggagattgaggcagccacactggccggacgtttatactcaggcagaccaaactccggctctagggaggactctaaggggctggccgcacaccgcttggaacagtgtgaagtgcccgagcgcgaagagcaagagcagcaggcagaagtctcgaaacctacacccacacctgaagggacaagtcaggacgtgaccacagtaactctcctgctgagagcaccccctgggtccacaagctccagtcctgccagcccctctagttctcccactcccgcttccccagaacctccacttgagccagcggaggctcaatgtctgacggctgaagtgccaggttccccagagccaccaccctcaccccctaaaaccaccagccctgaaccacaggagtctcctactctgccatctaccgaagggcaggtagtgaacaaactcctctcaggacccaaagagaccccagcagctcaaagcccaaccagaggaccctctgatacaaagagagccgatgtcgctggccctcgtccgtgtcagagatctctgtctgttttgtctcccaggcagccagcccagaaccgcgaatccacccctttggcctcagggcctagctcttttcagagagccgggagcgtccgcgatagggttcataagtttacaagcgactcccctatggcagctcgcttgcaagacggaactccacaggctgcgctgtctcccctgacaccagcacggctgctgggtccctccctgacttccactactccagcgtcctcatcctccggatcatcctcccggggacctagcgacacaagcagcagattctccaaggagcaaagaggagtggcccagcctttggcacagctgaggtcttgtccacaggaggagggtcccagaggaagaggattggccgcgagaccccttgaaaatagagcaggcggacccgtcgccaggagcgaggaacccggtgcccccttgccggtcgcagtgggcacagcagaaccaggaggctctatgaaaaccacctttacaatcgaaatcaaagatggacgggggcaggcgagcactggccgtgtactcctcccaactggtaaccagagggccgagctgacactagggctgagggccccccccaccctgctgtccacctcttcaggagggaagtccactattacgagagtaaattctcccggcaccctcgctcgcctggggtccgtgactcacgtcacctcgtttagccacgctcctccatcgagccggggaggctgtagcataaaaatggaagccgagccggccgaaccattggcggccgcggtcgaggcagccaatggggcggagcaaacgcgggtcaataaggctcccgagggccggtccccgttgagcgccgaagaactcatgacgatcgaagacgaaggcgtcttggataagatgctcgatcaatctaccgactttgaggagcgcaaactgatcagggcagccctgcgcgaattacgtcagcggaaacgggaccaaagagataaggaacgcgagcgacggctgcaggaggctcgcggacgacccggtgaaggacggggcaacaccgctaccgagacaaccacccgtcattcccagagagcagcagacgggtctgcggtgtctacggtcacgaagaccgaacgccttgttcacagtaacgatggaactcgcacagcaagaaccacaaccgtcgaatcgagcttcgtgaggcgttccgagaacggatcggggtccacaatgatgcagaccaaaactttttcatccagttccagtagtaagaaaatggggagcatcttcgacagggaggaccaggcttctcctagagccggtagtctagccgccctggagaaaagacaggcagagaagaagaaggaattgatgaaggcccagtctctcccaaagacttcagccagccaggccagaaaagccatgattgagaagctcgagaaagaaggagcagcaggctccccaggcggcccaagggcagccgttcagcgctctacatcatttggagttccaaatgcgaattccattaaacagatgctgctggactggtgtagagctaagacgaggggctacgaacacgttgatatacagaacttctcatcttcctggtctgatggcatggcgttttgcgccctagtccacaatttcttccccgaagcctttgactatggacagctctctcctcagaacagacgccagaatttcgaggtggccttctccagcgcagagacccatgctgactgtccacagctgctagacacagaagacatggtgaggctgagagaacctgactggaagatgctggtggactgcgtgcccctcgtggaagtcgatgacatgatgatcatgggtaaaaagccagacccaaagtgtgttttcacttacgtgcagtcactatacaaccatctgcgaaggcacgagctgagattgcgaggcaagaacgtgtag

SEQ ID NO: 134642 - DNA, 1374 bp, synthetic construct
  misc_feature 1..1374: note = Description of Artificial Sequence: Synthetic coding sequence
  source 1..1374: mol_type = other DNA
atggaacagaaagaggggaaactgagcgaggatggtaccacagtgtcccccgccgccgataatcccgagatgtccggcggtggagcgccggccgaggagacaaagggcacagctggaaaagctataaacgaggggccgcccaccgaatccgggaagcaagagaaggcccccgctgaagacggtatgtccgccgaactgcagggcgaagccaacggactagatgaggtcaaagttgaatctcagcgggaggctggggggaaggaagatgccgaggccgagctgaaaaaggaggatggcgagaaagaggaaacaaccgtggggtctcaagagatgacagggaggaaagaggagactaagtccgaacccaaggaggccgaggagaaggaatcaacactcgcaagcgagaagcaaaaagcggaggaaaaggaagccaaacctgagtccgggcagaaggcggatgcaaacgaccgggataagccagaaccaaaggcgactgtcgaggaggaggatgcaaagactgcaagccaagaggaaaccgtcgtggaggatgaggctaaggctgagcccaaggagcctgatgggaaggaagaagcgaagcatggcgccaaggaagaagctgacgagcccggctcgccctcagaagagcaggagcaggatgtggagaaggagccagagggaggagctggagtaatcccatcatccccggaggaatggcccgagtctcccactggagaggggcacaacctgtcgacggacggactggggccagattgtgtggcctccggacagacctccccctccgcctcggaaagctctccctccgacgttccacagtccccccctgagtccccgtcctccggagagaaaaaagaaaaagcccccgagaggcgagtgagtgcccccgccaggccccggggcccgcgcgctcaaaacaggaaggcaattgtagacaaattcggaggtgctgcttctggacctactgcattgttccgtaatactaaggctgcgggggctgcaattggcggagtgaaaaacatgcttctcgaatggtgtcgtgcgatgactaaaaagtatgaacatgtggacatccaaaatttttcttctagttggagcagcgggatggccttttgcgcactcattcacaaatttttccccgatgcgtttgactatgcagagctggatcccgctaagcgacgccacaacttcacattggcctttagcaccgctgaaaaattggccgactgcgcgcagctgttagatgtagacgatatggtgcgcctggcggtgccagactctaagtgtgtgtatacttacatccaagagctgtatagaagcttggtacagaaaggcttagttaaaacaaaaaaaaagtag

SEQ ID NO: 134643 - DNA, 1539 bp, synthetic construct
  misc_feature 1..1539: note = Description of Artificial Sequence: Synthetic coding sequence
  source 1..1539: mol_type = other DNA
atgctgcccggcgcggtcggcgagagcgattgtagcgctgaggctcgcgagaagatggagcagaaggaaggcaaactgtctgaggacgggacaaccgtgtcgccagccgctgacaacccagaaatgtctggaggcggcgcaccagcagaagagaccaagggcactgcgggcaaggccataaatgagggcccccccacagaaagcggcaagcaggaaaaagccccagcagaagacggtatgagcgcggagcttcaaggagaggctaacgggcttgatgaagtcaaagtggagtctcagagggaagccggtgggaaagaggacgcggaagcggagttaaagaaggaggacggggagaaagaggaaactaccgtggggtcccaagagatgaccggcaggaaagaggagactaaaagcgaacccaaagaagcagaagagaaggaaagtaccctcgcaagcgaaaaacagaaggcagaggagaaagaggcaaaacccgagtccggtcagaaggctgatgccaacgacagagataaaccagagccaaaggcgacggtggaagaggaggatgccaagacggcaagccaagaggaaacaggccagcgaaaggagtgctcaacagagccaaaagagaaagcaaccgacgaggaagcaaaggccgaaagccagaaagccgtggtagaggatgaggcgaaagccgaacccaaagagcccgatggcaaagaggaagctaagcacggcgctaaggaggaagctgacgccaaagaggaagctgaggacgctgaagaggcagaacctggaagtccatctgaggagcaggagcaggacgtggagaaggagcccgagggaggggcgggcgtaatccccagtagcccagaagaatggcccgagtctccaacaggagagggtcataacctgtctaccgatgggctgggccccgactgtgtggctagcggacagacgtcaccctcagcctccgagagttccccttcggacgtgccacagagccccccggagagcccgagtagcggtgagaaaaaagagaaagcacccgagcgacgcgtctctgcgccggctcgaccaaggggacccagggcgcagaacagaaaagcaatagtggataagttcggtggagcagcatccggaccaacagctctctttagaaatacaaaagccgccggggccgcgataggtggagtgaaaaacatgcttcttgaatggtgcagagctatgacaaagaagtacgagcacgtcgacatccagaacttctcaagctcctggtcctcaggaatggctttctgtgcgttaatacacaaattcttccccgatgcattcgactatgctgagctcgacccagcaaaaaggcgccacaattttaccctggctttttccaccgctgaaaaactggccgattgtgcacagctactggacgttgatgatatggttcgcttagctgtcccagactcaaaatgcgtatacacatacattcaggaactgtacaggagcctggtccagaaaggcctggtaaagaccaagaagaaatag

SEQ ID NO: 134644 - DNA, 1485 bp, synthetic construct
  misc_feature 1..1485: note = Description of Artificial Sequence: Synthetic coding sequence
  source 1..1485: mol_type = other DNA
atggaacaaaaagaaggtaagctctcagaggatggaaccaccgtgtcccctgcggccgataatccggaaatgtcggggggcggcgcccccgctgaggagaccaagggaacggcagggaaagccattaacgaagggccccccactgaatccgggaaacaggagaaagctcctgccgaagacggtatgagcgcggagttacagggggaagccaacgggttggacgaggttaaagtagaatctcaaagagaggccggggggaaagaggacgccgaggccgagcttaaaaaggaggacggggaaaaggaagagacgacggtgggttcacaggaaatgactggtaggaaagaggagactaagtcagagcccaaagaggcagaggagaaagagtccaccctggcaagtgaaaaacagaaagctgaggaaaaggaggcaaaaccggagtcgggccagaaggccgatgccaatgatagggacaagcctgaaccaaaagcaaccgtagaagaggaggatgctaaaacggcctcccaggaagaaaccgggcagcgaaaggaatgctctacagagcctaaggagaaggccaccgacgaggaggcaaaggccgagtctcagaaagcagtcgtggaggacgaagctaaggccgagcccaaagagcctgacgggaaagaagaggcaaaacatggcgcaaaagaagaagctgacgctaaagaggaggcagaagatgccgaggaagctgagccaggatcaccctccgaggagcaagagcaggacgttgaaaaggaaccggaggggggtgcgggtgtgattccatcttcacctgaggaatggcccgagtcaccaacaggagaggggcacaatctctctaccgatggcctcggcccagattgcgtggcttcgggccaaaccagtccatccgcgagcgaatcaagcccttctgacgttccacagtcccctccagaaagtccaagctccggcgaaaagaaggagaaagccccagaaagacgagtgagcgcaccagctcgaccacgagggcccagggcacaaaataggaaggccatagttgacaaatttgggggcgccgccagtggtccaacggccctctttcgcaacacgaaggccgccggagctgcgattggaggtgtgaagaatatgctgcttgagtggtgccgggccatgactaagaagtacgagcatgtcgatatacaaaacttttcatcctcctggagctctgggatggcgttctgcgctctgattcataaattttttcccgatgccttcgactatgccgagcttgatcctgcaaagcggcgtcacaactttactctcgccttttcgaccgctgagaaactggcggactgcgcacagctactagacgtggatgatatggtcaggctcgccgttcctgattccaagtgcgtgtacacatacattcaggagctgtacaggtccctcgtccagaaggggcttgtcaagaccaaaaagaagtag

SEQ ID NO: 134645 - DNA, 312 bp, synthetic construct
  misc_feature 1..312: note = Description of Artificial Sequence: Synthetic coding sequence
  source 1..312: mol_type = other DNA
atgtcagaggaaaagcccaaggaaggggtcaagactgaaaatgatcacattaacctgaaagtggccggacaggacggatctgtggttcagttcaagattaaacgacacacacccctcagcaagctcatgaaagcctattgtgaaaggcagggtttaagtatgcgtcagatcagatttcgttttgacggccaacctattaacgagaccgacacccccgcccagcttgaaatggaggacgaggacacaatcgacgtcttccagcagcagacagggggcgtgccggaatcctcattagcgggtcactctttttag

SEQ ID NO: 134646 - DNA, 426 bp, synthetic construct
  misc_feature 1..426: note = Description of Artificial Sequence: Synthetic coding sequence
  source 1..426: mol_type = other DNA
atgagtgaggagaagccaaaagaaggagtcaaaaccgagaacgatcatatcaaccttaaggttgctggccaggatggtagcgtagtgcagtttaagatcaagcgtcacaccccattatctaagctgatgaaggcctattgcgagcggcaggtccgccacctggcccctcctcagtccctcccagtgtgcgctctggtactgtgcgtgccaggaattccgcgggctcgggcctccaggggctggacccaaatgcagctccctgaaggcctgtcgatgcgccagatcaggtttcgcttcgacggccagcctattaacgagaccgatactcctgcccaactggaaatggaggacgaagataccatcgacgtattccagcagcagacaggcggcgtaccagagagcagcctggccggacactcattttag

SEQ ID NO: 134647 - DNA, 288 bp, synthetic construct
  misc_feature 1..288: note = Description of Artificial Sequence: Synthetic coding sequence
  source 1..288: mol_type = other DNA
atggctaacgaaaagcctaccgaggaggtcaagactgagaacaacaatcacattaacttgaaggtggcgggtcaagatggaagtgtggtgcagtttaagatcaagcggcaaacacccctgagtaaactgatgaaggcttactgtgaaccaagagggctgagcgtaaagcagatcagattccgtttcggtggacagccaatttccggtacagataagccagcacaactggaaatggaagatgaggacaccattgatgtgttccagcagccaactggcggagtgtactag

SEQ ID NO: 134648 - DNA, 411 bp, synthetic construct
  misc_feature 1..411: note = Description of Artificial Sequence: Synthetic coding sequence
  source 1..411: mol_type = other DNA
atggcgggtgccggttctgctgctgtgagtggcgctggcaccccggtcgctggccctaccgggagagatctgttcgcggaagggctgctggagtttttgcggcctgctgtgcagcagttggactcccacgtgcacgccgtgcgtgagagccaagtagagttgcgcgagcaaatagataaccttgcaaccgaactgtgtcgcattaacgaggatcagaaggtcgccctggacctggacccatacgtgaagaaactcctgaacgcaaggaggagggtcgtgctcgtgaacaatatcttgcagaatgcccaagagagactccggcgcctgaatcacagcgtcgcaaaggaaaccgccaggcgccgagcaatgctggactctgggatttaccctcccgggtcacctggtaaatag

SEQ ID NO: 134649 - DNA, 2298 bp, synthetic construct
  misc_feature 1..2298: note = Description of Artificial Sequence: Synthetic coding sequence
  source 1..2298: mol_type = other DNA
atggctggttttaaaagagggtatgatggtaagatcgccggcttatacgatctggacaaaacattggggcgtggccacttcgccgtagtcaagcttgctcggcacgtcttcacaggggaaaaggtcgccgtgaaagtcatcgacaagactaagctcgacaccttggccacaggccatctatttcaggaggtcagatgcatgaagctcgtgcagcatcccaacatcgtaaggctgtacgaagtgatagatacccagaccaagctgtacctgatcctggagctaggagacggaggagatatgttcgactacattatgaaacacgaggagggcctcaacgaagacctggcaaaaaaatacttcgcacaaatagtgcacgccatctcgtattgccataagctccacgtggtacatcgggatttgaagcctgagaatgtagtgtttttcgagaaacaggggttggtgaagctcactgactttggattctccaataagtttcagccggggaaaaaactcaccacatcttgcggttctttggcgtactctgcgccggagatcctgctgggggacgagtacgacgcccctgcggtggacatctggagcctgggcgttatcctgttcatgctggtctgcggacagcccccctttcaggaagctaatgacagcgaaactttaacaatgatcatggattgcaagtataccgtgccatcgcatgtgagtaaagagtgtaaggacctaattacacgtatgttacagagagacccaaagcgcagagcttcactggaggagatcgagaatcacccttggctccaaggcgttgatcccagcccagccaccaaatacaatattccgctggtctcctacaaaaaccttagcgaagaagaacacaactctatcattcagaggatggtactcggagacattgctgatcgtgacgccatcgtggaggccttagagacaaataggtataatcacattacggctacatatttcctgcttgcggagagaattctgagggaaaagcaggagaaagagatccagactcgctcggccagtcctagtaacatcaaggctcaattccgtcagtcctggcccaccaaaattgacgtgccgcaggacctggaggacgacctcacagcgactcccctctctcatgcaacagtaccgcaatcgcccgcccgtgcagcagactctgtgcttaacggtcaccgatcaaaggggctgtgtgatagtgctaagaaagacgatctgcctgaactggctggacccgcactgtctacagttccgcccgccagcctgaagccaacagcgagcgggcgtaagtgcttatttcgtgtcgaggaggatgaggaggaagacgaagaggataagaaacccatgtcactatctacacaggtagtgctccgtcggaagccgagcgtcactaatagattaacctcgagaaagagtgccccagtgctgaatcaaatttttgaagaaggcgaatcggacgacgagtttgatatggacgagaatctcccgcccaagctgtccaggctcaagatgaacatagcctcccccggcactgtccataaaaggtatcacagacgtaaatcacaagggagagggagttcatgtagcagcagcgagacgtcagacgacgattctgaatcaaggagacggctcgataaagacagtggtttcacatatagctggcaccgccgggatagttctgagggaccccccggtagcgaaggggacgggggaggccaatccaagccttcaaacgctagcggaggtgttgataaggcatccccatctgagaataacgctgggggcggcagtcccagctctggatctggcggaaatcccactaatacctctggaactacccgcagatgtgcaggaccaagtaactctatgcagcttgccagtagatctgcaggggagctggtggagtcactgaagctgatgtctctttgcctcgggtctcagctccacggttcgaccaagtatattattgatcctcagaatggcctgtccttctcttccgtgaaagtgcaggagaaaagtacgtggaagatgtgcatcagcagtaccggcaacgcagggcaagtaccagccgtaggaggcataaaattttttagcgatcatatggccgacaccacgacagaattagagcgaatcaaaagtaaaaaccttaagaataacgttcttcagctcccgctctgcgaaaagaccatcagcgtgaatatacagagaaacccaaaggagggcctgctgtgcgctagtagccctgcctcatgttgtcacgtgatttag

SEQ ID NO: 134650 - DNA, 2298 bp, synthetic construct
  misc_feature 1..2298: note = Description of Artificial Sequence: Synthetic coding sequence
  source 1..2298: mol_type = other DNA
atggccgggtttaagcgcggctacgatggtaaaattgcaggcctatatgatctggacaaaaccctgggtcgggggcactttgccgtggtgaagctggctcggcatgtgttcactggcgagaaagtggctgtgaaggttatcgacaagactaaactggacacactggctaccggccacttatttcaggaggtgagatgtatgaagctggttcagcaccctaacattgtccgcctctacgaggttatcgacacacagacgaaactgtatttgatcctcgagctgggcgacgggggagacatgtttgattacataatgaaacatgaagaggggcttaatgaggatcttgcaaagaaatattttgcacagatcgtccacgccataagctactgtcataaattacacgtggtgcaccgggatttaaaacctgaaaatgtcgtcttcttcgagaagcagggactggtcaaattgacggatttcgggttctctaacaagtttcagcccggcaaaaaacttaccacaagctgcgggtctttagcctattcagctccggagattcttttaggcgatgagtacgacgctcccgctgtcgatatctggagcttaggggtgatactgttcatgcttgtatgtggccagccaccattccaggaggctaatgactcagaaactctgaccatgattatggactgtaagtacaccgtgcctagccacgtcagtaaagaatgtaaggacctaatcactaggatgctccagcgagatccaaagcgcagggcctcgctcgaagagattgaaaatcatccatggctccagggtgttgatccaagcccagctaccaaatacaatattcctctggtgtcttataagaatctgagcgaagaagagcacaattctattatccagcggatggttctgggcgacatcgccgaccgggatgctatcgtggaagcgcttgagactaacagatacaaccacataaccgccacctactttttgctcgccgaacgtatcctaagggagaagcaagagaaagaaatccagactaggtcggctagcccgtctaacattaaggctcaattcaggcagtcgtggccaacgaagatagacgttccacaggacctagaggatgatctgaccgctacaccgctttcgcacgctacagttcctcaatccccagcccgggccgctgatagcgttctcaacggccaccgctcaaaaggactgtgtgacagcgcaaagaaagacgacctacctgagctggcaggtccagctctcagtacagtccctcctgcttcactgaaaccaaccgcctcgggcagaaagtgcttattcagagtcgaggaggacgaagaagaggacgaagaagacaaaaagcctatgtccctatctacgcaagtagttctgaggaggaagccctcagtgaccaaccgcttaacgtccaggaagtcagcaccagtcttaaatcagatctttgaggagggcgaatctgacgatgaatttgacatggacgaaaacctccctcctaagttgagtaggctaaagatgaacatagcttcacccggcacagtacataaacggtaccatcggcggaagtcacaggggagagggagcagctgcagctcaagcgagaccagcgacgatgacagcgagtcacgcagacggctcgacaaggattctgggttcacatattcatggcaccggcgggattcctccgaaggtccacctgggtcagagggcgacggcggaggtcagagcaagccatctaatgcctcaggaggcgtcgacaaggcctctccctctgaaaataacgccggtggtggcagcccgtcttctggatcaggagggaatcctacaaatacttccgggacgactaggcggtgcgccgggccatctaactccatgcagctcgccagcaggtctgccggagaactggttgaaagtctgaaattaatgagcctgtgcctaggtagccagctccatggcagcaccaaatatattattgacccccaaaatggcttgagcttttcatccgtcaaagtgcaggagaagagtacctggaaaatgtgcatcagcagtacaggtaacgccggacaggtgcccgccgtgggcggcataaagttcttcagtgatcacatggcagatactacgaccgaactggagcgtatcaagtcgaagaatctcaagaacaacgtcctgcagttacccctttgtgagaaaaccatttccgtgaatatacaacgcaatccgaaagagggcctcctgtgtgcttcctccccagcatcttgttgccatgtgatttag

SEQ ID NO: 134651 - DNA, 2298 bp, synthetic construct
  misc_feature 1..2298: note = Description of Artificial Sequence: Synthetic coding sequence
  source 1..2298: mol_type = other DNA
atggctggatttaagagaggttatgacggcaagatcgctggactttatgacctcgataaaaccctgggacggggccattttgcagtcgtgaaacttgctagacacgtgttcactggcgaaaaagtggctgtgaaggtcatcgacaaaaccaaactggataccctggccacaggccatctttttcaggaagtgcgctgcatgaagctggtgcaacaccccaatatagtgagattgtacgaagtcatagatacccagactaagctgtatctcatcctggaactgggggacggcggcgatatgttcgactatattatgaagcacgaggagggactgaatgaagatcttgcaaaaaaatactttgcccagatcgtgcacgctatttcatattgtcataagctgcatgtggtgcatagggatttaaagcctgaaaacgtggtgttcttcgagaaacaggggctcgtaaagttaaccgactttggcttctctaataaatttcagccaggcaaaaaactcactacctcttgcgggtctctggcttacagtgccccggaaatcctacttggagacgagtacgacgcccccgcagtggacatctggtcattgggcgtcattctgttcatgcttgtatgcgggcagccgccatttcaggaagccaacgactccgagactctgaccatgatcatggattgcaaatatacggtaccgagtcacgtaagcaaagaatgcaaggaccttatcacgaggatgctccaacgagatcccaaacgccgggcaagtctggaagagatcgagaaccacccttggctgcagggtgtcgaccctagccctgcaacaaagtacaacatccctctggtgtcgtacaaaaatctctcagaagaagagcacaatagcatcatccagagaatggtgctgggcgatattgctgatcgcgatgcgatcgtggaagcactggaaacgaaccgctacaatcacatcacagccacatacttccttctggccgaaagaatcctgagggagaaacaggaaaaagagatccagaccaggtctgcctccccaagcaacatcaaggctcagttccgccaaagctggccaactaagatcgatgtgccccaggatcttgaagatgatcttaccgccacgcccctgagccacgctactgtaccacagagcccagctcgtgcagcagactctgtgctgaacggtcaccggagcaaaggattgtgcgattcagccaaaaaagatgatttgcctgaactcgccggccctgctctttccacggttcccccggcctccctaaagcccaccgcttccggcagaaaatgcttattccgcgttgaggaagatgaggaggaggatgaggaggataagaagcccatgagccttagtactcaggtcgtgcttaggcgaaagccatccgttaccaataggctgacttccaggaagtcagcccctgttctcaaccagatcttcgaagagggggagtccgacgatgaatttgatatggatgagaacttgcctcccaagctatctagactcaagatgaatattgccagtccaggaaccgtgcataagagatatcacagacgcaagagccagggccggggatcatcgtgtagctccagcgaaaccagcgatgacgactcagagtctagaagaagacttgataaggactcgggatttacatactcctggcacaggagagattcctctgagggccccccgggctcagagggagacgggggggggcaatccaagcccagcaacgctagcggtggcgtggacaaggcctcccctagcgaaaataacgccgggggaggttccccctcatccggatccgggggtaaccccaccaacacctctggaacgacgagaagatgcgcagggccttctaattccatgcaactggcctcccggtcggctggggaactcgtcgagtccttaaagctgatgagcctttgcctgggcagccagttacatgggagcaccaaatacattatcgaccctcagaacggactgagcttttcaagtgtgaaggtccaagagaaatcaacatggaagatgtgcatctcaagcaccggcaacgcaggccaggtgcccgccgtggggggtattaagttctttagtgatcatatggcagacacaaccaccgagctggaacgtatcaaatccaagaatctgaagaataatgtgttgcagttgcccttgtgtgaaaagacaatttcagtaaacatccaacgcaaccctaaagaagggttgctctgcgctagttctccggcctcctgctgccacgtcatctag

SEQ ID NO: 134652 - DNA, 9693 bp, synthetic construct
  misc_feature 1..9693: note = Description of Artificial Sequence: Synthetic coding sequence
  source 1..9693: mol_type = other DNA
atgcagtctagtcccagccccgcccatcctcagcttcctgtactgcagacccagatggttagcgacgggatgaccggttccaacccggtgtctcccgcttctagtagcagccctgcttcatctggtgcaggaggaatttccccacagcatatcgctcaggactccagcttagacggcccgcctggtcccccagacggggccactgtgcccctcgagggcttttccctgtcacaagcggccgatttagctaataaaggccccaagtgggagaaatctcacgctgagatcgcggaacaagccaaacacgaagccgagattgaaacacgaattgccgaattgcgtaaggagggattttggagcttgaagcgacttcccaaggtgcctgagccgcccagacccaagggccattgggattacctctgtgaggaaatgcagtggctgagtgcggactttgctcaggaacgccgctggaagcgaggagttgcccgaaaggtggtgcgaatggtcattagacaccacgaggagcaacgtcaaaaggaagaaagagccaggcgcgaggaacaggcaaaactgcgcagaatcgccagcacgatggctaaagacgttcgtcaattttggtcgaatgtggagaaggtagtgcagttcaagcagcagtcccgcttagaagagaaaaggaagaaggcgctggaccttcatcttgatttcatcgtgggtcagacagaaaaatactccgatttgctgtcacagtctttaaatcaacccttaaccagcagcaaggctggttcctccccgtgcctgggatctagctcagctgcttctagtccccctcccccagcgtcccgactagacgatgaggacggggactttcagccacaggaggatgaggaagaagatgacgaagagacaattgaggtcgaggaacaacaggaaggcaatgacgccgaagcccagcgacgggaaatcgaactactgcggcgagagggtgagctgcctttggaggagttgctgagatccctcccaccgcaactactggagggacctagtagcccttcccaaacccccagctctcatgattccgacacgagggacggtcccgaggaaggagctgaggaggagccccctcaagtattggaaatcaagccaccaccgagtgctgtcactcagcgcaacaaacagccgtggcacccagacgaagacgacgaagagtttaccgccaatgaggaggaagctgaagacgaggaggataccatcgctgcggaggaacagctggagggcgaagtcgaccacgccatggaattgtctgagctcgctagggagggcgagctcagtatggaggagcttctgcaacagtacgcaggggcctacgctcccggcagcgggtcgtccgaggacgaggacgaggacgaagtggatgcaaatagctccgattgcgaaccagagggcccggttgaagccgaggagccacctcaggaggattccagcagccagtcagattccgttgaggataggtcagaggacgaagaagatgagcattcagaggaggaggagacttctggctcttctgcctctgaagaaagtgaaagtgaggagagtgaggacgcccaatcccaaagtcaggcggatgaagaggaagaggatgacgacttcggcgtggagtatctgttagctagggacgaggaacagagtgaagccgacgcgggctcaggcccgcctactccaggtcccacgacccttggaccaaaaaaggagataaccgatatagcagcagccgcagagtccctccagccaaaaggctacacactggctactactcaggtgaagacccccattccactactgctccgcggccagctccgagagtatcagcatatcgggctggattggcttgtgactatgtatgagaaaaaactgaatggaattctggcagatgaaatggggctcggaaaaacaattcagacaatttccctgctggcgcatctggcatgcgagaaaggtaattggggcccacacctgattatcgtcccaacctcggtcatgctcaactgggagatggagcttaagcgctggtgcccgagtttcaaaatacttacatactacggcgctcagaaagaaagaaaactgaagcgccaaggctggacgaagccaaacgccttccacgtgtgcatcacgagctataaacttgtcctgcaggatcaccaggcattcagacggaaaaattggaggtacctgatcttggacgaggctcaaaacatcaagaattttaagagccaacgctggcagagtctcctgaacttcaactcacagagacgattgcttttgactggaacaccgctccagaactcactcatggaactctggagcctgatgcatttcctcatgcctcatgtgttccagtcgcaccgcgagtttaaagaatggttctcaaatcccctgactggcatgatcgaggggagccaggaatataacgaggggttagttaagaggctgcacaaggtgctgaggcccttcttactgcgccgcgtcaaagtcgacgtcgaaaaacaaatgccaaaaaagtacgagcatgttattcggtgccgactcagcaaaagacagcggtgcctgtatgatgattttatggcacagacaactactaaggagacccttgctacaggccattttatgtctgttataaatattttaatgcaactgcgaaaggtgtgtaaccacccaaatttgttcgaccctcgccccgtaacctctcctttcataacaccgggcatctgcttcagcaccgcctctttagtgcttcgcgctactgacgttcatcccctccagcgcatcgatatggggaggttcgacctcatagggttggagggtcgtgtctccagatacgaagccgatacctttctaccacgccatcgattgtctagacgagtgcttctggaagtcgcaacagcccccgacccacctccccgacccaaaccagtcaagatgaaagttaataggatgctccagcccgtaccaaagcaggagggtagaaccgttgtggtagtgaacaaccctcgcgcaccacttggccccgtgccagtgcgaccccctccagggcctgaattgtccgcccaaccaacgcccggccccgtgcctcaagttcttccagcctccctcatggtgagcgcgtcaccggccggtccaccactgattcccgccagccgtcctcctggcccagtgttgctgccacctttgcagccaaatagcggtagcttaccacaggttctcccatcccctcttggcgtccttagtggcacctccaggccccccaccccgaccctttccttgaagcccacaccgcctgcccctgtaaggctatcacctgctccacctcccgggtcatcatctctcctcaagcctctgactgttcctcccggctacacattcccacccgcagccgctacaacaactagtaccactaccgccacggcaaccacaaccgccgtccctgccccaaccccagcccctcagagactgattctctcaccggatatgcaagcccggctcccttccggagaggtagtctccatcgggcagcttgcttccctggcccagaggcctgtggctaacgccggcggcagcaagcctctcaccttccagattcaggggaacaagctgaccctgaccggtgcacaggtgagacagcttgcagtagggcagccacggcccctccagcgcaatgtggtacacctcgtgtcagcaggaggccagcaccacctgatcagtcagcctgcccacgtggcgctgatacaggctgtggcccccacgcccggccctacgcctgtatccgtgctgccttcgagcacaccatccacaactccagctccaacaggcttgtcattgccccttgcggccaatcaggtgccccccactatggttaataacacaggggtagtgaaaatcgtcgtccgacaggcaccccgagatggcctcactccggtgcccccactcgcgcctgctccacgtcctccgagttcaggattaccagctgtcctgaatccccggccgaccctgacgccagggagactccccacccctacgttggggacggctagagcacctatgcctacccccacattggttagaccgcttttgaagctagttcattcgcctagtccagaggtgagtgcttctgcaccgggcgctgcccctttgaccattagctccccacttcacgttccttccagcctgcctggccccgcttcatcccctatgcccatccctaactcatcgccattggcatctcccgtcagttccactgtcagtgtgcccctgtcctcatcattgcctatatcagtgccgactactctcccagctccggcctcagcacctctgaccattccgatctctgcccctctgacagtctctgcttcaggccctgctctgctgacaagtgtcacaccccctctggcccctgtcgtaccggcagccccaggcccgccctcgctggcgccttctggcgcgtcgccatcggcaagcgctctcacattgggcctggccacggcaccttctctgagtagttcccaaaccccgggacaccccctgctattggcgcccacaagcagtcatgtgcctgggctgaactctacagttgcgcctgcgtgttctccagtgttagtccccgctagtgcactcgcatccccattcccaagcgctcccaaccctgcacctgcccaggctagcctcctagctccggcaagctctgcatcacaggcgctggcaactcctctggccccaatggcagctccccaaacagccatcttggccccatctccagcacctcctctggcaccccttcctgtattggctccgtctcctggagctgctccggttctggccagtagccagacccctgtgccagttatggccccaagctctacaccaggcacgagtctggccagcgcttctccagtgccagcccctaccccggtcctggccccttctagcacccagacgatgctgcctgctcctgtcccctctccgcttccctctccagcgagcactcagacgctggctctggctccagcactcgctcccaccttaggtgggagtagccctagccagacgctcagcctgggcacgggcaaccctcagggccccttccccactcaaactttatccctcacccccgcctcatcccttgttccaacacccgcccaaacactttcccttgcccctggcccccccctaggccctactcagacgctgtctttggcccccgcgcctccccttgccccagcttcaccagtggggcctgcacccgcgcatacccttaccctggcgcccgcttcttcttctgcttctttgttggctcctgcaagcgtgcagacactaacgctgtccccagctcccgtccctacactcggcccggcagctgcccagaccttggcattggccccggcgagcacccagtccccagcgagccaggcctcttcgctggttgtttccgcttcaggtgcagcccccctgcctgtgaccatggtgtcacgactgcctgtctccaaagatgaacctgacactctgacacttcgcagtggccccccctcacctccttccaccgccacttcttttggcgggccaaggccacgcaggcagccccctcctccacctcggagtccattttatctggattccctggaggagaaaagaaaaagacagagatccgaaagactcgagcgaatctttcagttgagcgaagcccacggggccctggcgcctgtgtacggaacggaagtgctcgacttctgcaccctgcctcagcctgtcgcaagccctatcggcccacgatccccagggccctcccatcctacattttggacctataccgaggccgctcaccgcgccgttctgttcccccaacaacgcctcgaccagctgtccgaaataattgagagattcatcttcgtgatgcctcctgtcgaggcccccccaccttccctgcatgcttgccatccaccaccctggctggcacctagacaggccgccttccaggagcagttagcttctgagctttggcccagagctagacccttgcaccgaatcgtatgcaatatgcggactcagttccccgacctccgcttaatccagtatgattgcggcaaactgcagaccctggctgtgctgttgcgtcagctgaaagccgagggacatcgcgtcctgatctttacgcagatgaccaggatgctggacgtgcttgaacagttccttacctatcacggtcacctctacctaagattggatggatccacacgggtagagcagcggcaagctctcatggagaggtttaacgctgacaagcgaattttctgtttcatcctgtcaacccgatccggaggcgttggggtcaacttgacaggcgccgacaccgtggtgttttacgattctgactggaaccccacaatggacgcccaggcacaagatcgctgtcatcgaattggccaaacacgggacgtccacatatatcgtctcatctctgaacgtactgttgaggaaaacatcttgaaaaaggcgaatcagaagcggatgctgggagatatggctattgagggcgggaactttacaaccgcgtattttaaacaacagaccatcagagagttgttcgatatgcctctggaagagccttcctcaagcagcgtccccagtgccccagaggaggaggaggaaaccgtcgccagcaagcagacacacatcttggagcaggccctttgtcgggccgaagacgaggaggatattagagccgcaactcaggcgaaggctgagcaggtggccgagctcgcggagtttaatgagaacgatggctttcctgccggggagggagaagaagccggccggccaggggcggaggacgaggaaatgtccagagctgaacaggagatagccgctttagttgaacagctgactccaatagagagatacgctatgaaatttctggaagctagtctcgaagaggttagtcgggaggagcttaagcaggctgaggagcaggtggaggccgctagaaaagacctggatcaggccaaagaggaggtcttccgcttgccccaagaggaggaggagggcccaggggctggagacgagtcatcatgtgggactgggggagggactcaccgacggtccaagaaagcgaaggcaccagaaaggcccgggactcgagtttcagaaaggttgcgtggggctcgggcagagacacaaggggcaaatcacacaccagtcattagcgctcatcagaccaggtccacaacgacaccacctagatgttcaccagcgagggaacgtgtgccaagacctgctccccgacctcggcctaccccagcatccgctccagcagctatacctgccctggtgccggtgccagtaagcgcaccagttccaatcagtgcccccaacccaattacaatactgcctgttcacatcctgccttcacccccaccccccagccagattcctccttgctccagtccagcgtgtacacctccacctgcatgtactcctccgccagcccataccccaccacctgcccaaacctgtctcgtgacaccttcaagtcctcttctcctcggtcctccatccgtgcccatcagcgcatcagtgaccaacctccctctcggactccgtccggaggccgagttatgcgcacaagccctggctagtcccgaaagccttgaactggcttcagtggcttcttccgagacatcgagcttgagccttgtgccccccaaggacctcctgccggtcgctgtcgagatccttccggtcagcgaaaaaaacctatcactcaccccatcggcaccatcactgactctggaggccggcagcatccccaacggacaggagcaggaagcgccagattccgccgaagggaccacattgactgtgctccccgagggggaagagctcccgttatgtgtctcggaatccaacggcctggagctccccccctccgctgccagcgatgaacctcttcaggagcccctcgaagccgaccgcacaagcgaagaactgacagaggccaaaacacctacctcctcaccagagaagccacaagaactggtcacagccgaggttgcagccccctcgaccagctcatctgccacatcaagtcctgaaggtcccagccccgctagaccccctcggcgtagaacttctgctgacgtggaaatcaggggtcagggtacaggccgccctgggcagccgccaggccccaaggtcctccggaaactgcctggtagactggtaacggtcgtggaggagaaagagctggtaagaaggaggagacagcagcggggcgctgcatcaacgctagtccctggggtctccgaaacctctgcctctcccgggtcaccaagtgtgcggtcaatgagtgggccggaaagctcgccaccgatcggcggcccatgcgaggcagcccccagctccagtctcccgacgcctccacagcagcccttcattgcccggcgacacatagaactcggcgtcacgggcgggggttccccagagaacggggatggggcgttactggctatcaccccccctgctgttaagcggcgccgcggccgcccgccaaaaaagaacaggtcacctgctgacgcagggcggggcgtagacgaagctccgtcatctaccttaaaaggcaagacgaacggtgctgaccccgttcccgggccagagaccctcattgtggccgatcctgtcctggagcctcagttaatcccaggcccacagcccctggggcctcagccagtgcacagacctaatccgctactgtcccctgtcgagaagcgtcgccggggaagacctcctaaagcgcgagatctacccatccctggaaccatttccagcgctggagacgggaactcagagtccagaacacagcctccgccacacccgtccccactcacccctcttccccctctgctcgtgtgccccacggcaaccgttgcaaacaccgtcacaaccgtaactattagcacatctccacccaagaggaaaagagggcgcccacctaagaatcccccctccccacgcccctcccagctcccagtgttggatagggatagtacatctgttctcgaaagctgcggactcgggcggcggcggcagccccagggtcagggcgagtccgaaggctcctcctcagatgaagacggatctagacccttgactaggctcgctcgtctgagactggaagctgagggcatgcggggccggaaatccggggggtccatggtggtggccgttattcaagatgatctcgacctggcggattcaggcccaggtggcctcgaactgacccccccagtagtttctctgacacccaaactcaggtctaccagactcagacccggctctctagtgccccccctcgagacagaaaagctgccacgcaagagagcgggtgctccagtggggggttcccctggtctggccaagaggggccggctgcagcccccgagtcccttaggacccgagggctctgtcgaggaatccgaagccgaggcctccggcgaagaagaagagggcgatgggactccaagacggcggcccggccctcggagattggtcggaacgacaaatcagggcgaccagagaatcctgcggtcaagcgcacctccttcactggcagggcccgccgtgagccatcgtggtcgcaaggccaagacttag

SEQ ID NO: 134653 - DNA, 9219 bp, synthetic construct
  misc_feature 1..9219: note = Description of Artificial Sequence: Synthetic coding sequence
  source 1..9219: mol_type = other DNA
atgcagagtagtccctccccagcccatcctcagctaccggtgttgcagacgcaaatggtctccgacgggatgactggatccaaccctgtctcaccagcatcctcttcctccccagcttccagcggtgcaggcggaattagcccacaacacatcgcccaagacagctcgctggatggcccgcctggtcctcctgatggcgcaacggttcctttggaaggcttcagcctgtcccaggccgccgaccttgctaacaagggccctaagtgggagaagtctcacgctgaaattgctgaacaggccaaacatgaagcagaaatcgagacacgcattgctgagctgcgcaaagaggggttttggtcactcaagagacttcccaaagtgccagagccccctcgcccaaaagggcattgggattatctgtgcgaggaaatgcagtggctgtccgcagatttcgcccaggagagacgttggaagcgcggtgtcgctaggaaggtggttcgcatggttattaggcaccacgaagaacaacggcagaaggaggagcgcgctaggcgtgaagaacaagccaaactgcgtaggatagcctccaccatggcaaaggacgtgagacagttctggtctaatgtcgaaaaggtagtacagtttaagcaacagagtcggctagaagagaaacggaaaaaagcccttgacttgcaccttgattttatagtgggccagactgaaaagtatagcgatctgctgagccaatctctcaatcagcctctcactagtagtaaggccggcagctctccatgtttggggagttcttcggccgcatcctccccgccacctcccgcttcacgcctggatgacgaagacggagatttccaaccacaagaagatgaagaagaggacgacgaagaaacaattgaggttgaggagcaacaggaagggaacgatgcagaagcacagaggcgggagatcgaactgctccgcagagaaggcgagctgccactcgaagagttgctgaggagtctgcccccccagttgctggagggcccgtcgtcccctagtcaaacccccagcagccatgactccgatacgcgcgacgggcccgaagagggtgccgaggaggagcctcctcaggtattggagattaagcctcccccatccgcagtgacccaacgcaacaagcagccctggcaccctgatgaagatgacgaagagtttacagctaatgaagaggaggctgaggacgaggaggacacgatagcggccgaggaacagctcgagggcgaagtggaccacgcaatggagttaagcgagctagcacgggagggagaactgtccatggaagaactcctgcagcagtatgcaggggcctacgccccaggtagtggctctagcgaagatgaggatgaggacgaggtggacgccaacagctccgactgcgaaccagagggtcctgtcgaagctgaggagccaccccaagaggattcaagctcgcagagcgatagcgtggaggataggtcagaagacgaggaggacgaacatagcgaagaagaggaaaccagtggttctagtgcaagcgaagaatcagaatccgaggaatctgaagacgcacagagccagtcacaggcagacgaggaggaggaggatgatgatttcggggtagagtacctgctagcccgggacgaggagcagtccgaagccgacgctggtagcgggcctcccacccctggcccaactactctcggacctaagaaagagattactgacatcgccgccgcagccgagagccttcagccaaaagggtacacacttgcaactacccaggtgaagaccccaatcccactgctactgagagggcagctcagggaataccagcacattggcctggactggctggtcacaatgtatgaaaaaaaactgaacggtatcctggctgacgagatggggcttggcaagaccatccaaaccatctccctacttgcccatttggcttgcgagaagggcaactgggggcctcacctgattattgttcctacctccgtcatgctaaactgggagatggaactcaaaaggtggtgcccttctttcaaaatcctgacctactacggcgcacagaaagagaggaagctgaaaagacaaggatggacaaaaccaaatgcattccacgtgtgtattacatcatacaaattagtcctgcaggaccaccaagccttccgacggaaaaactggaggtacctgatcttggatgaggcacaaaacatcaagaatttcaagtcccagcggtggcagagtctactgaactttaattcccagagaagattgttgcttaccgggaccccgctgcagaactccttgatggaactgtggagcctcatgcactttttgatgccccatgtttttcagagccaccgcgaatttaaagaatggttttccaaccccctcaccggcatgatcgaaggctcccaggaatacaatgaaggcttggtgaagcgccttcacaaggtgctgagacccttcctgctaaggcgcgttaaagtggatgtggagaagcagatgcctaaaaagtacgaacacgtgatccgttgcaggctctcaaagagacaacgctgtttatatgacgactttatggcccagaccacaaccaaggaaaccctcgcgacaggccacttcatgtccgttatcaatatacttatgcagctgaggaaagtgtgtaaccatcctaatttgtttgacccaaggcccgtgacctcgccattcattactcccgggatatgctttagtactgcaagtctggttctcagagccacagacgtccaccctctgcaaagaatcgacatgggccgctttgatcttattggcctggaaggccgcgtctccaggtacgaagctgatacttttctccctagacacaggctaagccggagagttctactggaagtcgcaacggcgccggacccacctcctaggcccaaaccagtaaaaatgaaagtaaacagaatgttacagccagtgcctaagcaggaagggagaacagtcgtggtcgtgaacaaccctagggcaccacttggacctgtccccgtgagacctcctcctggccctgaactgtctgctcagcctacaccgggaccagtgccacaggtgctgcccgcatcactgatggtgagcgccagccctgctggacctcctctcattcctgccagcagaccccctggacccgttctgctcccacccctgcagcccaattccggctccttgcctcaagcgggcgaggtggtgagtatcggccagttggccagcttggcccaacgtcccgtcgccaacgcaggggggtccaagcctctaacttttcagatccagggtaataagctaacgctgactggcgcccaagtccggcagttggccgtgggccagccacgaccactccagatgccccctaccatggttaacaataccggggtggtgaagatagtagtcagacaggcaccgcgggacggcctgaccccagttcccccgctcgctccagctccccggcccccttcgtcggggctgcccgcagttctaaatccacggcccaccttgacccctggaaggcttcctacgcccacattaggcaccgcgcgcgcaccgatgccaacacccaccttggtccgtccactcctgaagcttgttcactccccctctcctgaggtatccgccagcgcccctggagctgcccccctgacaatcagttcccctctacatgttccctcaagcctgcccgggcctgcaagcagtcccatgccaatcccgaacagctctccactagcatcacctgtatcatcaacagtgagcgtgccactgtcctcttctctgcctatttccgtccctacaacactgccagctcctgccagtgcgcctctgactattccaatcagcgcccccctgacagtaagtgcgtcgggacctgccctcttgacttctgtcactccccccctcgctccggttgtacctgccgctcctggacccccttcactggctccttcaggtgcaagcccaagtgcctctgctctgaccctcgggttagccactgccccctccctaagtagttcccaaactcccggacaccctctcctcctggctcccacaagctctcacgttccggggctgaactcaacagtggcccctgcttgtagcccagtgttggtaccagctagtgcgttggcatccccttttccatcagctccaaatcccgcacctgctcaggcctcccttttagcaccagcctctagcgctagccaagcccttgccacaccccttgcaccaatggccgctccccagacagcaatactggccccatcacccgccccacccttggcccctttgcctgtccttgccccatcccctggggcggctcctgtcctggcatcaagtcaaaccccagttccagtgatggcaccaagttcaactcccggtaccagccttgcatctgcttctccggtgcccgcgccaaccccagtgctggctcccagctcgactcagacaatgttacctgccccggttccctcgccactcccctccccagcctcaacccagactctggccctggctccggccctggcgccgacccttggcggttcctcccccagtcagacgctctccctcggcacagggaatcctcagggacccttcccaacccagactctcagcttaactcccgcctcaagcttagtacccacaccggcgcaaacactctcccttgcccctggaccacccctgggccccacccaaaccctcagtcttgcaccagcacctccactcgcacccgcatcccccgttggccccgcgcctgcccacacacttactctggcccccgccagctcttcagcaagtctgttagcacccgcctccgtgcagaccctgaccctttccccggcccccgttcctacgctgggccccgcagccgcgcaaacactggcactcgctcctgcctctacgcaatccccagcaagtcaagccagctctttagtagtaagcgccagtggagctgctccgctgcccgtgacgatggtgtctcgcctgccagtgagcaaagacgagcctgacacgttgactctccgctcgggcccccctagtcccccaagcaccgccacttcttttggtggaccccggccaagaaggcagcctccgccgcccccccgctcacctttctacctggactccctagaggagaaacgaaaacgacagagatctgaacgcctggagaggatcttccagcttagtgaggcacatggagctctggctccggtatacgggaccgaggtgttggatttctgcactttaccacagccggttgcatcccctatcggacccaggagccctgggccttcccatcctacgttttggacatatactgaagcagcccaccgggcggtgctgttcccccagcaaagactcgatcagctgtcggagatcattgaacgctttatcttcgtgatgcctcctgtggaagcgcccccgccttctctgcatgcctgccaccctcctccatggttggcacctagacaagcagccttccaggaacagctggcttccgagctgtggccgcgcgcgcggccgctgcatcggatcgtgtgtaatatgcgaacccagttccctgatctccggcttatccagtatgattgtggaaagcttcaaactctggccgttctcttgaggcaactcaaggctgagggacatagagtgctcatttttacacagatgactcgaatgctggacgttctcgaacagtttctgacttatcacggtcacctatacctgcgactggacgggagtacccgcgtggagcagaggcaggcgctcatggaacgattcaatgcagacaagcggatcttctgcttcattctgagcacacggtccggcggagtcggagttaacctgaccggggccgacacggtggtgttctatgacagcgactggaacccaaccatggacgcccaggcacaggatcgctgtcataggataggccaaactcgggacgttcacatatacaggttgatctcagagcgaacagtggaggaaaacatcctgaagaaagccaaccagaaaagaatgttaggcgatatggccattgaaggtgggaattttacaactgcctacttcaagcagcaaactattcgtgagcttttcgacatgccattggaagagccttcgtcaagctctgttccttctgcaccggaggaagaagaggaaacagttgcgagcaagcaaacacatatccttgaacaagccctctgtagagccgaggacgaggaggacatccgggccgcgacccaggctaaggcagagcaggtggccgagctggctgaattcaatgaaaacgacggatttcccgcaggtgaaggcgaagaggccggcagacccggcgcagaggacgaagaaatgagtcgcgccgagcaggagattgctgcactggtcgagcagttgacacctatagagcgctacgcaatgaagttccttgaagcatctcttgaagaggtatcaagggaggaacttaagcaggccgaggagcaggttgaggctgcccggaaggacctcgatcaggccaaggaggaagtattccggttgccgcaggaagaagaagaaggtcccggcgcgggagacgagagctcctgtgggacaggtggtggcacccataggcgcagcaaaaaagcaaaggctccagagcgtcctggcactagagtcagcgagaggctccgaggcgctcgcgccgaaacacagggtgccaaccatacacctgtcatctccgcacaccagaccagaagtacaactacaccccctaggtgctcgcctgccagggagagagtcccccggcccgcccctaggccgaggcccacgcctgcttccgcacctgcagccattccagccctggttccggtaccagtctctgctcctgttccaattagtgcccctaaccccataaccattctcccagtacacattctgccatctcccccacccccatctcagatccctccttgctcctctccagcttgcacccctcctcccgcctgcacccctccgccggcacacactcctccccccgctcagacttgcctggtgacaccgagcagcccactgttactaggtcctccctctgtccccatcagtgcatctgtcaccaatctgccactggggttgcgcccagaagctgagttgtgcgcccaagccctcgcaagccctgagtctttagagttagcctctgtagctagttcagaaacttcctcactgagccttgtcccccctaaagacctgctgcctgtggccgtggagatcctgcctgtaagcgaaaaaaacctgtcccttactcccagcgcccctagcctcacccttgaggctgggtccatccccaatggccaggaacaggaggcccctgactccgccgagggcactactctgactgttctgccggaaggcgaagaattgcccctctgcgtctctgaatccaatggcctcgaattgccgccctccgccgccagtgacgagccactgcaagaaccattagaagcagaccgcacttcagaggaacttaccgaggccaaaaccccaacaagcagccccgaaaaacctcaggagttagttacggcggaggtggccgctcctagtacgtcaagctctgctacctcctctccagaggggccctccccggcaagaccgcctcgtcggaggacgagtgccgatgtggagataaggggacaaggaacgggcagaccgggccagcctcctggtcccaaggtgctgagaaaacttcctgggagactcgtgactgtagtggaggagaaggagctcgtccgcaggcggcggcagcagaggggggccgcctccaccttggtgcctggggtgtccgaaaccagtgcatcccccggctctccttccgtcagaagtatgagtgggccagagtcctcccctcccatcggtggaccatgcgaggccgctccatcctccagtctccccacaccacctcagcaaccattcatcgcgcgcagacatattgaacttggggtgactggcggcgggtctccagagaatggcgatggcgcactgcttgccattacgccacccgccgtcaaaaggagacgcgggagacctcccaagaagaacagaagccctgctgatgcgggcaggggcgttgacgaggcgccgagctctactctgaagggaaagacaaatggagcagaccctgttcccggcccagaaacgttgattgtggcagatccggtgttggaaccgcagcttatcccaggtccacagccactcgggccacagcctgttcacagaccaaatccccttctttccccggttgagaagcgccgcagaggtaggccgccaaaggcccgtgacctgcccatccctggaaccatctccagcgctggcgatggaaactccgagtccagaacccagcctccccctcatccatcacccctgacgccactgcctcccctgttagtgtgccctacagctactgtcgctaacacagtgaccacggtcaccatctcaacaagcccccccaaacgaaaacggggtagaccaccgaagaatcctccttctcccagaccctcccagctacccgtcctggatcgagacagcacatcagtattggaaagctgtggcctgggcaggcgcagacagccccagggacagggcgagtcggagggatcatcatcagacgaagatgggtctaggccgctaacaagactcgcaagactgcggctggaggctgaaggaatgcgcggtcgaaagagcgggggctcgatggtggtagctgtgattcaggacgacttagatctggctgactctggaccaggaggtctcgagctgacaccgccggtcgtgtccctcacccctaagctcaggtcgactaggctcaggcccggaagtctcgttcctccgttagagactgagaaactgccacgaaagagggccggcgcgcccgtgggagggtctccaggtctggccaaacgggggagactgcaacccccctcccctctggggcctgaaggatcggtggaagagagcgaggccgaggctagcggcgaagaggaggaaggagacggcactccacgtaggcgccctggcccaaggcggctggtgggcactaccaaccagggtgatcagcgaatattgcggtcatcagctccgccatcactcgccggccctgctgtgtctcacagggggcggaaggccaaaacatag

SEQ ID NO: 134654 - DNA, 9507 bp, synthetic construct
  misc_feature 1..9507: note = Description of Artificial Sequence: Synthetic coding sequence
  source 1..9507: mol_type = other DNA
atgcagagtagcccgagccccgctcacccacagcttccggtgctacagacccagatggtgtccgacggaatgaccggatctaacccagtgagccctgcctccagcagttctccagcttctagcggcgccggcggcatatctccccagcacatcgctcaggattctagcctcgatggccctcccggacctcctgatggagctactgtgcctctcgaagggttctcattgtcgcaggccgccgacctggctaacaagggcccgaagtgggaaaaaagccatgcagaaatcgccgaacaggctaagcacgaagctgaaatcgaaacccggatagccgagctgcggaaggaaggattctggtccttaaaacgactgcctaaggttcctgagcctcctcggcccaagggacattgggattatctatgtgaggagatgcagtggctgtctgcagattttgctcaggagcgacggtggaaaagaggcgtagctcgaaaggtggtgcgtatggtaattcggcatcatgaggaacagcggcaaaaagaagagcgggcacggagagaggagcaggccaaacttcgccgcatcgcatcaacaatggccaaagacgtgcgccaattctggtcaaacgtggaaaaggtggtgcagtttaaacagcagagccggctggaagagaagagaaagaaggcgctcgaccttcatcttgacttcatagttggccagacagagaagtattcggatctcctgtcccagagccttaatcagccgttaacatccagcaaggcgggatcttccccgtgcttgggttccagttccgcagcctctagtcctccgccccccgccagccgcctggatgacgaagacggagatttccaaccccaggaagatgaggaagaggatgacgaggaaaccattgaagtggaggagcagcaggaaggtaatgacgcagaggcgcagcgtagagagatcgaactgctacggcgtgaaggtgagctgcccttagaagaactcttgcgctctctccccccacagctactcgagggaccatcaagcccatcacagaccccctcctcacatgattctgacacaagggacggacccgaggagggggccgaggaggagccaccacaagtcctcgaaattaaaccccccccctctgcggtgacccagcggaacaaacaaccctggcaccctgatgaagacgacgaggaattcaccgccaacgaagaagaagctgaagacgaggaggacacaattgccgccgaggaacaacttgagggggaagtcgatcacgccatggagctgtcagagctcgcccgcgagggggagctaagcatggaggagctcctccagcagtacgcgggagcatacgctcctggtagcggctcttctgaggacgaagatgaggacgaagtggacgccaactcctcggattgtgagcccgaagggcccgttgaggccgaggagcctccacaggaggattcttccagtcagtctgacagtgtggaagacagatcagaagatgaggaagacgagcactccgaagaggaggagacctcaggatcctcagcaagtgaggagagcgaatctgaagaatcagaggatgctcagtcccagagtcaggcagatgaagaggaggaagacgacgatttcggtgtggagtaccttctggctcgcgacgaggaacagtctgaggctgatgctggatccgggccccccacccctggtcctaccaccctgggacccaagaaggagatcactgacatagccgccgcagctgagagcctccagcctaaaggatacaccctcgccacaacacaagtcaagacccctatcccactccttcttaggggtcagctgagagaataccagcacattggtttagattggctcgtcaccatgtatgagaaaaaactcaacggaattctcgcagacgaaatgggactcggcaaaacgattcaaacgatttcactgctagcccaccttgcgtgcgagaaaggcaactgggggccccacctaatcatcgtccctacatcagttatgcttaattgggagatggagctgaagcgctggtgcccatccttcaagatcctcacatattacggagcgcaaaaggagcgcaaactgaaaagacagggctggaccaagccaaacgcttttcatgtgtgtatcacgtcatacaaattggttctgcaggatcatcaggctttcagacggaagaattggagatatttaatactggacgaggcacagaacattaagaacttcaagtcacagcgctggcagagtttgctgaatttcaactctcagcgaaggttgctgctcacaggaacccccctccagaactccttaatggaattgtggagcctgatgcacttccttatgccgcacgtcttccagtcccaccgtgagttcaaggaatggttctcaaacccgcttaccgggatgatcgaagggtctcaggagtataatgagggcctggttaagcgcttgcacaaggttcttcgacctttcctgcttagacgagttaaggttgacgtcgaaaagcagatgccaaaaaaatacgaacatgtcatccggtgtagactgtcaaagaggcagaggtgcctctacgatgacttcatggcccagacaacgacaaaagagactcttgcaaccggccattttatgagcgtaataaacattttaatgcaactgcgaaaggtttgtaatcaccccaacctgtttgatcctagaccagtgacctcacccttcattactcctgggatctgcttttctactgccagcctggtgctgcgtgccactgatgtacacccattgcagaggattgatatgggcagatttgacctcatcgggctggaagggagggttagcagatacgaggcagatacctttctgccccgacatagacttagccggcgtgtcttgctggaggtcgcgaccgctcctgatcccccccccagaccaaaacccgtgaaaatgaaggtgaaccgaatgctgcagccagtccctaaacaagagggaaggaccgtcgttgtggtgaacaatccccgggctcccttgggccctgtaccggtgcggcctcctcctgggccggagctgtctgcccagcctacccccgggcccgtgccgcaggtgctgcccgcctcactgatggttagtgcttctcccgctggcccaccactcattcccgcaagccgccccccaggacccgttctgctcccccctctccagcctaacagtgggtccctccctcaggtgctgccttctccactgggcgtgttgtcaggcacttcccggccccccactccaactcttagtctgaagccaaccccccccgcacctgtgagactaagccctgcgcctccaccgggttcctcctccttgctgaagccattgaccgtgcctccaggttatacgtttccacccgctgctgctacaaccactagcaccacgaccgcaaccgccactacaacggcagtccctgccccaaccccagccccccagcgtctcatcctgtcacccgacatgcaggcaaggctgccttcaggagaagtcgtctccattggccagctggctagccttgctcagagaccagtagctaacgcaggcggatcaaaaccactaaccttccaaattcaaggtaacaaacttacattgactggagcccaggttaggcagctagcagtcgggcagccaagaccgctgcaaatgccccctacaatggttaacaacacaggtgtagtcaagatcgtggtcaggcaggcgcctagggacggactcacaccggtgcctcctctagctcccgcccctaggcctccctctagtggcctgcctgcagttctgaatcctcgtcctacgctgacccctggtcgcctgccaacgcccacgcttggaactgccagagcccctatgcccactcctactctggttcggcctttactgaaactggttcatagcccttcgccagaggtgtcggccagtgcacccggagcagcccccctcaccatctcctctccgctgcatgtccccagctcactcccaggacccgcctcttctcctatgcctatccctaattcaagtcccctcgcatctcctgtgagctccactgtatccgtacccctgtcatcaagtctccctatatcagttcctacaactctccctgctcccgccagcgctcccctgacaattcccattagcgcgccccttacagtgtcagcttcagggcctgcactgttgacttccgtgacaccacccctggctcccgtagtgcctgcggcacccggaccaccgagcctagcccctagcggggcgtcaccatccgcatcagccctgacactggggcttgcaacagcaccgtccctgagttcctcccagacacctgggcaccctctgctcctcgctcccacgtcatcccatgtccccggtctcaatagcacggttgcccccgcatgctctcccgtgctcgtgccagcctctgcgctcgcctcccccttcccatccgcacctaacccagcgccggcccaggcctcactgctcgcgcccgcctcatcagccagccaggcactggctacacccctagcacctatggcagcaccgcagactgccattttggcaccatcacccgcaccacccttggccccactccccgtactcgccccgtcccctggcgcagcgccggttttggcttcatcacaaacccctgttcctgttatggcacccagtagtacacccgggacctccttggcttctgcctctcctgtgccagctcccacacctgtcctggctccttcatccactcagacaatgcttccagcgcccgtgccttcccctttaccgagcccagcatcaacacaaacactggctttagctcctgcccttgcgcccaccctgggaggaagctctccaagccaaacactttcactgggaaccggaaacccccaaggacctttccctacccagaccctgtctcttacccccgcctcaagtctcgtcccaacccctgcacagaccctgagcctggcgcccgggccaccactcggcccaactcaaaccttgtccttggcacctgcaccgcctcttgccccagcttcccccgtggggccagcccccgctcataccctgacattggctccagcctcctcaagcgcttcgctgcttgcccccgcttctgttcagacactgactctcagcccagctccggtccctacccttggaccggccgccgcccagacccttgccctggctcccgcttcgacacagtctccggccagccaggcatccagtcttgtggtgtcggcttcaggcgcagctccactgccagttaccatggtgtcacgcctgccggttagtaaagacgaaccggacacgttgacccttcgttcagggcctccatcccccccgagcactgcaacgtcttttggaggaccccgcccacggcggcagcccccgccccccccgcgatcccctttctacctggattccctcgaagagaagcgcaaaaggcagagaagcgagcggttggaaagaatttttcagttgtctgaagcccatggagctctggcaccagtgtatggcacagaggtactcgacttttgtactctgcctcagccagtggccagccctatcggaccccgttcccccgggccaagccatcccacattctggacttatactgaagccgcccatcgggccgttttgtttccccagcagcggctggatcaactcagcgagattattgaacggtttatattcgtgatgcctcccgttgaagcgccccccccatcactccatgcgtgtcatccccccccgtggcttgcgccccgacaggcagcctttcaagagcagttggccagcgagctctggcctcgcgcacggccattgcataggatcgtatgcaacatgcggacacaatttcccgacctgagactgattcagtacgactgtggtaaattgcagacccttgccgttctcctccgccaactgaaggccgaagggcatagagtcttgatattcactcagatgactagaatgctggacgtgctggaacaattcctgacatatcacggtcacctctacctgagactagacggttctacaagggtggagcaacgacaggccctgatggaaagatttaatgcggacaaacgcattttttgcttcatccttagtactagatctggcggcgtgggcgtcaacttgactggagccgacactgtagttttctacgactctgactggaacccaaccatggatgcccaagcccaggaccgctgccaccgtataggacagacaagagacgttcacatctaccgactgatctcagaaagaacggtggaagagaatattctgaagaaggccaatcagaaaagaatgcttggtgatatggcgatcgagggggggaactttaccaccgcatactttaagcagcagaccatccgcgaactattcgatatgccattggaggagcccagctctagctctgtgcctagcgcaccagaggaggaggaggagactgttgcatctaagcagacacatatccttgagcaggccctgtgtcgcgcggaggatgaagaggacattcgtgctgccacgcaggctaaagccgagcaggtcgcagagctggctgagttcaacgagaacgacggttttcctgcaggagagggcgaggaagcgggaaggccgggcgctgaggatgaggagatgtcccgcgcagagcaggaaatcgcggccctagtggaacagcttacccccatcgagaggtacgctatgaagttcctagaagcgtcactggaggaggtgagccgcgaggagctgaagcaggcagaggagcaggtggaggccgccagaaaggatctggatcaggctaaggaggaggttttccgcctgcctcaggaggaggaggaaggacctggggcgggcgatgagagtagctgcggcaccggaggaggcacgcaccgccggtcaaaaaaggccaaagctccagaaaggccaggcaccagagtctcggaacggttacgaggcgcacgcgctgagactcagggcgcaaaccatactcctgttattagtgctcaccagacacggtcaactactactcctcctcgctgttcgcccgcccgggaacgggtcccacgtcctgccccaagacctcgcccaactccggcttccgctcctgcagcaattcccgccctggtcccagtgccagtgtcagctcccgtgcctatctctgcccctaacccgattacaattctgccggtccacatcctccctagtcccccgccaccaagccaaattccgccatgctcctcgcccgcgtgcactcctcccccagcctgcaccccccctcccgctcacacaccaccgccagctcagacatgcttggtgaccccttcgtctcctctgttgctggggccaccttccgtgcccatctctgcaagtgtgactaacttgccactgggcctaaggcccgaagccgagctctgcgcgcaggccctcgccagccctgagtctcttgaactggcgtctgtggcgtcatcggagacatcctccctgagtctagtcccacccaaggacctgctgcctgtggccgtcgaaatcctgcccgtgtctgaaaaaaacctatctctgactccgtccgcacctagtctaactctggaggcaggcagtatacccaacggtcaggagcaggaggctcccgactcggccgagggtacaacgttaaccgttctccctgagggagaggagctcccgctgtgcgtatccgagagtaatggactggagcttcccccttccgccgcctcagatgaaccgctccaagaaccactagaggccgataggacatccgaagagcttacagaggccaagactccgacgtcctcccccgagaagccccaggagctcgtgaccgctgaggtggcagctccttcaaccagttctagtgccacatcctccccggagggacccagccccgccagaccccctagacggaggactagcgccgacgtggaaatcaggggtcaggggacgggtcggccaggacaaccaccaggcccaaaggtgcttcgtaagctgcccggtcgactggtcaccgtggtcgaggaaaaagagcttgttcggaggcgccgccagcaacgcggcgcggcatccacactggtccctggggtttctgagacttcagcctctccagggagcccaagcgtgaggtccatgagcgggccagagtcatcccccccaatcggtgggccttgtgaagcggccccttcctcatctctgccgacacctccccaacagccatttatcgccagacgtcacatcgagttaggcgtgactggaggaggtagtcccgagaacggagacggagctctcctggccataacgccccccgcggtcaaacgtcgccgggggagaccaccgaaaaagaaccgctcgccagctgatgcagggagaggcgtggacgaggcacccagcagcaccctgaagggcaagacaaacggcgccgaccccgtgcctggaccagaaaccctgatagttgccgaccccgttctagaaccacagctgattcctggtccccagcccctgggcccccagccggtccacaggcctaatcccctgctgtcaccagtggagaaacgccggagagggaggccacctaaggccagagacctgccaatcccggggaccattagcagcgctggggacggaaatagtgaaagtcggacacagccgccccctcatccgagccccttgacacccttgccgccactccttgtttgccccacagccacagttgctaacactgtgaccacggtaaccatcagcacctccccaccaaagaggaagagaggacgaccgcccaaaaacccaccaagtccgcggccctcacagcttccagtgttggaccgcgattcaaccagcgtgctcgaatcctgtgggttggggaggcgcagacagcctcagggacagggagagtccgaaggatcaagctctgacgaggacggcagccggcccctcactcgactcgctcggctgagacttgaagccgaaggcatgcgggggcgaaagtccggcgggtctatggtcgtagctgtaattcaggacgatctggatctcgcggattctggacctgggggtctggagctgacccctccggtagtgtcacttactcctaaactgagatccactcgcctgcggcccggctcacttgtgccccctctggagactgagaagctgcctcgcaaaagagcaggagcccctgtcggaggctctcccggtctggctaagcgcggacggttgcagccaccctcccctttgggcccggaaggctcagtggaggaatctgaggctgaagcttccggagaggaggaggaaggtgacggcacgcccagacgaagacccggccctagacggctggttggcactaccaatcagggtgaccagcgtatcctacgttccagtgcaccaccatcacttgcgggacccgccgtcagccaccgcggccgcaaggcgaaaacgtag

SEQ ID NO: 134655 - DNA, 180 bp, synthetic construct
  misc_feature 1..180: note = Description of Artificial Sequence: Synthetic coding sequence
  source 1..180: mol_type = other DNA
atgcagagcagccctagtcctgcccacccccagctgcctgtccttcaaacccaaatggtctccgacggaatgactggctccaacccagtctcaccagcaagtagcagtagccccgcctcaagtggagcgggaggcatatccccacaacatattgcgcaagatagtagtctagacggatag

SEQ ID NO: 134656 - DNA, 774 bp, synthetic construct
  misc_feature 1..774: note = Description of Artificial Sequence: Synthetic coding sequence
  source 1..774: mol_type = other DNA
atgcatcgcagaggcgtcggcgctggcgcaatcgccaaaaagaaattggcagaagcgaaatacaaggaacgcggcacggtcctggccgaggatcagctcgctcagatgagcaaacagcttgatatgtttaaaaccaacctggaagagttcgcttccaaacacaagcaggaaattcggaaaaacccagagttcagggttcagtttcaggatatgtgtgcaaccataggtgtagatcctttggcctccggaaaggggttctggtccgagatgctgggagtcggtgatttctactacgagttgggggtgcaaatcatcgaagtctgtctcgcactgaagcatagaaatggcgggctaattaccctcgaagaactgcatcagcaggtcctgaagggacgggggaagtttgcccaggacgtgtctcaggacgacttgatacgcgctattaagaagctcaaagcgctgggaaccgggttcggcatcatacctgtgggaggaacttacctaattcagtctgtgcccgccgaacttaatatggaccatactgtggtgttgcagctcgcagagaacggttacgttacggtctctgagattaaagcctccctgaaatgggagaccgaacgggccagacaggttttagagcatctgctgaaagaaggacttgcctggttggatctccaggcccccggggaagctcactattggctgcctgccttgttcaccgacctctattctcaggagataactgccgaggaggcccgggaagcactgccttag

SEQ ID NO: 134657 - DNA, 777 bp, synthetic construct
  misc_feature 1..777: note = Description of Artificial Sequence: Synthetic coding sequence
  source 1..777: mol_type = other DNA
atgcacaggcgcggggtgggcgctggcgccattgcaaagaaaaaactggcagaagccaaatataaggaacgaggaacagtattagccgaagatcagttggcccagatgagtaagcagctggatatgttcaaaaccaacctggaagaattcgcaagtaagcataagcaggagatcagaaagaaccctgaatttagagttcagttccaagatatgtgcgcaactatcggcgtagatcccctagcaagtggtaagggtttttggagtgagatgttaggcgtcggcgatttttattacgagttaggcgtgcagatcatcgaagtgtgtcttgccttgaaacatcgaaacggtggcctaatcacactagaggagctgcaccagcaagtgctgaaaggcagggggaagtttgctcaagatgttagccaggatgacctgatcagagccataaagaaacttaaggctctgggaaccgggttcgggatcatcccggtcggggggacatatctgatccagagtgtgcctgcggaactcaacatggatcatacagtggtgcttcagctggccgagaaaaacgggtatgtgactgttagcgagattaaggcatctctgaagtgggagacagagcgcgctcgccaagtgctggagcacctgctgaaggagggcctggcctggctggatctgcaagctccgggtgaagcccactactggctacccgctttatttactgatctctatagtcaggagataaccgctgaagaggcaagggaagctctgccatag

SEQ ID NO: 134658 - DNA, 1611 bp, synthetic construct
  misc_feature 1..1611: note = Description of Artificial Sequence: Synthetic coding sequence
  source 1..1611: mol_type = other DNA
atgagttcatctctaggaaaagaaaaggattctaaggagaaagaccccaaagtgccgtctgccaaggaaagagagaaggaagccaaggcttctggcggattcggcaaagagtcgaaggaaaaggagccaaagactaagggaaaagatgccaaggacggcaagaaggattccagcgccgcacagccaggggttgctttttccgtggacaatacaattaaaagacccaatcctgcacctgggaccagaaagaaaagttccaatgctgaggtgatcaaggaactcaataagtgccgggaagagaatagcatgcgcttagatctatcaaagcggagcattcacatcttgccttcatcaatcaaggagctgactcaactgactgaactttacctttacagcaataagttgcagagcctccctgccgaggttggttgcctggttaacctaatgaccctggcgctcagcgaaaatagcctgactagtttacctgacagtctggacaatttgaagaaactgcgtatgctcgatctccgacataacaagttgagagaaattcccagcgtcgtctatcggctagatagtctcacgactctgtacctcagatttaacaggatcaccaccgttgagaaggacattaagaacctgagcaagctgagcatgctatcaattagggaaaacaaaattaagcaactgcctgccgaaataggcaatctcagtagcctgtccaggctgggactgaggtacaaccgcctctcggccatccctagaagcttagctaagtgctccgctctggaggagcttaacctggagaacaataatattagcacgttacccgaaagcctgctcagctccctcgtcaagcttaactctctcacactggcacgtaactgcttccagttgtatcccgttggtggcccctcgcagtttagtaccatctattctttaaacatggagcataataggattaacaaaatccccttcgggatctttagccgagctaaagttctgtcaaagcttaacatgaaagataaccagctcacctcattgcctttggactttggtacgtggacctccatggtagaattaaacctagcaacaaaccagttgaccaaaattcccgaagacgtgagcggccttgtgtcactcgaggtgctcatcctttctaacaacctcttaaagaagctgccacacggcctcggcaatctccgcaaactgcgggaactcgacttggaggagaataagctggagtctttacccaatgaaatcgcctaccttaaggacctccagaagctggtcctgacaaataatcaactgaccacattgccacgtggcattggtcacttaaccaaccttacacacttgggtttgggtgagaacctcttaacgcatttgccagaggaaattgggacccttgaaaatttggaagagctctacctaaacgataaccccaatctgcattctctccctttcgagctcgccctttgctccaaactgtccattatgtctatcgagaactgccccctgagccatctgcctccacagatagtagccggtgggccaagcttcattattcaatttctgaagatgcaggggccatatcgtgctatggtgtag

SEQ ID NO: 134659 - DNA, 1749 bp, synthetic construct
  misc_feature 1..1749: note = Description of Artificial Sequence: Synthetic coding sequence
  source 1..1749: mol_type = other DNA
atgtcttctagccttggcaaggaaaaagactcaaaagaaaaggatccaaaggtcccctccgctaaagaacgagaaaaagaggccaaagcgagcggtggattcggcaaggaaagcaaagagaaggagcctaaaactaagggaaaggatgccaaagatggcaagaaggacagtagtgctgcccagcccggggtagctttctctgttgacaataccatcaagcgccccaatcccgctccaggtacacgcaagaagtccagcaacgccgaggtcatcaaagaactcaacaaatgtcgcgaggaaaattctatgcgattagacttgtcgaaacgctcgatccatatcttgccctcctcaatcaaggagttaactcaattaactgaactgtacttgtactccaacaagctacagtccctccctgcggaggttggatgcctcgttaacctgatgacgctggcactgtctgagaactctctaaccagtcttcccgactcactcgataatctcaagaagttgcgtatgctggatttaagacacaataaactgcgggaaattcccagcgtggtgtacagactggactctctcacaaccctttacctgagattcaaccggatcaccaccgtggagaaagacataaagaacttgtctaaactgagcatgctttctatcagggagaataaaatcaagcaactgcccgcagaaatcggcgaactctgcaaccttatcactctggacgtcgcacacaaccaactcgagcacctgcccaaggagattggcaactgtacccaaatcacaaatttggacctccagcataatgaacttctggatctccccgataccatcggtaatctgagttccctgtctcgtctcggcttaaggtataaccggctgtccgcaattccacgttccctggccaaatgttcagctttagaggaactcaatctggagaacaacaatatttcaaccctccccgagagcctgctttccagcctggtcaaattgaattctttaactctagctcgcaattgctttcaactctatcctgtcggcggcccgtctcagttctcaacgatctacagcctgaacatggagcacaaccggatcaataagatcccatttggaattttctccagagcgaaggtgctgtctaaattgaacatgaaggacaaccagctaacctctctgcccctcgactttgggacttggacttctatggtggagttaaacctggctaccaaccagctgacaaagatacctgaagatgtgtccgggctagtgtccctggaagtgttaattttatctaataatctattgaaaaagttaccacacggactgggcaatctgagaaagttacgagagcttgacctcgaggagaataagctggaatcactccccaacgagattgcatacctcaaagacctgcagaaactagttttaactaataaccagctcactaccctcccaagaggcatcggccacctcacaaacctgacccacctggggttaggagagaacctcctgacccatttaccggaagaaatcggcaccctggaaaatttggaggaactttatctcaacgataatcccaaccttcactccctgcccttcgagctcgccttgtgctccaagctctcgattatgagcattgaaaactgcccattatcccacctgcccccacagatcgtggccggaggccccagtttcatcattcagttcctcaagatgcagggcccatacagagccatggtctag

SEQ ID NO: 134660 - DNA, 1119 bp, synthetic construct
  misc_feature 1..1119: note = Description of Artificial Sequence: Synthetic coding sequence
  source 1..1119: mol_type = other DNA
ctggacaacctcaagaaactgcgcatgctggatctgcgacacaacaaattacgcgagattccgtctgtggtataccggttggactcccttaccacattatatctccgcttcaatagaattaccactgttgagaaagacattaagaatctgtctaaactcagtatgctgagtatccgagaaaataaaatcaagcagctgccggctgaaattgggaacttatccagcctgagcaggctgggtctgcgctacaaccgccttagcgccatcccacggtctctggctaaatgctccgcccttgaggaactgaatctcgagaataataacataagcacactcccagagtcccttctgtcttccctggtaaaactcaactcacttaccctagcgcgaaactgcttccagctgtacccagtcggcgggccttctcagttctcgaccatctattctttgaacatggaacacaataggattaacaaaatcccctttggtatcttctcccgggctaaggtgctcagtaagctgaatatgaaggataatcaactcacaagcctgccactagacttcgggacctggacatcaatggtcgagctaaacctggctacgaaccaactgaccaaaatacctgaagatgtcagcggactggtctcactcgaagtgctgatcctgtcaaacaaccttcttaagaagctgccgcatggactcggcaacctgcgaaagcttcgcgaattggacctggaagagaacaaattggaatctctccccaatgagatcgcttacctgaaggacttgcagaaactagtgttgacaaataatcagctgactaccttacctaggggcatcgggcatttgactaaccttacccacctgggactcggagaaaatctgttgacccaccttcctgaagagataggcaccctggaaaacttggaggaactatacttgaacgataatcccaatctgcactctctgccgtttgaacttgcgctgtgttctaagctgagcatcatgtcaatcgagaactgcccactgtctcaccttcccccacagatagtcgccggaggaccgagttttattatccagtttctgaagatgcagggaccctatagagctatggtatag

SEQ ID NO: 134661 - DNA, 588 bp, synthetic construct
  misc_feature 1..588: note = Description of Artificial Sequence: Synthetic coding sequence
  source 1..588: mol_type = other DNA
atgctgagagacggcaggtttgcctgtgctatttgcccccatcgcccggttcttgacaccctggcaatgctgactgcccaccgggctggaaaaaagcacttatcctccctgcagctgttttacgggaaaaagcagcccggtaaagagagaaaacagaacccaaagcatcagaacgaactcagaagagaagaaactaaagctgaagcccccctgctgacccagaccagattgattacacaaagcgcactgcatagggcaccacattacaactcttgttgtaggaggaagtatcgcccggaggctcccggcccgagtgtgtcactatctcccatgcccccatccgaggtgaaactacaatccggtaaaatctcccgagagccagaacctgccgcaggccctcaagccgaagaaagcgccactgtcagtgctcccgccccgatgtcccccacacgtcgccgcgctctagatcattaccttactctgagatcaagcggctggattccagacggaagaggacgctgggtaaaagacgagaacgtggaattcgattccgacgaggaggagcctccagacctcccgttggactag

SEQ ID NO: 134662 - DNA, 693 bp, synthetic construct
  misc_feature 1..693: note = Description of Artificial Sequence: Synthetic coding sequence
  source 1..693: mol_type = other DNA
atgagcttcaaacgtgaaggcgacgactggtcccagctgaacgtcctgaagaaacggcgcgttggagacctcttggccagctacatccccgaagacgaggccctgatgctccgagacggacgcttcgcctgcgctatctgcccccaccggcccgttcttgatactctcgctatgctgacagcacaccgcgctggtaagaaacatttgagcagtcttcagctcttttacggcaagaagcagcccgggaaggaaagaaaacagaaccctaagcaccagaatgagctgcgtcgcgaagagactaaggccgaggcacccttgctcactcagactcgccttatcacacagagcgctctacaccgagctccacattataactcttgctgccgtcgaaagtaccgtcccgaagccccgggtcctagtgtctcgctgtctcctatgcctcctagcgaagtcaaacttcagtcaggtaagatttccagggaacccgaaccggcggccggcccccaggccgaagaatctgctactgtatcagccccagctcctatgtcccccacgcgtcgccgagctttagaccactatttaaccttgcggtctagtggctggattcctgacgggcggggccgttgggttaaggatgaaaacgtcgagttcgattcagacgaggaagagccacctgatctgcccctggactag

SEQ ID NO: 134663 - DNA, 1038 bp, synthetic construct
  misc_feature 1..1038: note = Description of Artificial Sequence: Synthetic coding sequence
  source 1..1038: mol_type = other DNA
atgtataaggactgtattgagagcactggggactactttcttttatgcgacgctgagggaccttggggtatcattctggaatcgctggctattttaggcattgtggtcacgatcctgttactgcttgcctttctgtttttgatgaggaaaattcaggattgctcccaatggaatgtgttgcctacgcaattgttgttcttgttgtcggtactgggtctgttcgggctggctttcgcgtttatcatcgagttgaaccagcagacagctccagtgaggtacttcctgttcggagtactgtttgcactgtgcttctcatgtcttctggcgcacgcatccaacctggtcaaactggtgcgggggtgcgtctcatttagttggactacaattctgtgcatcgccatcggttgctcactgctccagatcattatcgcaacagagtacgtcacactgatcatgactcgcggcatgatgttcgttaacatgacaccttgccagctgaacgtcgacttcgtggtgttactggtctacgttcttttcctgatggccctcactttctttgtgtcaaaggctaccttctgtgggccatgtgaaaattggaagcaacatgggcgtctcattttcatcaccgtcctgttttcaatcattatctgggtcgtctggatttcaatgttgctgagagggaatccccagttccagcgacagccccagtgggatgacccggttgtgtgcattgccctcgtgacaaacgcgtgggtgttcctgctcttatacatcgtgcccgaactgtgcattctgtacagatcctgcaggcaggagtgcccccttcagggaaatgcctgtccagttacagcttatcagcactcttttcaggtggagaaccaggaactctcccgcgcaagagattccgacggtgctgaagaggacgtggccttgacatcgtacggaacccctatccagcctcagacggtggatcccacccaggaatgcttcattcctcaggccaaattgagcccacaacaggatgcgggaggcgtgtag

SEQ ID NO: 134664 - DNA, 2076 bp, synthetic construct
  misc_feature 1..2076: note = Description of Artificial Sequence: Synthetic coding sequence
  source 1..2076: mol_type = other DNA
atggagggcaataagctggaagaacaggatagctctccccctcagagtacccccggcctgatgaaaggcaataagcgggaggagcaggggctcggccccgagccagccgccccacagcagcccacggctgaagaggaggccttgatcgagtttcatcggtcatatcgcgaattatttgagttcttctgtaataataccacaatccatggagcaatccgcttggtgtgtagtcaacacaacaggatgaaaaccgccttctgggctgtcctgtggctctgcacctttggcatgatgtactggcagttcggtctgctgtttggtgaatatttctcttatcccgtgtctctgaatatcaatctaaactcggataagttggtgttccccgccgttaccatttgcacattgaacccgtaccgctatccggaaatcaaagaggagttggaggagctcgataggattaccgagcagacactatttgacttgtacaagtatagttccttcaccactttggtcgctgggtccagaagcaggcgcgacctgcgcggcacgttgccgcaccccttgcaaaggctgagagtgccgcctccccctcacggagccaggcgggcgagaagcgtcgcctccagcctccgagacaataacccccaagtcgattggaaggactggaaaattggcttccagctgtgcaaccagaacaagagcgactgcttttaccagacgtactcttccggtgtggatgctgtaagggagtggtacaggtttcactatataaacatactctccaggctaccggagaccctcccgtcacttgaggaggatacacttggcaacttcatttttgcctgtcgatttaatcaggtcagttgcaatcaggcaaattattctcactttcatcaccccatgtatggaaattgttacacatttaacgataaaaacaatagtaacctgtggatgagttctatgccgggtatcaacaatgggctgagcctgatgctgcgggcggagcaaaatgactttatccccctactgagtacagtcacaggcgctcgggttatggtgcatggccaggatgagccagcgttcatggacgacggaggtttcaatttgagacccggagtcgagacatccatatcaatgagaaaggaaaccctggataggcttggcggcgattacggggattgcacaaaaaatggttcagacgttcctgtagaaaacctgtatccttcaaaatacacccaacaggtgtgtatccatagttgtttccaggagagtatgatcaaagagtgtggctgcgcgtatatattttatccgagaccccaaaatgtcgagtattgcgattataggaagcacagctcatgggggcaagtgcggtctctcactccggtgatccccgccctgtgggaggcggaagccgggcgctccaggggctactgttattataagttacaggtggatttttcatccgatcatctggggtgttttactaagtgcaggaagccatgctctgttacatcataccagttgtctgctgggtatagcagatggccgagcgtgacaagccaggaatgggttttccaaatgctgtcacgccagaataattacacagtgaacaacaaacgtaacggagtggccaaggtgaatatcttctttaaggagcttaattacaagaccaattcagaatctccgtcagtgacaatggttacactgctctcgaatctgggatcgcagtggagcctgtggttcggttcatctgtgctgtcggtggtggagatggccgagctcgtctttgatcttcttgtgataatgttcctgatgctcttaaggcgttttcgttcgaggtattggtctccgggcagaggtgggcgaggagctcaggaggtagcttctactttagcttcttctcctccatcccacttttgcccccatccgatgagtctgtccctgagccagcccggacccgcgccctctccagccctgaccgcgcctcctcctgcatacgcaactctgggaccgcggcctagccctgggggctctgctggcgcctcttcatcaacttgccctctaggcgggccttag

SEQ ID NO: 134665 - DNA, 2058 bp, synthetic construct
  misc_feature 1..2058: note = Description of Artificial Sequence: Synthetic coding sequence
  source 1..2058: mol_type = other DNA
atgttactacatatcaaccccgcctatctttttaaattgctgcatgggtttcccccttggatcatgcctaccgatgggaacttgggcgacaaaaactttcaaatggggaaacccgggcatcgggagggcgctactatgcatgttaagaagtatttactcaagggattgcacagactgcaaaaggggccggggtacacctataaggagttacttgtgtggtattgcgataatactaacactcatggtcccaagcggatcatatgcgaggggcctaagaagaaggccatgtggttcttgctgaccttgcttttcgcggctctggtgtgctggcagtggggaatcttcatccggacttacttatcgtgggaagtgagtgtgagtttgtccgtgggatttaagaccatggatttccccgccgtcaccatttgcaatgcatccccattcaaatactccaaaattaagcatctgctaaaagatctggatgaactgatggaagccgttctggagaggatcctcgctcccgagctctcccacgccaacgccaccaggaatctgaacttctcaatttggaaccatacccccctggtgctcatcgatgaacgcaaccctcatcatcctatggtgctggatttgttcggcgacaaccacaatggcctcacctcatcgtctgcctcggaaaagatctgtaacgcccacggttgcaaaatggcaatgagactctgctccctgaaccgaactcaatgcacctttagaaatttcacaagtgctacgcaggcgctcacagaatggtatatcctgcaggccaccaacatattcgctcaagttccccaacaagagctggtggagatgtcataccccggtgagcaaatgatactggcttgcctattcggggcggaaccatgcaactatcgcaacttcacaagcattttttatcctcattacgggaattgctatatatttaattggggcatgaccgagaaggcgttgccgtctgcaaatcccggtaccgagtttggcttaaagctcattctggatatcgggcaggaggactatgtgcctttcctggccagtaccgctggtgtacgcctgatgctgcacgagcagcgctcgtaccctttcatcagagatgagggaatctatgccatgtctggtaccgaaacctccattggggtcttggtggacaagctccagcgcatgggcgaaccttatagcccatgtaccgttaacggctccgaagtacccgtgcagaacttctactccgactataataccacgtactctatccaggcttgcctgagatcttgtttccaggatcacatgatcagaaactgcaactgtggccactacctataccctctccctaggggagagaaatactgtaacaaccgcgactttcctgactgggcccactgctattccgacctacaaatgtcagtcgcccagcgcgaaacatgcatcggaatgtgtaaggagagctgtaatgacacccagtataagatgacaatctctatggccgactggccctctgaggcatccgaggattggatctttcatgtgctgtctcaggagcgagaccagagcacaaatattacactgtctagaaaagggatcgtcaagctcaatatttactttcaggagtttaactatcggaccatcgaagagagtgccgcaaataacattgtatggctactaagcaatcttgggggtcaattcgggttctggatgggcggctctgtgctatgtctaatagagttcggcgagataattatcgactttgtttggattacgatcataaaactcgtggctttagccaagagcttacgacagaggcgtgctcaagcctcttacgcaggaccaccaccaacagtcgccgaactcgtggaggcccataccaactttggattccagccagataccgccccccgaagccctaatacagggccataccccagcgaacaggccctgcctattccaggcacgcctccccctaattacgactcattacgccttcagcctctggacgtgatcgaatctgactccgagggcgatgcaatctag

SEQ ID NO: 134666 - DNA, 1923 bp, synthetic construct
  misc_feature 1..1923: note = Description of Artificial Sequence: Synthetic coding sequence
  source 1..1923: mol_type = other DNA
atgcacgtgaaaaagtacctccttaaagggctccatcgacttcagaaaggcccaggctacacttataaagaactcctggtttggtactgcgataatactaacacccatgggccaaaacgtattatctgcgagggcccaaagaagaaggcaatgtggttcttattaacattgctttttgctgccctggtgtgctggcagtggggaatcttcatacggacataccttagttgggaggtgtctgtttcactgagcgttgggtttaagactatggactttccagctgtgaccatatgtaatgcatctcctttcaagtactcaaagatcaagcatcttctgaaagatctggacgaactgatggaggctgttctggaacgcatcctcgcccctgagctaagccatgccaatgctacacgtaatttgaacttctcaatctggaatcacactcctttagtactgattgatgagcggaaccctcaccatcccatggttttggacctgttcggcgataaccacaacggccttacatcttccagtgcctcagagaagatctgcaacgcccatggatgcaagatggcgatgagattgtgttctctgaacaggacccaatgtactttccggaatttcactagcgccacgcaagccctcaccgagtggtacattctccaggccacgaacatcttcgcacaagttccgcagcaggagctcgtggagatgtcttatcctggagaacagatgattctcgcatgtctctttggcgcagaaccttgcaactaccgaaattttaccagcattttttaccctcattacggaaattgttacatctttaattggggtatgacagagaaggctctcccttccgccaacccaggcaccgagttcgggttgaagttgattctcgacataggccaggaagattacgttccgttcctggccagcacagcgggcgtgcgacttatgctccacgagcagcgtagctatccttttatcagggatgaggggatctatgctatgtccggaaccgagacgagcatcggggtcctggtagataagttgcagagaatgggcgagccatactctccgtgtactgtgaatggttccgaggttccagtgcagaatttttactcagactataataccacctattcgatccaggcatgcttgagaagctgtttccaggatcacatgatccgcaattgtaactgtggacattatttatatccactgcctcgaggggagaaatactgcaacaaccgcgacttcccagattgggctcactgttactcagacttacaaatgtccgttgctcagcgggagacgtgcattggtatgtgcaaagaatcgtgtaacgacacacagtataagatgacaatctctatggccgattggccgtcggaggcaagcgaagactggatttttcatgtgttgtcgcaagagagggaccagagcacgaatatcaccctgtcccggaaaggaatcgttaagcttaatatctatttccaagaattcaattacaggaccatcgaagagtctgcagccaacaacatagtctggttattgtctaaccttgggggccagtttggattctggatgggcggctccgtgttgtgcctgattgagtttggcgaaattatcatagatttcgtgtggatcacaatcattaagctcgtggcgcttgccaaatcactcaggcagcgaagagcacaagcctcctatgcgggccccccgcctaccgtggcggagttggtggaagctcacacaaatttcggatttcagcctgataccgccccccgatccccaaacactggaccttacccaagcgaacaagcactgcccattcccggcaccccccctcccaactacgactcattgcgcctgcaaccactagatgttatcgagtcagacagcgagggggacgccatctag

SEQ ID NO: 134667 - DNA, 2115 bp, synthetic construct
  misc_feature 1..2115: note = Description of Artificial Sequence: Synthetic coding sequence
  source 1..2115: mol_type = other DNA
atggccttcctgtctcgcacaagtcctgtagcagccgcttcctttcagtccaggcaggaggccagaggatcaatccttctgcagagttgccagctccctcctcaatggctcagcaccgaggcgtggacgggcgaatggaagcagccacacggaggcgccctgacaagcaggagcccaggccctgtcgcacctcaacgtccttgccatttaaagggatggcagcacagacccacgcaacacaacgccgcttgcaagcaaggccaggccgctgcccaaacaccccctagaccgggcccacctagtgccccgccgccaccccctaaggaaggccatcaggaaggcctggtggagttgcctgccagttttcgagagcttctcactttcttctgtacgaatgccaccatccacggcgcaatacgcctggtatgttcacgaggcaacagacttaaaaccacatcatgggggcttctctctctgggcgcgctcgtggccctttgctggcagctgggactgctctttgaaaggcactggcaccggcccgtacttatggctgtttctgtacactctgaaaggaagttactgcccctggtgaccctgtgcgatggaaatcctcgacggcccagtccggtgcttcggcacttagaactgttggacgaattcgcccgcgagaacattgacagcctctacaatgttaatctgtctaaaggaagggccgcactaagcgctacagtgcccagacatgaaccacccttccaccttgaccgggagattcgacttcagcgcctatctcattccggttcgagagtgagagtgggcttccggctgtgtaacagtacgggcggcgattgcttttatcgcggatacacctcgggggtggctgcagtgcaggactggtatcacttccattatgtggatatcttggctctgttgcctgcagcttgggaggactctcacggaagccaggatgggcactttgtcctgtcttgtagctacgacggcctagattgccaggccagacagttccggacgttccatcaccctacgtatggatcctgttatacagtggatggggtctggactgcgcaacggcctggcattactcatggggtgggattagtgcttcgggtggagcagcagccacacctgccactgctgagtacattagcaggcatccgcgtgatggttcacggtcgtaaccacaccccttttcttgggcaccattccttctccgtgcggcctggcaccgaggctaccattagcattagggaggatgaggttcatcggttaggaagtccctatggacattgcacggctggcggcgaaggcgtggaagtggaactgctgcacaatacttcctacactagacaggcttgtctcgtatcatgtttccagcaactcatggtcgaaacatgcagttgcggttattatctccatcctctcccagctggtgccgagtattgtagcagtgctaggcatcctgcatggggccactgtttctatcgactctatcaggatctggagacgcatagattaccctgtacgagccggtgccctcgcccatgcagggagtccgcttttaaactaagcactgggaccagccgctggccaagcgctaagagcgcaggctggactctcgctactttgggtgaacaggggcttccccatcaatcccacaggcagagaagctctcttgctaaaattaacatcgtgtaccaagaactgaattaccgctccgttgaagaagccccagtttactcggttcctcagctgctgtctgcaatgggttcattatgtagcttatggttcggcgcgtctgtactttcgctcttggaactccttgagttgttattagatgcatcggctttaactctggtactgggcgggagaaggctgcgccgcgcgtggttctcgtggccacgagcaagccccgcctctggggcgtcctcgattaagcctgaagcatcccagatgcctccacccgcaggcggcacctccgacgatcccgagcccagcgggcctcacctccctcgggtcatgctgccaggtgtgttagccggcgtgagcgccgaagagagctgggccggtcctcagccgctcgaaaccctggacacctag

SEQ ID NO: 134668 - DNA, 1917 bp, synthetic construct
  misc_feature 1..1917: note = Description of Artificial Sequence: Synthetic coding sequence
  source 1..1917: mol_type = other DNA
atggctgagcaccgctctatggacggacgaatggaggcagccacacggggagggagtcacctgcaggccgctgctcagactcccccccggcctggccccccatcagcaccacccccacctcccaaagagggccaccaagaaggccttgtggagctgcccgcatcctttagggagttgctgacttttttttgcactaatgcaaccattcatggagcgattcggttagtatgtagtcggggaaatcgcttgaaaacgacctcctggggcctgttgagcctaggggccctcgtggccctgtgctggcagctaggcctactcttcgagaggcattggcatagacctgtcttaatggcagtgtcagttcactcagaacgtaaacttcttccccttgtgacactttgtgacggaaacccccgacgccctagtccggtcctgagacacctggaattgctcgacgagttcgctagggaaaatattgacagtctctacaacgttaatctcagtaaagggcgggccgctttatccgcaaccgtgccccgtcacgagccaccctttcacctggaccgagaaattcggctgcagagattgtcccatagcggcagtagggtaagagtgggcttccgactgtgtaattctactggcggcgattgcttttatagggggtacacatcaggagtagcagccgttcaggattggtatcactttcactacgttgacatactggccctactgcccgccgcctgggaggattcgcatggcagccaagatggtcacttcgttctatcttgctcttacgatgggctagactgccaggctcggcagtttcggacgtttcaccatcctacatacggtagctgttacactgttgacggcgtgtggaccgcccaaaggcccggaattacacacggcgtgggcctggtattgagagtggaacagcaacctcaccttccactgctgagcactctggctggtatccgagtaatggtgcacgggagaaaccatactcctttccttggacaccatagtttcagtgtgagaccgggaacagaagccaccataagcatccgggaggatgaggtccacagactagggtccccatacggccactgcaccgcaggaggcgagggagttgaggtggaactactgcacaatacttcatacacacgccaggcttgcctggtctcttgctttcagcagcttatggtggaaacatgttcctgcgggtattatctgcatcctctgcctgctggcgccgagtattgtagcagtgctagacacccagcatggggccactgcttttatcgtttatatcaagatcttgaaacacaccgactgccatgcacgtcgaggtgccctcgcccctgtcgcgaatcggcctttaaactgtccactggtacaagcaggtggccatccgcgaaatctgctggttggacattggcaaccctgggagagcagggcctgccacatcagagtcatagacaaagatcatctcttgcaaagataaatattgtgtatcaggagctcaactatcggagcgtagaagaagcccccgtatacagcgttccacaactattgtccgctatggggtctctttgcagcttgtggttcggcgctagcgtgctaagtctgctggagctgttggaactgctactggatgcgtctgctttgactctggtgcttggcggcaggagactccgcagagcatggttctcctggccacgcgcgtccccggcatcgggagcgtctagcattaagcccgaagcaagccagatgccacccccagccggggggaccagcgatgaccctgaaccctcaggaccccaccttccacgggtgatgctgcccggggtacttgctggtgtatctgcggaagagtcttgggcaggcccccaacctctagagacgctggacacatag

SEQ ID NO: 134669 - DNA, 927 bp, synthetic construct
  misc_feature 1..927: note = Description of Artificial Sequence: Synthetic coding sequence
  source 1..927: mol_type = other DNA
tgagctactgcaagggctgcaacagcatttacagaggccacaagacaagcgtggaggctgagcaggaccgggacgacatctacaatgtggatcagttggccctgttgcccacgccatggcaggacagcgacaggtgctcggacagcgacatcctcctcgccagccgtgactatggcctggacagctagaccagacagctcaggaccttccactacaccccccaccgccgccgcaacacgcagcatggcctcagggcagctttccgccccggcgagtcccaccgtgggagcaagcccttggcccgtgcgaggccagggctgcagatcaggaggactgacccccgccctgggcctccctggcgtgggcctagtgctgagggtagaacagcagcctcatttgcctcttctctcaacccttgccggcattagagtgatggttcatggtaggaatcatacacctttcctcggtcatcactccttttctgtgaggcctggtacagaggccactatctcaattagagaagacgaggtgcatcgcctgggatccccatacggccactgcacagcaggaggggagggcgtggaggtcgaactcctacacaatacatcttataccaggcaggcctgtctcgtgtcctgctttcagcagctgatggtagagacttgcagctgtgggtattatcttcatcctcttccggctggagccgaatactgcagttccgctcgccacccagcgtgggggcactgtttttaccgtctctaccaggacctcgagacccaccgtcttccctgtacttcacgttgcccacggccatgcagggaatccgcattcaaactttcaacaggcactagtcgctggccaagcgccaaatccgccggatggacactggctactctcggcgagcaaggcctgccccatcagtcttag

SEQ ID NO: 134670 - DNA, 2010 bp, synthetic construct
  misc_feature 1..2010: note = Description of Artificial Sequence: Synthetic coding sequence
  source 1..2010: mol_type = other DNA
atggctgagcacaggtccatggacggtagaatggaggctgcaacacgcggaggctcgcacctgcagatcgcctgggcttgcggaagtcccgaagcactcccgcccgagggcatggccgcccagacccactctgcacaacgctgcctccagactggtccgggctgtagtcctgacgcgccccagccagggccgcctagcgcaccaccaccacctccaaaggaaggacatcaggaaggccttgtggaactcccggcctcgtttcgagaactgttgacattcttctgcactaatgcgaccatccatggagccatccgcctggtgtgttctcgaggcaataggcttaaaacaacgtcatggggactgctgagcctgggcgctctagtcgccttgtgctggcaactgggactcttatttgagcggcattggcaccgcccggtgctgatggcggtttcggtgcacagcgagagaaagctgttgccgttggtaacactttgcgacggcaatccccgaaggccgagcccggtcctgcgccatcttgagctgctcgatgagtttgcccgcgaaaacattgactccctgtacaacgttaatctcagtaagggacgggcggcccttagcgcaacagttccgcgccacgagcctcccttccaccttgatagggagatccgtctacagcgactctctcactcaggcagtcgggtgcgcgttggattcagattgtgtaacagtactggtggcgattgcttttaccggggctatactagcggcgtagccgccgtgcaggactggtatcacttccactacgtggacatcctcgctttactccccgccgcctgggaggatagtcacggatcacaggacgggcacttcgtgctttcatgttcttacgatggcctggactgtcaagcacgccagtttagaactttccaccacccaacgtacggctcatgctataccgtggatggcgtttggaccgcccaaaggcctggaattacacacggtgtgggtctggtcttgagagttgaacaacagccccacctgccgttactcagtactctcgctgggatccgcgtaatggtgcatggccgtaaccacacccccttcttaggccatcatagtttttcagtgcggcctgggacagaggccactatatccatcagagaggatgaagtgcaccgactcggctcgccctatggtcactgcaccgccggaggtgagggagtagaggtggagctcctccacaatacctcatatactcgccaggcttgcctggtctcctgctttcaacagctgatggtggaaacatgttcctgcggatactacctacaccctttgcccgctggggcggagtactgttctagtgcacgacaccctgcctgggggcactgcttttaccgtctgtaccaagacctggagacacacaggctcccctgtacttcaaggtgcccgagaccctgcagagagagtgcatttaagctgagtacagggaccagtcgctggccatccgcgaagtcagccggctggaccctggccacgctcggtgaacagggcctcccgcatcagagtcacaggcagcgtagctctttagctaagatcaatattgtgtaccaggagctgaattaccgtagcgtcgaagaggcccccgtgtactccgttccgcaattgctgtcagccatgggaagcctgtgtagtctttggtttggggcctccgttctgtctttattggagttgctggagctccttctggacgccagtgcactaaccttggtccttggtggccggcgcctgcggcgggcttggttttcatggccgagggcttctcccgccagtggggcatctagtattaagcccgaggccagccagatgccgcccccagcaggtggaacgagcgacgaccccgagcctagtgggccccacttgcccagggtgatgctcccgggcgtactggccggggtatcagcggaggagagctgggccggaccccagcccctagaaacactggatacttag

SEQ ID NO: 134671 - DNA, 2409 bp, synthetic construct
  misc_feature 1..2409: note = Description of Artificial Sequence: Synthetic coding sequence
  source 1..2409: mol_type = other DNA
atgagggcagttctttcgcaaaaaaccactcccctgcctaggtacctttggcctggacacctgtccggccctaggagattgacatggtcctggtgctccgaccataggacaccaacctgcagagaactcggatcgccccaccctacaccatgcactggaccagccaggggctggcctcggagggggggtgggccctgcggctttacctctgccggccacgtattatgtgggtatccactttgtttactctccgggccgatccagggctgtggtaccggcctgggcgacagttccatggcctttctgagcagaacttctccagtcgcagccgcaagcttccagagccgccaggaagccagaggcagtattttactgcagagctgtcagctcccccctcaatggcttagcactgaggcctggaccggcgagtggaagcaaccacatggtggagccctgacaagcaggagcccaggccccgtggctcctcagcgaccatgccatctcaagggctggcaacaccggcctacccagcacaacgctgcatgcaagcagggccaggctgcagctcagacgcctcctcggcctggccctccctctgcgccgccaccccctccaaaagaaggacatcaagagggcctggtcgaacttccagcctcctttcgtgaacttctcactttcttttgcaccaacgcgaccatccacggtgctatccgcctggtgtgttctcgaggcaaccggctcaaaacaacttcttgggggcttctgagccttggagccctggtcgcactgtgctggcagctgggactgctctttgaaagacattggcaccgacccgttctgatggccgtatctgtacactccgaacgtaaactgctgcccctggtgaccctctgcgacggcaatccacgaagaccctcaccagtgctcaggcacctggaactgctggacgagtttgcgcgcgagaacatcgattccctatataatgtgaacctgtccaagggccgcgctgcattgtccgccactgtgcccagacacgagccacccttccatcttgaccgagaaattaggctgcagcggctatcccactctggatccagagttcgtgtaggcttccgtctgtgcaacagtaccggcggggactgtttttatcgcgggtatacaagtggtgtggccgcagtgcaagattggtaccacttccattatgtggacatcctggccctgctgcccgcagcatgggaggactcacatggctctcaggacggacacttcgtgctgtcctgctcatatgacggcctggactgccaggcacgccaattcagaacttttcaccacccgacttacggcagctgctacacggttgacggggtctggacagcgcaaagaccggggataacacacggtgtcggtttggtgctaagagtggagcagcagccccatctacccttgctcagcaccctcgctgggatcagggtaatggtgcacggaaggaaccacaccccttttctgggacatcattccttctctgttagacccggtacagaagcaacaatttctatcagggaagacgaggtgcacagactgggatccccatatggccattgtactgcaggaggggagggggttgaggtggaactgctgcacaatacctcttatacccgccaggcgtgcttagtgagctgtttccaacaactcatggtggagacttgttcctgcggctattatctacaccctctgccagcaggggcagaatactgctcctccgccaggcacccagcatggggccactgtttctaccgtctgtaccaagaccttgaaacccaccgactgccctgtacaagccggtgtcctaggccgtgtcgggagagtgccttcaagctctctacaggaacctcgcggtggccctccgcaaagagcgccggctggacactggcaaccttgggggagcagggattgccgcaccagtcccacaggcagagatcttctctggccaaaataaacattgtataccaggagctgaactatcgatccgtcgaggaagcaccagtgtactcagttccgcagctgctcagcgctatggggtccctgtgcagcctctggttcggggccagtgtcctgagtctcctcgagctactagagctacttctggatgcatccgctcttactttggtgctgggagggcggcgactgcggcgggcatggtttagctggccacgcgccagccctgccagcggtgccagcagtatcaagcctgaggcctcccaaatgccacctcctgcgggggggacttctgatgatccagagccaagcgggccccatctaccccgggttatgcttccaggtgtgctggccggagtgagtgcagaagaatcgtgggccggcccccagcccctcgagaccctggacacttag

SEQ ID NO: 134672 - DNA, 1917 bp, synthetic construct
  misc_feature 1..1917: note = Description of Artificial Sequence: Synthetic coding sequence
  source 1..1917: mol_type = other DNA
atggcggaacaccggagtatggatggccgaatggaggcagctacgcgcggaggcagtcatctgcaggcagcggcacaaacacctccacgcccgggacctccttctgccccaccaccgccccccaaagaaggacaccaggaggggttggtagagctccctgctagttttcgggagctgctgaccttcttttgtacgaatgccactattcacggagccatccgcctagtatgttcccggggtaacaggctgaagacaacatcatggggactcctctccctgggtgccctggttgccctgtgctggcaactgggcctcctctttgaaagacattggcatcggccagttcttatggcggtttccgtgcacagcgagcggaaacttcttccccttgtgaccctgtgcgacgggaaccccagacggcccagcccggtactaagacatctggaacttctagacgaatttgcccgggagaacatagattctctttataatgtgaacctgagcaaaggaagggccgcactgtctgcaaccgtgcctcgccacgagcctccttttcacctggatcgggagatccgtctacagaggttgagccattccggttctcgggtgagagtcggcttccgcctgtgcaacagtaccggcggagactgcttctatcgcggctacacgagcggcgtggctgccgttcaggactggtaccactttcattatgtcgacatactcgcactgcttccggctgcttgggaggacagccacggtagccaggatggacactttgtgctgagttgtagctatgacggtctggactgtcaggccaggcagtttagaaccttccatcatcccacctacggctcctgctacactgtagacggagtgtggaccgcgcagcgccctggcatcactcacggggtaggtttggtgctccgcgttgaacagcagcctcacctgcccctgctgtctaccctggccggtatccgggttatggtacatggtaggaatcacactccctttttaggtcaccactcattctctgtccgcccaggcacggaggccactatctctattcgggaggacgaggttcaccgtctggggtcaccttacggacactgcactgctggcggggaaggtgtagaagttgaattactgcacaacactagctacactcgtcaggcctgtctagtttcctgcttccagcagctgatggttgagacgtgttcctgtgggtattatttgcatcccctcccggccggcgcagaatactgtagctccgcgcggcatccagcttggggacattgcttttaccgcctgtatcaggacctggagactcataggctcccttgcacctcgcggtgcccacgcccttgtcgggagagtgccttcaagctgtcaacagggaccagcagatggcctagcgccaagtcagccggctggaccttagcgacactgggagagcagggattgccgcatcagtcacatcgtcaacgctctagtctcgctaagatcaatattgtgtatcaggagctaaattatcgttcagttgaggaggctccagtgtactcggttccacaacttctgtctgccatgggtagtctgtgtagtctgtggttcggtgcctctgtcttgagtctcctggaattacttgaactgctcttagatgcctccgccttgacgctcgttctcgggggcagacgcctgcggagggcttggttcagctggccccgcgcatccccagcttcaggggccagctccatcaagccagaggcatcccagatgccaccacccgcaggagggacctcggacgaccccgagccctctggaccacatcttccaagagtgatgctcccgggggtgctagctggcgtgtccgcagaagagagctgggccgggcctcagccattagaaaccctcgatacctag

SEQ ID NO: 134673 - DNA, 1950 bp, synthetic construct
  misc_feature 1..1950: note = Description of Artificial Sequence: Synthetic coding sequence
  source 1..1950: mol_type = other DNA
atggcacctggggagaagatcaaggcaaagattaagaaaaacttgcccgtgactgggccacaggccccgacaataaaggagcttatgagatggtactgcttgaacacaaatactcacggctgccgaagaattgtggtgtctaggggtaggttgaggaggctgctgtggatcggatttacactcactgccgtagcccttattctgtggcagtgtgccctgctggtcttttctttctatactgtcagcgtctcaatcaaggtccactttaggaaactagatttcccagcggtgactatctgtaatattaatccatataagtacagtacggtacggcatctgttggccgatttggaacaggaaacaagggaggcccttaaatctttgtatggcttccctgaaagccgcaagcgccgagaagccgagtcttggaactccgtgtcggaaggcaagcaacctcgctttagtcatcggatccctctcctgatctttgatcaggacgagaaagggaaggccagggatttttttaccggacgcaaacgtaaggtagggggctctatcattcacaaggcatctaatgtcatgcatatcgagagcaaacaggtagttggtttccaattatgttcaaacgatacctccgactgcgccacatacacttttagctcaggcatcaacgccatccaggagtggtacaagctgcattacatgaatataatggctcaggtgcctttggaaaagaaaattaatatgagctattctgcagaagaactgttggtaacatgtttcttcgatggggtatcttgcgacgctcgcaactttaccctctttcatcacccgatgcatgggaattgctacaccttcaacaatcgcgaaaacgagaccatcttatctaccagcatgggagggtcggagtatggtctgcaagttatcctgtatattaacgaagaagaatacaatccatttttggtctcaagcacgggggccaaagttattattcacaggcaggacgaatacccttttgtcgaggacgtgggcacagagattgagactgccatggtgacctcaattgggatgcacctcaccgagtctttcaagctcagtgagccatactcacagtgtacagaagatgggtcagatgttcctattcgcaatatctataatgccgcttattccttgcagatttgcctgcactcttgttttcagaccaaaatggtagaaaaatgtggctgcgctcagtacagtcaaccgctgccccctgcggcgaactactgtaattaccagcagcaccccaattggatgtactgttactaccagttgcacagagcctttgtacaggaagaattagggtgccagtctgtgtgcaaggaggcgtgttccttcaaagagtggactttgaccacatcattggcgcagtggcctagcgtggtctccgagaagtggcttctgcccgtcctgacttgggatcaggggaggcaggttaacaaaaagctcaacaagaccgatcttgcaaaactgttgatcttctacaaggacttaaaccagcgctccataatggagtctccagccaattctattgagatgctgctttcaaatttcgggggccaattgggactgtggatgtcatgctccgtggtctgtgtgatcgaaataattgaggtgttttttatagacttcttcagtattatcgctcgacggcaatggcagaaagccaaagagtggtgggcctggaaacaggctccaccttgccccgaggcaccacgcagccctcaaggacaagacaaccctgctctagacattgacgacgatctgcctacgttcaacagcgctctgcacttaccacccgctttggggacccaggtacctggcacacctcctccgaagtacaacactcttcgtctggagcgggctttttcaaatcagttgactgacacccagatgctggatgagctctag

SEQ ID NO: 134674 - DNA, 5943 bp, synthetic construct
  misc_feature 1..5943: note = Description of Artificial Sequence: Synthetic coding sequence
  source 1..5943: mol_type = other DNA
atggcagcaagactcctagctcccccgggacccgacagtttcaagccatttacgccggagtccctagccaacattgaacggcgcattgccgagtctaagctgaagaagccaccaaaagctgacgggagccacagagaagatgacgaggactctaaaccaaagccaaactcggatctagaggctgggaagagtctgcctttcatttatggcgacattccacagggactggtggccgttcccctcgaagattttgacccttactacctgactcagaaaaccttcgttgtgcttaaccgaggaaaaacattattcaggtttagtgctactccagctctttacattctttcgcccttcaatctgatcaggcgcatcgccatcaaaattctgatccactctgtgtttagtatgatcatcatgtgtaccatcctgaccaactgtgtgtttatgaccttttccaatcctccggactggtctaaaaacgtggaatatacattcactggcatctacacttttgaatccctggttaaaatcatcgccagggggttctgcattgacgggtttaccttcctgcgggacccatggaattggctggacttcagcgtgataatgatggcgtatattacagagtttgttaacttgggcaacgtgtcagcactaaggacttttagagtgttgcgggccctcaaaaccataagtgtcatccccggcttgaaaaccattgttggagccttaattcaatccgtcaagaaattgtctgacgtgatgatattaactgtgttctgtctttcggtcttcgctttgataggacttcaactcttcatgggtaatttaagaaataaatgcgtcgtctggcctatcaattttaacgaatcatatttagaaaatgggacaaaaggattcgattgggaagaatacatcaataacaaaaccaacttctatactgttcccggcatgctggaaccgctcctttgtggtaactcatccgacgccgggcaatgtccggaagggtaccaatgtatgaaggcgggaaggaaccctaattatggctacacctcctttgatactttttcttgggctttccttgctctgttcaggcttatgacccaggactattgggaaaacctgtaccagctgacgctgagggcagctgggaaaacctatatgatattctttgtgctcgtcatctttgttggcagtttctacctagtgaatctcatcttagcagtagtcgccatggcctacgaagaacaaaaccaggcaacattggaagaggctgagcagaaggaggccgagtttaaggcaatgctggagcaacttaagaaacaacaggaagaagcacaagctgccgccatggcaacttccgcgggaaccgtttccgaagatgctattgaggaagagggggaagagggcggagggagccccagaagttcttccgaaataagcaagttaagcagtaaaagtgcaaaggagcgccggaataggcgtaagaaacgaaagcagaaggagctgtcagaaggtgaagagaaaggggatcctgagaaagtattcaaaagcgaaagcgaggacgggatgcggcgcaaagccttcagactgcccgacaacagaatcggaagaaagttttcaataatgaaccagtctctcctgtcgatacccgggtctccgtttctgtccagacataattccaagtcatccattttctccttccgtggtccaggaaggttccgtgaccccggctctgaaaacgaattcgccgatgatgagcattcaacagtggaagagtccgagggaagacgcgacagcctgtttatccccattcgggcccgggaacggcgatccagctatagcggatacagtgggtattcgcaaggttcccgctcttccagaattttccccagcctgaggcgctcagtgaagcgaaactcgactgtggactgcaacggtgtcgtgagcctgatagggggccctggctctcatatcggtggtcggttactccccgaggcaacgacagaggttgagatcaagaaaaagggtcctgggagcctcctggtttctatggaccagctggccagttatggtcggaaggaccggattaattctattatgtctgtggtgaccaatactctggtggaggaactggaagagagccagagaaaatgccctccctgttggtataagtttgccaacacttttctgatctgggagtgccacccatactggatcaaactcaaagaaatcgtaaatctcatagtcatggatccgttcgtggacctggccataacaatctgtattgttctgaatacactgtttatggccatggaacatcaccctatgactcctcagttcgaacacgttctcgcagtagggaatctagttttcacgggtattttcaccgccgaaatgttcctgaagctaatagcaatggacccttactactacttccaggagggctggaacattttcgatggcttcatagtgagtctgtctctcatggagttgagcctggcagacgtagagggtctcagcgtgctgaggagcttcagactcctgcgcgtttttaaactcgccaaaagctggcctacgctgaacatgctcattaagatcataggcaattcagttggagccttaggaaacctgaccttggtgctggccatcattgtcttcattttcgcagtggtaggtatgcagcttttcggtaagagttataaggagtgtgtctgcaagatcaatcaggactgcgaactgccgagatggcatatgcacgacttcttccattctttcctgattgtgttccgggtgctgtgcggagagtggatcgaaaccatgtgggactgcatggaggtcgccgggcaagctatgtgtcttattgtctttatgatggtgatggtgatcggtaaccttgtggtactaaacttgtttctggcgctgctccttagcagtttcagtgcagataatcttgccgcaaccgatgatgatggcgagatgaataatttgcaaatcagtgtcatacggatcaagaaaggcgtggcctggacaaagctgaaggtgcacgccttcatgcaggcccacttcaagcagcgagaggccgatgaagtcaagcctctcgacgagctgtacgaaaaaaaggccaactgtatcgcgaaccataccggggctgacattcacagaaacggcgacttccagaagaatgggaacgggaccacctccggaatcggatccagtgtcgaaaagtacattatcgatgaggaccatatgtccttcatcaataacccaaacctaacagttcgggtgcccatagcagtgggagagtcagattttgagaatttgaatacagaggatgtaagttcagaaagcgatccagaaggcagcaaggacaagctggatgacacatctagtagcgagggatctaccatagatatcaagcctgaggtcgaagaggtgccagtggagcaacctgaggagtacctcgacccagatgcctgcttcacggagggctgcgtgcaaagatttaagtgctgccaagtcaatatcgaagaggggctgggcaaatcatggtggatactgagaaagacttgttttttgattgtggagcataactggtttgaaacattcataatcttcatgattctattgtcctcgggtgctctggccttcgaggatatttacatcgaacagaggaaaaccatcaggacgattctggagtacgccgataaagttttcacatatatttttatcttggagatgctgctcaaatggactgcatacggcttcgtgaagttttttacgaacgcatggtgctggctggattttctgatcgtggcagtgtcactcgtatctctgatcgcaaacgccctcggctacagcgagctcggcgcgattaaatcgttgaggactcttagggctctcagacccctgagagccttgagcagatttgagggaatgcgcgttgtggtgaatgccctagtgggcgccatccctagcattatgaacgttctattggtgtgtctgattttctggctgattttctcaatcatgggtgtgaatttgttcgccggcaaatatcattattgctttaatgagacgagcgagattcggttcgagatagaggacgtaaacaacaaaacggagtgtgagaagctgatggaagggaacaataccgaaatacgatggaaaaacgtcaagataaacttcgataatgtgggagccgggtatttggcattgctgcaggtagctactttcaaaggctggatggatatcatgtatgccgcagtggactctaggaagccagacgaacagccaaagtatgaagacaacatctacatgtatatttatttcgttatatttatcatcttcggatcttttttcacgctaaacctgtttatcggcgtgatcatcgacaattttaaccagcagaaaaagaagtttgggggccaagatatttttatgacagaggaacagaagaaatattataacgccatgaaaaagttaggctcgaagaaaccacagaaacccattcctcggccactcaataaaattcagggaattgtttttgactttgttacacagcaagcgttcgatattgtcattatgatgttaatttgtttgaacatggtgacaatgatggtggaaaccgatactcagtctaaacaaatggagaacattctctactggatcaacttggtttttgttattttttttacgtgtgagtgtgtcctgaaaatgtttgccctcaggcactattattttacaattggctggaatatcttcgacttcgtggtagtgattctttcgatcgtggggatgttcttggctgatatcattgaaaaatacttcgtctctccgactctcttcagggtcattagactcgcacgcattggcaggattctcagactgatcaaaggtgccaagggcatcagaacgctattgtttgccctcatgatgagtctgcctgctctctttaatattggattgttattatttctcgttatgttcatcttctcgatattcgggatgtccaactttgcttatgtcaaacatgaagccggcatcgacgacatgttcaattttgagacctttggaaacagtatgatctgcctgttccagatcacaacgtccgctggctgggacggcctccttcttccaatacttaaccggccgcccgattgttcattggacaaggagcatcctggaagcggattcaaaggagattgcggcaatccctcggtgggcattttctttttcgtgtcatatatcatcatatccttcttgattgtggtgaatatgtacattgccatcatcctcgaaaacttcagcgtggcaacagaagaatctgcagatcccctcagtgaggatgatttcgagacattttacgaaatctgggaaaagtttgatcctgatgcaacccagtttattgagtattgcaagctggccgatttcgccgacgctctggagcacccgcttcgcgtacctaagccaaatacaatagagctgattgcgatggacctgccaatggtctctggagatcgcattcattgcctcgatatcttgttcgcgtttaccaaaagggtgttgggtgatagcggagagctggatatccttcgtcagcagatggaagagcgcttcgtggcctctaatcccagcaaagttagttacgagccaatcaccacaacacttcggcggaagcaggaagaggtgtctgcagtcgtgttgcagcgagcttacagagggcacctcgcaaggcgcggttttatctgcaagaaaacaacaagtaataagctggaaaacggcggaacccacagggaaaagaaagaatccactccctccacggcaagtttgcccagttatgattcagttacaaaacctgaaaaggaaaagcagcagagggctgaggaaggaaggcgagagcgggcaaagaggcagaaggaggtgagagaatccaaatgttag

SEQ ID NO: 134675 - DNA, 4674 bp, synthetic construct
  misc_feature 1..4674: note = Description of Artificial Sequence: Synthetic coding sequence
  source 1..4674: mol_type = other DNA
atggctgcaaggctgctagctccccccggacctgattcttttaaaccctttacgcctgaatccctggccaacatagaacgtcgaatagcggaaagcaagctgaaaaagccccccaaagcggacgggtcccaccgcgaagacgatgaagactccaagccaaagcccaatagcgacctggaagccggtaaatccttgccattcatatatggcgatataccacaaggcttggtcgccgtcccgctggaggattttgatccctattatttaacacagaaaacgttcgtcgtgctcaatagaggcaagaccctcttccggttttctgccactcctgctctttacatattaagccccttcaatttgatcaggcggatcgctattaaaatcctcatccacagcgtgttcagtatgatcatcatgtgcacaattctgaccaactgcgttttcatgaccttttctaaccccccggattggtccaagaacgtggagtatactttcaccggcatttacacatttgaatctctcgtgaaaatcatcgcacggggattttgcatcgacggcttcaccttcctgcgcgacccgtggaactggcttgacttttcggtgattatgatggcatacatcacggagtttgtgaatctcggaaatgtcagcgcattgagaactttcagggttttgcgcgccctcaaaacaatatctgttattcctggactcaagacaattgtcggggcactgattcaatcggtgaaaaagctatccgacgtgatgatcctgacagtgttctgtttaagtgtgttcgctctcatcggcctgcagctctttatggggaacttgcgaaacaagtgtgtagtgtggcccatcaactttaatgagtcttacctggaaaacgggacgaaaggcttcgattgggaagagtacataaataataaaactaacttctataccgtgcccggaatgctggaaccactcctgtgtgggaattcatccgacgctgggcaatgcccagaaggttaccaatgtatgaaagccgggcgaaatccaaactacggctacacgtcttttgacaccttttcctgggcttttctagcccttttccgccttatgactcaggactattgggagaacctgtatcagttgacgctgcgggcggcagggaagacctacatgatcttttttgttctggtcatattcgtgggatctttctacctggtgaacctgattctcgctgtagtggctatggcatacgaggaacagaatcaggcaaccctggaagaggcagaacagaaagaggctgagttcaaggctatgctagagcagctcaagaagcagcaggaagaggctcaagcagccgctatggcgacctccgccggaacggtgagtgaggacgcaatagaggaggaaggtgaggaaggggggggctcgccccgctcaagtagcgagatctcaaagctcagcagtaagagtgccaaagaacgcagaaatagacgtaagaaaagaaaacagaaggaattgtctgagggggaagagaagggggacccggagaaggttttcaaatcggaaagcgaagatgggatgcgtcggaaggcttttcgacttccagacaaccggataggaagaaagttttccattatgaaccagtcactgctgagtattccagggtccccatttttatcccggcacaactccaaaagcagtattttctccttccgcggcccagggcggttccgcgatcccggatccgagaacgaattcgccgatgatgaacactccacggtggaggagtccgaaggtagaagggacagcctatttatcccaattagggctagggaaagacggtcctcttatagtggatacagtggatatagccaaggtagccgaagcagtaggatcttcccatctctgaggcggtccgtgaagagaaactccaccgtggactgcaacggcgtcgtctccttaatcggcggaccaggatcccatatcgggggtaggctgcttcccgaagccaccaccgaggtggagataaagaagaagggaccgggctcgctgcttgtgtccatggaccagctggcctcctatggtaggaaggacaggattaattcaataatgtcggtcgtgaccaacactctggtggaagagctggaggagtcccaacgaaagtgtcccccatgctggtataaatttgctaatacattcttgatctgggaatgccatccatactggatcaaactcaaggagattgtgaatctgatcgtgatggaccctttcgttgacctggcaattaccatctgtatagtgctgaacactctctttatggccatggaacatcatcccatgacgccgcagttcgaacatgttttggccgttggaaacctggtcttcacaggaatctttactgccgaaatgtttcttaaactgatagcaatggacccctactactatttccaggaggggtggaatatctttgatggattcattgtatcactgtctcttatggagctgagtctggcagacgtagaaggcctttctgtgctgcgctctttcagattgcttagagtcttcaagctcgctaagagctggcctaccctaaacatgctgatcaaaatcatcggcaatagtgttggggctttaggtaacttgacattagtgctggccatcatcgttttcatattcgccgtcgtcggcatgcaattgtttgggaaaagctacaaagagtgtgtgtgtaaaattaatcaagattgcgagctcccgaggtggcacatgcatgatttctttcactcattcctgatcgtctttcgggtgctctgtggcgaatggatagagacaatgtgggattgtatggaggtggctggccaggcaatgtgtctgatcgtgttcatgatggttatggtcattggtaatctcgttgtgcttaatttgtttttggcgctcctgctatcaagcttctccgcggacaatctggctgccactgacgatgacggtgagatgaacaatttacagatttccgtgatacgcattaaaaaaggcgtagcatggaccaaactcaaggtgcatgctttcatgcaagcgcattttaagcaacgcgaagctgacgaggtcaagcctctggatgaattgtatgagaaaaaagctaactgcattgctaatcacaccggagcggatattcacagaaacggggacttccagaaaaatggtaatggcaccacctctggcattgggagttctgtggaaaagtacatcattgatgaagaccatatgagtttcattaacaacccaaacctgaccgttcgcgtcccaatagcggtaggcgaatccgactttgagaacctcaacaccgaggacgtttctagcgaatcggaccctgaggggtccaaggacaagctcgatgacacatcgagttccgagggcagtactattgatatcaagccagaggtggaggaagtgcccgtcgaacaaccagaggagtatctcgatcccgatgcttgctttacagagggatgcgtgcaacgctttaaatgttgtcaagtgaacattgaggaaggattgggcaagagttggtggatccttaggaaaacatgcttcctcattgtggagcataattggtttgaaacgtttatcatttttatgatcctgctgagtagcggcgcgctggcctttgaggacatctacatcgagcagaggaagaccatccggaccatcctggagtacgccgacaaagtctttacgtacatctttatcctagaaatgcttttgaaatggacagcatacggattcgttaaattttttacaaacgcatggtgttggctggattttttgatcgttgctgtggtggtgaacgccctggtcggtgcaattccttctatcatgaacgtcctcctggtttgcctgattttttggttaattttttctatcatgggcgtcaacttatttgccggtaaatatcattattgcttcaacgagactagtgagattagattcgagatcgaagacgttaacaataagaccgagtgtgagaaactaatggaaggaaataataccgagatccgatggaagaatgtaaaaataaactttgacaatgtgggggccgggtacctcgcactgctccaagtcgcgacattcaagggctggatggatatcatgtacgccgccgtggatagccgcaagcccgacgaacagccaaaatatgaggacaacatttacatgtatatctactttgtcatattcattattttcgggtccttctttaccctcaatttgttcattggcgtcattatcgacaacttcaaccaacagaagaagaaatttggcggtcaagacatatttatgacggaggagcagaaaaagtattataatgctatgaagaagctggggagcaaaaaaccacagaaacccatacctaggcctctcaataagatccagggcatcgtcttcgatttcgtgacccagcaggcattcgatatcgttataatgatgctgatctgcctgaacatggttacaatgatggtcgagaccgatacccagtctaagcagatggagaatattctgtactggattaacttggtgttcgttatcttctttacgtgcgaatgcgttctcaagatgtttgctttgagacattattactttacaatcggatggaacatcttcgactttgtggttgtgatcctcagcatagtctag

SEQ ID NO: 134676 - DNA, 3588 bp, synthetic construct
  misc_feature 1..3588: note = Description of Artificial Sequence: Synthetic coding sequence
  source 1..3588: mol_type = other DNA
ttcctaagtccgcagacctttgtggtcctaaatcggggcaaaacgctgttcaggtttagtgccacacccgcattgtacattctgagtccattcaatctgatacggaggatcgccattaaaattcttatacatagtctgttttccatgattatcatgtgcactattctcactaattgcgtcttcatgactttttcaaatcctcctgattggagcaagaacgtggaatacacattcaccggcatatataccttcgaaagcctggtaaagattattgccagaggcttctgcattgacgggtttacgtttctgagagacccatggaattggttggatttcagtgtcattatgatggcatacattacagaattcgtaaacctggggaacgtttccgccctgcgcacgtttagagtcttgagggcacttaagacaatatccgtgatacctggtcttaaaacaatcgttggtgcgctgatccagagcgtcaagaaactctcagatgttatgattcttactgtattttgtttgagcgtgtttgcactcattggtctgcagctgtttatgggaaacctccggaataagtgtgtggtgtggcccataaatttcaatgagagctacctcgagaatgggaccaagggcttcgattgggaagagtacatcaataataagaccaatttctacactgtgcccggtatgttggagcctcttttgtgtggaaactcatccgacgcaggccagtgccccgaaggctatcagtgcatgaaggcgggcaggaatcccaattacggctacacatcatttgatacctttagttgggcctttcttgcgctttttagacttatgacacaggactattgggagaatctgtaccagctgacactgcgggcggccggaaaaacttatatgatcttttttgttctagtgatcttcgttggcagcttctatctggtcaacctgattctggccgtggtggccatggcttatgaggaacagaatcaggccacactggaggaggctgaacagaaggaggctgagttcaaagctatgctggaacaactgaagaagcaacaggaggaagctcaggcagccgccatggcaactagcgccgggaccgtgagtgaggacgctatagaggaggaaggagaagagggcgggggctcgccccgcagctccagcgaaatctccaaattgtcctctaaatctgcaaaggagaggagaaatagaagaaagaagcggaaacagaaagaacttagcgagggcgaggaaaagggcgaccctgagaaagtattcaagtcagaatccgaggacggcatgcgtaggaaggcctttcggctgcccgataatagaattggcagaaaattttccattatgaaccagagcctcttgtcaattcctgggagtccatttctgagccgccataattccaaatcatccatcttttcattccgaggtcccggccgtttccgcgacccagggagcgagaatgaatttgccgacgatgaacatagtacagtggaagaatctgaagggcgtagggactctttattcatacctataagagctcgggagcgtcgttcctcttacagcggttactctggctactctcagggttccagatccagccgaatctttccatcactgcggcgctccgtgaaacgcaactcgactgtagactgcaacggggttgttagtctaataggaggacccggaagccacatcggtggaaggcttctcccagaagctaccaccgaagtggagatcaaaaaaaagggacctggctccttgctcgtctcaatggatcagctcgcgagctatggaaggaaggaccgcatcaacagcatcatgtccgtggtgaccaataccctggtggaagagttggaagagtctcagaggaaatgtccaccatgctggtataaatttgcgaatacttttctcatctgggagtgccatccctactggattaaactgaaagagattgttaatctgattgtgatggatcctttcgtcgacctggctattacaatttgtattgtgttaaatacactttttatggcaatggagcatcatcccatgacaccccagttcgaacacgttcttgcggttggaaacctggtgttcactggtatcttcaccgcggaaatgtttctaaagctgattgctatggacccctattattactttcaggaaggctggaatatttttgacggcttcattgtgtccctgtccctgatggagctgtcgttggccgatgttgagggacttagcgttttgcgatccttcaggctgttgcgggtgtttaagttagccaagagctggccaaccctcaacatgctaatcaaaattatcggtaattccgtcggagccctgggtaacctcaccctggtgctagctatcatcgtttttatttttgcagtagtggggatgcagctgtttggaaaatcgtacaaggaatgcgtttgcaagatcaaccaggattgcgaactgccaaggtggcacatgcatgatttctttcactcctttctgatcgtttttcgggtgttatgcggtgaatggattgagacaatgtgggattgtatggaggtggctggtcaggcgatgtgtctgattgtttttatgatggtcatggtgatcggcaatctcgttgttctgaatttgtttcttgccctgctgctgtcatctttttcagctgataacctggctgccaccgacgatgacggcgaaatgaacaatttgcagatcagcgtcatccggataaaaaaaggggtggcctggacaaaactcaaagtgcacgccttcatgcaagcacatttcaagcagagggaagctgatgaggtgaagcccctggacgagctgtacgaaaagaaagccaactgcatagccaaccacaccggggcagatattcatcgtaatggcgattttcagaaaaacggcaacggcacaacttctggcatcggttctagcgtcgagaaatatatcatcgatgaagatcacatgagcttcattaacaaccccaatctgaccgttagagtgcccatagcagttggagaatccgatttcgagaacctcaacacggaggatgtttcctctgagagtgacccagaaggcagcaaagacaagctggatgatacatcttcctcagaaggcagtactattgatatcaagcccgaagtggaagaagtgcccgttgagcagcccgaggaatatctagatcctgatgcttgtttcaccgaggggtgtgtgcagagattcaagtgctgccaagtgaacattgaagaggggttggggaaaagctggtggatactgcgcaaaacgtgttttctgattgttgagcacaattggtttgagacatttattatctttatgattctgctgtcaagcggtgctctggctttcgaggacatctatatcgagcagagaaagactattagaacaatcctggaatacgccgacaaagtatttacatacattttcatattagagatgcttctgaagtggacagcttacgggttcgtcaagttcttcacaaacgcctggtgctggctggattttctgattgtcgctgtgccgttgaatctttccggattaatctag

SEQ ID NO: 134677 - DNA, 5820 bp, synthetic construct
  misc_feature 1..5820: note = Description of Artificial Sequence: Synthetic coding sequence
  source 1..5820: mol_type = other DNA
atggctgcccgtctgctagccccaccaggacctgactcgttcaaacccttcacgcctgagtctttggctaacatcgaaagaagaatcgctgagtccaagctcaagaaaccgccgaaagccgacggatcacatcgggaggacgatgaggacagtaaaccaaagcccaactccgacctggaggccggaaagtctctgcccttcatatatggagatatcccccagggtctcgttgctgtgccactagaagactttgacccatattacttaacccagaagaccttcgttgtgctaaaccggggaaaaaccctcttcaggttcagcgccacacccgccctatatatcctttctccttttaatttaatcaggagaattgccataaagatacttattcactctgtgtttagcatgattatcatgtgtacaattttgaccaattgcgtcttcatgacattcagtaatcctcctgactggagcaagaacgtcgagtacactttcaccggcatctacactttcgaatctttggttaagattatcgcaagagggttctgcatagacggatttaccttccttcgagacccatggaactggctggatttctcggtaattatgatggcttacattactgagtttgtcaatttgggcaatgtatctgctctgaggacttttcgggtgctgcgggcacttaaaactatctccgtgattcccggcctgaagacaatcgttggggccctgattcagagtgtgaagaagctcagtgacgtcatgatcctcaccgtattctgcctatccgtatttgctcttattgggctgcagcttttcatggggaatttgaggaacaagtgcgtcgtgtggcctatcaatttcaatgagtcgtacctggaaaacggtactaaaggctttgactgggaagaatacatcaacaataaaacgaacttttacacggtgcccggcatgcttgagcctttactgtgtggcaatagtagtgacgccggacagtgtccagaaggctaccaatgtatgaaggctgggcgcaaccctaattatgggtatacatccttcgacaccttctcctgggctttcctagccctgttccgactaatgactcaagactattgggagaatctataccagctgactttaagggccgcagggaaaacctacatgatttttttcgtgctcgtgatcttcgtcgggagcttctatctggtcaacctgatactagctgtggtggccatggcctatgaggagcagaaccaggccaccttggaggaggcagagcagaaggaagccgagttcaaggccatgctggagcagctgaaaaagcaacaggaagaagctcaggccgccgcaatggctacgtcagcgggaacagtctcagaggacgcgatcgaagaagagggcgaggaaggcggggggtctccccggtcaagcagcgagattagcaaattgtcatccaaaagtgccaaagaacgacggaatagaagaaagaagaggaagcaaaaggaactttccgaaggagaagaaaagggggatcctgagaaggtttttaaatcagagtctgaggatggtatgaggcgcaaggcatttaggctgcctgataatcgtatcggtagaaaattctccattatgaatcagtccctgctgtctatccctggctcacccttccttagccgccacaattctaaatcctccatcttcagtttccgaggtccaggcaggttccgcgaccctggatctgagaacgaatttgccgacgatgagcatagcaccgttgaagagtcagaaggaaggagagattcccttttcatacctattagggccagagaacgcagatcgtcttactccgggtatagcggctacagtcagggatctcgatccagccggatatttccgagtcttcggcgttccgtaaagagaaactctaccgtggactgtaatggggtggttagcctcattgggggccctggatctcatattggaggacggttgctgcccgaagcaaccacagaggttgagatcaagaaaaaggggcccggatccctgctcgtgagtatggaccaattggcatcttatgggcgaaaggatcgaatcaactccattatgtctgtggtgacgaatacactggtggaggaactggaagaaagtcagaggaaatgtcccccttgctggtacaagttcgccaacactttccttatttgggaatgccatccttactggatcaagctgaaggaaattgtgaatctgatagtgatggaccccttcgtcgacctagctatcactatctgcatcgtgcttaacacacttttcatggccatggagcatcatcctatgactccccagtttgagcacgtgctcgctgtgggtaacctggtttttactggtattttcactgccgagatgtttttaaaactaatcgctatggacccctattattactttcaagagggctggaacatatttgatgggtttattgttagtctctcactcatggaactgagtctcgcggacgtggaagggctgagtgtgttacgcagctttcggcttctcagagtcttcaaacttgctaagtcatggcctacgctgaatatgctgatcaaaatcattggcaacagcgttggcgcacttgggaaccttactttagtgctagctataatagtttttattttcgccgttgtcggtatgcagttgtttggcaagagctacaaagagtgtgtgtgtaagattaaccaggattgcgagttaccacgctggcacatgcatgatttctttcactctttcctgatagtgttccgagttttgtgcggggaatggattgaaaccatgtgggactgtatggaggtggctgggcaggcgatgtgtcttatcgtgtttatgatggttatggtgatcggcaacctcgtggtgttgaacctgttcttagcgcttctgttatcatccttcagcgccgacaacctggccgcaacggacgatgatggtgagatgaacaaccttcaaattagtgtgatcagaatcaaaaaaggcgtcgcttggactaaattaaaagtccacgcttttatgcaggcccattttaagcagcgagaagctgatgaggtgaagccattggacgaactttacgagaagaaggctaactgtattgctaaccacacaggtgctgatatacatcgcaacggcgacttccaaaagaatggaaacggcactacctccggtatcgggtcttcggtcgagaagtacatcattgatgaggatcacatgagttttatcaataaccctaatctgaccgtgagagtgccgattgccgtgggagagtcagatttcgaaaatctgaacacggaggatgtctcgtctgaaagcgaccccgagggtagcaaggacaagcttgacgacacctcctctagtgagggatctactatagacattaaacccgaagtggaggaagtgcctgtggagcagccggaggaatacctggacccggatgcctgtttcactgaagggtgcgtccagaggtttaagtgttgccaggtcaatatcgaagaaggactgggcaaaagctggtggattctgaggaaaacctgcttcctgatcgtggaacataattggtttgaaacctttatcattttcatgatcctgctgtccagcggagctttggctttcgaggatatatacatcgagcaacgcaagactattagaacaattttagagtatgcggacaaggtcttcacatacatcttcatactcgaaatgctgctgaagtggaccgcctacgggttcgtgaaattctttacgaacgcttggtgctggttggacttccttatcgttgcagtcgtagttaacgctttagtgggcgccattcccagtatcatgaacgtgttgctggtgtgcttgatcttttggttaatcttcagtattatgggagtgaatctgttcgccgggaaataccattattgcttcaatgagacttcagagatccgatttgaaatcgaagatgtgaacaacaaaacagagtgtgagaaactgatggaaggcaacaatacagaaattcgctggaaaaacgtaaaaatcaatttcgacaatgtcggagcaggatacctggctctgttgcaggttgccacttttaaggggtggatggacatcatgtatgccgctgtggactctcgcaagcctgatgagcaaccaaagtacgaggacaacatctacatgtacatttattttgtgatattcatcatctttggctctttcttcacactgaacctcttcatcggagtgatcattgataactttaaccagcagaagaaaaaattcggggggcaggatatttttatgacagaagagcaaaagaagtattacaacgccatgaagaagctggggagcaagaaaccgcagaagcccatacctcgcccattaaataagatacaggggattgtgtttgacttcgtaacacaacaagcctttgatatcgtcatcatgatgttgatatgtctcaacatggtgaccatgatggtggagacggacacccaaagtaagcagatggaaaacatcttatattggattaacttagtctttgtaatattctttacgtgcgagtgcgtactgaaaatgtttgctctgcgtcactattactttacaatcggctggaacatatttgacttcgtagtggtgattctgtctatcgtaggtatgttccttgcagacatcatcgaaaagtattttgtgtcgccaacgttgttccgcgtgatccgcctcgctcgcattggcaggattttgcggttgataaagggagccaaggggataagaaccctgcttttcgctctgatgatgtccctccctgcattatttaacatcggtttgttgctctttctggtcatgtttatcttctctatttttggaatgtccaacttcgcatatgttaagcacgaggctggcattgacgatatgttcaatttcgagactttcggcaattctatgatctgcctgttccagatcacaacctctgccggctgggacgggttgttactgccaattcttaaccgacctcccgactgttccctggataaagagcatcctggctccgggtttaaaggcgactgcggaaatccctcagttgggatctttttctttgtgagctacattatcatcagcttcctcatagtggtgaacatgtatattgctatcattctggagaatttttctgttgctacagaggagagcgccgacccactatcggaggacgacttcgaaacattctacgagatttgggaaaagttcgatcccgacgcaacccagttcatcgagtactgtaagctcgccgacttcgctgatgcacttgagcaccctctgcgtgtaccaaaacctaataccatcgaacttatcgctatggatctgccgatggtgtccggcgacagaatacactgtcttgatatactgttcgcctttaccaaaagagttttaggagattcgggagagctggatatcctgagacaacagatggaagaacgcttcgttgcctccaatccgagcaaggtttcatacgaacccatcactaccactctgcgtcggaagcaggaggaagtgagcgccgtggtactgcagagagcttaccgaggacacctcgctcggcggggatttatctgcaagaagacgacatcaaacaagcttgagaatggaggcacacacagggaaaagaaggaatctaccccctctacagcttcactgcctagttacgattctgtgacaaagcctgagaaggagaaacagcagagggccgaagagggtcgcagggaacgtgctaaacgccagaaagaggtgagggaaagtaagtgctag

SEQ ID NO: 134678 - DNA, 2919 bp, synthetic construct
  misc_feature 1..2919: note = Description of Artificial Sequence: Synthetic coding sequence
  source 1..2919: mol_type = other DNA
atggctgcccggttgctggctcctcccgggccagatagtttcaagccttttacaccagaatcattagcaaacatcgaaaggagaatcgcggaaagcaaattaaaaaagccacccaaagctgatggctcccaccgtgaagatgatgaggacagcaagccaaagccaaattcggacttggaagctggcaagagtttgccctttatttacggtgacattccccaggggctggtagcagtcccccttgaggattttgatccctactatttgacccagaagacgttcgtggtcttgaacaggggcaagacactgtttcgattctccgcaacacctgccctctatattttaagcccgttcaatcttatccgaaggatcgccattaagatccttatccacagtgtcttttcaatgatcatcatgtgcaccattttgacgaactgtgtgtttatgacattctctaatcccccagattggtctaagaacgtcgagtatactttcaccggcatctacacgtttgagtctctcgtgaaaatcatcgctcgaggattttgtatcgacggctttacctttttgcgggacccctggaactggctggacttttccgtcattatgatggcctatgttacagagtttgtggacctggggaatgtatcggccttgagaacattccgggttctgagggctctgaagacaatctccgtgattcccggtctcaagacaatagtcggcgcactgatacagtctgtaaaaaagcttagcgatgtcatgattctgacagtgttttgtttatccgtgtttgcccttatagggttacagctgtttatgggcaatctgcggaacaagtgtgtcgtgtggcctattaacttcaatgagagttacttggaaaacggcaccaaggggtttgattgggaggagtatattaataataagaccaacttctacacagtgcccggtatgctggagccccttttgtgcgggaactcttccgacgctggccagtgccctgaaggatatcaatgcatgaaggcaggccgcaaccccaattacggatacacatcattcgatacattctcctgggccttcctggcacttttcagactcatgacacaggattactgggaaaatctgtaccagctgactctgcgcgccgctggcaaaacgtacatgatctttttcgtccttgtgattttcgtagggagcttctacttggtaaacctgattttggccgtcgtggccatggcttatgaagagcaaaaccaggccacacttgaggaagctgagcagaaagaagccgagttcaaggccatgctggagcagctgaagaaacagcaagaagaggcgcaggccgccgctatggccacgagcgctgggaccgtaagtgaggacgcaatcgaagaagaaggcgaagagggcgggggcagtccacgtagctcttcagagatctccaagctgtcttccaagagcgccaaggaaaggcgaaatcgccgaaaaaaaagaaagcagaaggagctttccgagggcgaggagaaaggagaccctgagaaggtctttaaaagcgaatctgaagatggaatgcgccgtaaagcctttcggctgcccgacaaccggattggaagaaagttcagcattatgaaccagagcctgttaagcattccaggatcaccattcttatcaagacataattccaagagttcaattttttcttttcggggaccggggcgcttcagagatcccgggtctgagaatgaattcgctgatgatgagcattctaccgtcgaggagtccgaagggcggagagattcccttttcatccccatcagagcgcgggagcgaagatctagctatagtggatattcaggatacagtcagggatcccggtcgtcacgcattttcccaagcctgcgccgcagcgtgaaacgaaactctaccgtcgattgcaacggcgtagtaagtctgatcggcggacctgggagccatattgggggcagacttctgccagaagccacgaccgaggtcgaaattaaaaagaaaggcccaggatccctccttgtgagcatggatcaacttgctagctatgggagaaaagatcggatcaatagtattatgtctgttgtgacaaatactctggtagaagagctggaagagtcacagaggaagtgtcctccttgctggtacaaatttgctaacacctttctcatctgggagtgccacccatattggatcaagctgaaggagatcgttaacctgattgtcatggatcccttcgtcgatcttgccatcacgatttgtattgtcctaaatactcttttcatggccatggaacaccaccctatgactccacagtttgaacatgtgttggccgttggcaacctggtctttaccggtatctttaccgctgagatgtttctaaaactgattgccatggatccgtactactatttccaggaagggtggaatatttttgatggttttatagtgagccttagcttaatggaactgtcactggccgatgttgagggcctgagtgtgcttcgctcctttcggctactcagggtcttcaaacttgccaaatcatggcctaccctcaacatgcttataaaaattatcggaaactctgtcggagccctaggcaatttaaccctggtgctggctattattgttttcatttttgcagtggtggggatgcagttgttcggaaaaagctataaggaatgtgtctgcaagatcaaccaagactgtgaactgcctcgatggcacatgcacgatttctttcattcctttctgattgtgtttcgtgtgctgtgcggagaatggatagaaacaatgtgggattgcatggaggttgccggccaggcaatgtgtctcatcgtgtttatgatggtgatggtcatcggcaacctcgtcgtcagcaccaatttgtag

SEQ ID NO: 134679 - DNA, 6030 bp, synthetic construct
  misc_feature 1..6030: note = Description of Artificial Sequence: Synthetic coding sequence
  source 1..6030: mol_type = other DNA
atggagcagacggtgttagtgccccctggaccggatagctttaactttttcacccgagagagcctggcagccatcgagcggcgcatcgctgaagaaaaggccaagaacccgaaacccgataaaaaggacgacgacgagaatggccctaaaccaaatagcgacctggaggcgggaaaaaacctgccttttatttatggagacatcccccccgaaatggtgtctgagcctttggaagatttagatccctattacataaataagaaaacttttatcgtcctgaacaaagggaaagccatcttccgattttctgctaccagcgcactgtacattctcacaccttttaatccattgaggaaaattgcaataaagatcctggttcatagcttgttcagcatgctcatcatgtgcacaatcctcactaactgtgtatttatgacaatgtccaacccccctgactggactaaaaatgtggaatataccttcaccggaatttatacattcgaatcccttattaaaattatagcgcgggggttttgcctggaagatttcacgttcctcagggacccttggaattggctggatttcactgtgattacctttgcatacgtgactgaattcgttgatctagggaacgtgagtgctctgagaacatttcgggtgctgcgagctctcaaaacaatatctgtcattcctggtctgaaaaccattgtcggagccttgattcagagcgtgaagaaattaagtgatgtcatgattctgaccgtgttttgtctgtccgtgtttgcccttatcggcctccaacttttcatggggaacctgcggaacaaatgcatccagtggccccccaccaacgcaagcctcgaagaacatagcatcgaaaagaacatcacggtgaactacaacggtaccctgataaacgagacagtcttcgagtttgattggaaatcatacatccaggactcccggtaccactatttcctggaagggtttctggacgccctgttatgcggcaacagttcagacgcaggacagtgccccgaaggttatatgtgcgtaaaggccggacggaatcccaattatggttatacatcatttgataccttcagctgggcctttttgtccctattccgacttatgacccaggatttttgggagaatctgtaccagttgaccctgcgggcagcaggcaagacatatatgatatttttcgtgctcgtgattttccttggctccttttacctgattaacctcatcctggcggtggtggctatggcgtacgaggaacaaaatcaggccaccctggaagaagccgagcagaaagaggccgaattccagcagatgatagaacagcttaaaaagcagcaagaagcagcacaacaagccgccaccgccaccgcctcggagcattcgagggaaccatccgcagcaggtaggttgtctgactccagctcagaggcctctaaattatcttcgaagagcgccaaggagcgccgtaatagacgaaagaaacgtaagcagaaagagcagagcgggggggaagagaaggatgaagacgagttccagaagtcagagagcgaagacagcattagaagaaagggcttcagattttccatcgaggggaatcgcctgacttacgaaaagcgctactcgagccctcatcaaagcctgctcagtatacggggcagcttgttctcaccccgcaggaactctcgtaccagcctcttcagcttcagaggtcgtgccaaggatgtggggtccgagaatgacttcgcggacgacgagcattcgacatttgaggacaacgagtctagaagagactcactgttcgttccccggcgtcatggcgagcggcgtaactcgaacctgtctcagacaagtcggtccagccgaatgctggctgtgttcccggctaatggtaagatgcactccaccgtagactgcaatggagttgtatctctggtgggcggtccgtcagtgccaacaagcccagtaggtcagttgcttccagaggtgataatcgataagccagcgactgatgacaacggaacgaccactgaaactgaaatgaggaagaggcggagctcttcattccatgtctccatggacttcttggaagacccttcacagcgccagcgagcgatgtctattgcctctatcctaactaatacagtagaggagttagaggaaagccggcagaagtgccccccatgctggtataagttcagtaatatattcctgatttgggattgcagcccttattggcttaaagtcaaacatgtggtgaatttagtggtaatggacccattcgtggacctcgcaatcacgatctgcatcgtcctaaacacccttttcatggccatggaacactaccccatgaccgaccactttaacaacgtgcttactgttggtaacctcgtctttactggaatctttaccgcagagatgtttttgaagattattgcaatggacccatactactatttccaggaaggctggaacatttttgacgggtttattgtgaccctctcactcgtcgaactgggtctcgccaatgtcgaaggcctttctgttttaagatctttccggctgctgagagtgtttaaacttgccaagtcttggcccacgctcaatatgctaatcaagattattgggaatagtgtaggggccctcggaaacctgacactagtgctcgcaattattgtttttatatttgccgtcgttgggatgcagctgttcgggaagtcctacaaggactgcgtttgcaagattgcgtcagactgccagttaccacgttggcacatgaacgattttttccactcattccttatcgtcttccgagtactctgtggtgagtggattgagaccatgtgggactgtatggaggtggcggggcaggcaatgtgtctaactgtgttcatgatggttatggtcatcggaaacctcgtagttctgaacctctttctggcgctcctcctgtctagtttctccgccgacaatttggccgctaccgacgacgataatgaaatgaacaatctccagatcgccgtggaccgtatgcacaaaggtgtagcctacgtaaaaaggaaaatttacgagtttattcagcagagcttcatcaggaagcagaaaatccttgacgaaatcaaacccctcgatgacctcaacaacaaaaaggattcctgtatgtccaatcatactgctgaaataggaaaggacctcgattacttgaaagacgtcaatgggactacatccgggatagggacagggagcagcgtcgaaaagtacattatagacgaatccgattatatgtccttcatcaacaatccgagtttgactgtgactgtcccaatagccgtgggagagtcagacttcgagaacctcaatactgaggacttttccagtgagtccgacctcgaggaatcaaaggaaaagctgaacgaatcatcctcaagcagcgagggaagcacagtggatattggtgccccagtggaggaacagcctgtcgtggaacccgaggagacactggagcccgaagcatgttttacggaggggtgcgtccagcgcttcaagtgctgtcagatcaatgtggaagagggccgtgggaagcagtggtggaacctgcgcaggacgtgcttcagaatcgttgagcacaattggttcgagacctttattgtgttcatgattctgctgagttcaggcgccttggcctttgaggatatatacatcgatcagcgcaagacaataaagacaatgttagagtacgctgataaggtgttcacgtacatcttcatcctggagatgctgctcaagtgggtcgcttatggctaccaaacctacttcacaaacgcatggtgctggctggatttcctgattgtggacgtttcactcgtcagtcttactgccaatgctctgggatattccgaattaggcgccatcaagtctctgcggactctcagagccctgagaccacttcgcgccctctccaggtttgagggtatgcgcgttgttgtcaatgctctactgggcgccattccatcaataatgaacgtgctgctggtgtgccttattttttggttaatctttagtatcatgggagtcaacctgtttgccgggaagttctaccactgcattaacactacaacaggggacaggtttgacatcgaagacgtcaacaaccacactgactgtctcaagttgattgaaaggaatgagactgctcgttggaagaatgtcaaggtgaatttcgataacgttggcttcggttatctgtccttgcttcaggtcgccactttcaagggttggatggacattatgtacgcggccgttgactctaggaacgtggagctccagccaaagtatgaggaatcactgtacatgtacctgtacttcgtcatattcatcatctttggcagcttcttcacactcaatttgtttattggggtcatcattgataactttaaccaacagaagaagaagtttggtggtcaggatatatttatgacggaagagcagaaaaagtactacaacgccatgaagaaactaggcagcaaaaagcctcaaaagcctattcccaggcctggaaataagtttcagggcatggtcttcgatttcgttacccgccaagtgttcgacatcagcatcatgatcctcatttgtttaaacatggttacaatgatggtggagaccgatgaccaaagtgagtacgtaactacaatcctgtcccgcataaatcttgttttcattgttttgttcaccggtgaatgcgtcctcaaactgattagtctccgccattattattttaccatcggctggaacatttttgattttgtcgtggtcattctgtctatcgtgggaatgtttcttgcagagctaatagagaagtacttcgtgtcacctactctgttcagggttattagacttgcacggattggacgaatcctgcggctgataaagggcgctaaaggtattcgtaccctgctctttgccctgatgatgtccctcccggcgctgttcaatattggattgctgttgtttctcgtgatgtttatttacgctattttcgggatgtccaattttgcttatgttaagagagaggtagggattgatgacatgtttaatttcgaaacattcggcaatagcatgatttgcctcttccagattacgacaagtgctggatgggatggactgctggcccccatcctgaatagtaaacctcctgactgtgatcccaacaaggtgaaccccggttcgagcgtcaaaggagattgcggaaacccgagtgtaggcatcttttttttcgtgtcatatatcatcatctcatttctcgtcgtggttaatatgtacatcgccgtgatcttggaaaacttcagcgtggcaacagaggagagcgcagagcccctctctgaagatgattttgagatgttctacgaggtctgggagaagttcgatccagacgccacccagtttatggagttcgaaaagctcagccagttcgcggccgcactggagcctcccctcaaccttccgcagcccaataaactacagctgattgcaatggacctgcctatggtctccggagacaggattcactgcctagacatccttttcgcatttacaaaacgagttttgggggaaagtggagagatggacgccctcaggatccagatggaggagcggttcatggctagtaaccccagcaaggtctcataccaacctatcacaacaacactgaagcgcaaacaggaggaggtgtcagccgtgatcatacagcgagcctaccggagacatctgttaaaaaggactgtgaaacaagcaagcttcacgtataataagaacaaaatcaagggaggcgcaaatctcctgatcaaggaggacatgataatagatcgtatcaatgaaaacagtataacggaaaagacagacctgactatgagcaccgccgcatgcccaccgtcttacgaccgtgtgactaagccaatcgtggaaaagcacgaacaagaggggaaggacgagaaggctaaaggaaaatag

SEQ ID NO: 134680 - DNA, 5997 bp, synthetic construct
  misc_feature 1..5997: note = Description of Artificial Sequence: Synthetic coding sequence
  source 1..5997: mol_type = other DNA
atggagcagaccgtgttggtaccgccaggcccggactcgttcaacttttttaccagagaatccctagcggccatagaaagacgcattgcagaggagaaagctaagaaccctaaaccagacaaaaaggacgatgacgagaatggtcccaagcccaactctgatcttgaggccggcaagaatcttcccttcatctatggggatatacctcctgagatggtgtcagagccgctcgaggacctggatccctattacattaacaaaaagacgttcatcgtgttaaacaagggaaaggcaatcttccggtttagtgctacttctgcactgtatatactgaccccatttaaccctctgcgcaaaattgcgattaaaatcctggttcactccttgtttagtatgttgattatgtgtaccatcctgaccaattgcgtgtttatgactatgtccaacccgcccgactggactaagaacgtagaatatacttttaccggaatatacacatttgaatctctgatcaagattatcgcgagaggcttttgtctggaagattttacctttctgagagatccctggaattggctggacttcacagtgatcacctttgcttacgtgaccgagttcgtggatcttgggaatgttagtgccctaagaacttttcgcgtgttgagagccttaaaaactatctctgttatccccgggctcaaaaccattgtcggcgcccttattcaatccgtgaagaagctgtcggatgttatgatcctaacagtcttctgtttgtccgtattcgcacttatcggactgcagcttttcatggggaacctgcggaataagtgcatacagtggccaccgacaaatgcatcattggaggagcacagcattgaaaagaacatcacagtgaactataatggtactctgattaatgaaactgtgttcgaattcgattggaagtcctacatccaggactcgcgataccactactttctcgaggggtttctcgatgctctgctatgcggaaattcctccgatgccgggcagtgtccagagggctatatgtgcgtgaaggccggcagaaaccccaactacggatacaccagttttgacacgttctcgtgggcttttctttccctgtttcgactgatgacacaggacttctgggagaatctgtatcagcttaccttgagggccgccggcaaaacgtatatgatatttttcgttctcgtcattttccttggatccttctacctgattaacctgattctggccgtcgtcgcaatggcctatgaggagcaaaatcaggccacactggaagaagccgaacaaaaggaagcagaattccagcagatgatcgagcagttgaagaagcagcaagaagcagcccagcaggcggcgaccgccaccgcatctgaacactcccgggagccgagcgctgcgggaagactgagcgactcgtcctcagaggcttccaaattgagttccaagtctgccaaggaacgtaggaaccgcagaaagaagagaaagcaaaaagaacagagcggcggggaggagaaggacgaggatgaattccagaagagtgagtccgaggactccatcagacgcaagggtttcaggttcagtattgagggcaacagacttacttatgagaagagatacagctctccacatcagagtctgctcagtatccgcggcagtctcttctcaccccggaggaacagccggactagcttattttcattccggggccgagccaaagacgttgggagtgagaatgattttgcagacgacgaacattctacgtttgaggataatgagagtcgcagagactcattatttgtccccaggagacacggcgaacggagaaactcaaatttgtcacagaccagccgatctagccgtatgctggctgtcttccccgccaacggcaagatgcactcgactgttgactgcaacggtgtggtgtccttggttggaggaccttctgtaccaacttcaccagtggggcagctgctgcccgagggtacaacaacagagactgaaatgaggaagcgcaggtcctcctcatttcacgtgtctatggattttcttgaggacccctctcaaaggcaacgcgccatgagcatagccagtattttgacgaacacggtggaagagctggaagaatcccgacagaagtgtccaccttgttggtataagttcagcaacatcttcctgatatgggactgttcaccctattggctgaaggttaaacacgttgttaaccttgttgtgatggatcccttcgtagatctggccatcaccatttgtattgtactcaatacactgttcatggctatggaacactaccctatgacagatcacttcaacaatgttcttacggtcggaaacttggttttcaccggcattttcacagctgagatgttcctgaagatcattgctatggacccttattattatttccaagagggttggaatatctttgacggctttatcgtgacactgagcctggtagagctcggtttagcaaacgtggaggggctctctgttttaagatcattccgcttattgagggtgttcaaactcgctaagtcgtggccaacgctgaatatgctgataaaaattattggtaacagcgtaggggcccttggaaacctgactttggtcctggctatcattgtcttcatcttcgccgtagtgggaatgcagctgttcggcaaatcctacaaggactgtgtttgtaagattgcctcagattgtcagctgcctcggtggcacatgaatgacttcttccattcctttctgattgtgtttagagtcctgtgcggagagtggatagaaacaatgtgggactgcatggaagtcgctggtcaggcaatgtgccttaccgtttttatgatggtgatggtcataggtaatctggttgtgctcaacctattcctagctttgctcctgtcctcattcagtgctgacaacctggcggccacagatgacgacaatgagatgaacaacctgcaaatagcggtcgacagaatgcacaagggcgtggcatatgttaaacggaagatttatgaattcattcaacaaagctttataaggaagcagaagatactggacgagatcaagcccctcgatgatctcaacaataagaaggattcttgtatgagcaaccatacggccgaaattggaaaggatctggactacttgaaggatgtgaacggcaccacttccggtatagggactggaagcagcgtggagaagtatatcattgacgagtcagactacatgtccttcataaataatcctagtctcacagtgactgtacctattgcagtaggggagagcgatttcgagaatctcaatacagaggatttttctagcgaaagtgacctggaggagagtaaagaaaaactgaacgaatcgtcctcaagctctgagggctcaacagtggatattggcgcaccagtcgaggaacaacctgttgtggaacccgaagagaccctggagccagaggcttgcttcaccgaagggtgcgtgcaacgcttcaagtgttgccagattaacgtggaggagggacggggcaagcagtggtggaatctgagacggacttgttttcgcatcgtcgagcacaattggtttgaaaccttcattgtgtttatgattctgctgtccagtggcgcgctagcttttgaggatatctacatcgaccagcgcaaaaccataaagactatgcttgagtacgctgacaaggtgttcacatacatttttattttagaaatgctgctgaaatgggtagcttacggttatcaaacctacttcactaatgcatggtgttggctggactttcttattgtcgatgtatcactggttagcctgacagcaaacgctctggggtatagcgagttaggggccattaagagcctgcgcactctccgtgccctgcggcctctgagggccttatcccgattcgaagggatgcgcgtggttgttaatgctttactgggggctataccttccattatgaacgttctgctggtgtgcttgatattctggttaatattcagtatcatgggcgtcaacctatttgcaggcaagttctaccactgcattaacacaacaacaggagaccgcttcgatattgaggatgttaacaaccacacagactgtttaaagctcatagagagaaatgagaccgcccgctggaagaacgtgaaggtaaacttcgataatgtgggttttggctatctgtctctcctccaggtcgccacatttaaaggatggatggacataatgtatgcagccgtggattctaggaatgtggaacttcaaccgaaatacgaggagtccttgtatatgtatctgtattttgtgatatttatcatctttggttcatttttcacactgaatctcttcatcggggttatcatcgacaatttcaaccagcaaaaaaaaaagtttgggggccaggacatattcatgaccgaggaacagaagaagtactacaacgccatgaaaaaactggggtccaagaagcctcagaagcccatccctaggcccggcaacaaatttcagggtatggtttttgattttgtcacgcgacaagtgtttgacatctcaatcatgattctaatctgcttgaatatggtgaccatgatggtcgagaccgacgaccaatctgagtatgtgaccacgatcctgagtcgaataaatcttgtatttatcgtactctttaccggtgagtgtgtgcttaagcttatctccctgcgtcattactacttcactatcgggtggaacatctttgatttcgtggtcgtaattctctcgatcgtgggtatgtttctggcagaacttatcgagaaatactttgtgagcccgaccctgttccgggtgatccgcctagccagaattgggcggattctgagactaattaaaggcgcaaaaggaataagaacactcctcttcgccctgatgatgagcctccctgcccttttcaatatcgggctcttactcttcctggtgatgttcatttatgctatctttggaatgtccaatttcgcatacgttaagcgggaagtcggcatcgatgacatgttcaacttcgagacttttggaaacagcatgatttgtctcttccagattacgacaagtgctggctgggatggcctgctggcccccatcctgaactcaaagccccctgactgcgaccctaataaggtaaatcccggctcttccgtgaagggagattgcgggaaccccagcgtaggaatatttttttttgtgtcttacattattatttccttcctggtcgttgtcaacatgtacattgccgttatcctcgaaaacttctcagtagccactgaggaaagcgctgaaccattatccgaagacgatttcgagatgttctatgaggtgtgggagaaattcgaccctgacgcaacccagtttatggagtttgagaagctctctcagtttgccgcggctctcgaaccgcccttgaaccttccacagccgaataagctccaactgattgcaatggacctacccatggtgtccggcgaccgaattcattgtctggacatcctatttgcttttaccaagcgggtactgggtgagtcaggtgaaatggacgcactgcgcatacagatggaggagcgttttatggcctctaatcccagtaaggtgagctaccagcccataactacaacacttaaaaggaagcaggaagaggtctccgccgtgatcatccaacgagcttatcgccgccacttattgaaacgcacagttaaacaggcttcattcacctacaacaagaataaaattaaagggggggccaatcttctgatcaaggaagatatgatcatcgatcggataaacgagaactcgatcaccgaaaaaacagaccttactatgtcgactgctgcctgccccccttcatatgatcgcgtgaccaagcccatcgtagaaaaacatgaacaggaagggaaggatgaaaaagctaagggaaaatag

SEQ ID NO: 134681 - DNA, 5946 bp, synthetic construct
  misc_feature 1..5946: note = Description of Artificial Sequence: Synthetic coding sequence
  source 1..5946: mol_type = other DNA
atggagcagacagtgttggtgccccctggcccagatagcttcaacttcttcactagagagagtttagctgcaatcgaacgtcgtatagccgaggagaaggctaagaatccaaagccagacaagaaggacgatgatgaaaatggacccaaaccaaactctgatctggaggcgggcaagaatctcccatttatctacggtgacatcccccctgagatggtgtcggagccccttgaagatctcgacccttactacatcaataaaaagactttcattgtccttaacaaagggaaggccattttcagattctcagccactagtgcactgtatatactaacaccattcaaccctctgagaaagatcgctataaaaatattggttcactctctgttttctatgcttattatgtgtaccatcctgacaaattgcgtgtttatgaccatgtctaatcctcccgattggacgaaaaatgtggaatacacctttacaggcatttacacctttgaatcactgatcaaaattatcgcgagaggattctgtctggaagatttcacctttcttcgagacccctggaattggctggacttcactgttatcactttcgcttacgtgacggagtttgtagatttgggaaacgtgagtgcactccgtacctttagagtactgagggctctgaagacaataagtgtgatccctgggctgaagaccatcgtaggtgctctgatacagtctgttaagaagctcagtgatgttatgatcctaactgtgttttgcctatccgtcttcgccctaattggactccagctgttcatgggaaatttgaggaataaatgcatccagtggccaccgactaatgctagcttagaagagcattctatcgaaaaaaacatcactgtcaactacaacggcaccctgatcaatgagacagtgtttgaattcgattggaagagttacattcaagattccaggtaccactatttcctggaagggtttcttgacgcacttctgtgcggcaactcttccgacgcagggcagtgtcctgaaggttacatgtgtgtaaaagctgggagaaaccccaactatggctacacaagttttgacacattctcctgggcctttttgtccctgtttcgcctgatgacacaagatttttgggagaacctttaccagctgacactgcgggccgccggcaagacatatatgatatttttcgtacttgtcatatttctcggctccttttatctgatcaatttgatattggccgtggtggcgatggcatatgaggagcagaaccaagctactttagaagaagccgaacagaaggaagcggagtttcagcagatgatcgagcagttaaagaaacagcaagaagctgctcagcaagctgccacggccactgcaagcgagcacagcagggagccgtccgccgctggcagactctcagactcttcgagcgaagcaagtaagctttcctctaagtccgctaaggagagaagaaatcgaaggaaaaaacgcaaacaaaaagaacagtccgggggagaagagaaggacgaggacgagttccagaaaagtgaatcagaggatagcatccgtagaaaaggtttccgctttagcatagagggaaatcgcctcacatacgagaagcgctatagttccccccaccagagcttactgtcaatccgcggctcattattttcgccaaggagaaatagcaggaccagtctgtttagcttccgtggaagggctaaggacgttggctccgagaacgactttgccgacgacgagcattccacatttgaagacaatgagagcagaagagactcacttttcgtgcccagaagacacggggaaagaaggaacagtaacctctcgcagacaagccgcagctcaaggatgctcgcggtgttccctgccaacggcaagatgcatagcactgttgattgtaacggtgttgtgagtctgggaaccactaccgagaccgaaatgaggaaaagacgctcaagctcgttccacgtgtctatggacttcctcgaagatccaagtcagcgccagagagctatgagcatcgcgtccatcctcaccaacacagttgaagagctggaggagtcccgccagaaatgccccccctgttggtataagttttccaacatttttttaatctgggattgctcaccctactggctgaaggtaaaacacgttgtcaatctggtggtcatggatcctttcgtagatctggcaatcacaatttgtattgtgctcaatactctttttatggccatggagcactacccaatgaccgaccacttcaacaatgtgctgaccgttggcaacctggtttttacgggaattttcactgccgagatgtttctcaagattatcgctatggatccctactactacttccaggaagggtggaatatttttgacgggttcatcgtaaccctatccctggtcgaacttgggctagccaatgtggaggggttatcagtgctcaggtccttcaggttgctgcgagtcttcaagctagctaagagctggcctaccctgaatatgctcatcaaaatcatcggaaatagtgtaggcgcgcttggtaacctgaccctagtcctggccatcattgtctttatctttgccgtggtgggcatgcagctgtttggaaaatcctacaaggactgtgtgtgtaagattgcatctgattgccaattgccccgttggcatatgaatgatttctttcactccttcctgatagtgtttcgcgtcttatgcggcgagtggattgagactatgtgggattgcatggaagtggccggccaggccatgtgcttgacggtgttcatgatggtaatggtcatcgggaacttggtggttcttaatttgttcctggccctgctgctctcctccttttcagccgacaatctggccgcaacagatgatgataacgagatgaataacttgcagattgcagtggacagaatgcacaagggagtagcctacgtcaagaggaagatatatgagtttatccagcagtcctttatcagaaaacaaaagattttggatgaaatcaaaccactggatgacctgaataataagaaggattcctgtatgtctaaccatactgcagaaattggcaaggatctggattacctgaaagatgtgaacggtaccacgtcaggcatcggtactggatctagcgtggaaaagtacattatcgatgagagtgattatatgtcatttatcaacaacccttctttaactgttactgtccctatcgcagtcggtgagagtgacttcgaaaatttgaataccgaggatttctccagtgagtctgacctcgaagagagtaaggaaaaactgaatgagagcagcagtagctcagagggcagcaccgtggatatcggcgcccctgtggaagagcagcccgtggtggagccggaggaaactctggaacccgaggcatgtttcacagaaggctgtgtgcagagatttaaatgctgccagattaacgtggaggaaggccgagggaagcagtggtggaacctccgaaggacctgttttcgaatcgtcgaacacaattggttcgagacatttattgtgtttatgatcctgctgtctagtggggctttggctttcgaggacatttatattgaccagcgaaagaccataaagactatgctcgagtacgccgataaagtgtttacttatattttcattttggaaatgctgctcaaatgggtcgcctacggctaccagacctacttcacaaacgcttggtgttggctcgattttcttattgtggatgtcagcctggtaagtctaacggctaatgctttgggctactcagagctaggggccataaaatccctgagaactctgcgggccctgcggcccttgcgcgccttgagtaggtttgaaggtatgagagtggtggtcaacgcattgttaggcgccatacctagcattatgaacgtattactggtctgtctgatcttctggctaatttttagtattatgggggtcaatttattcgcaggtaaattttaccattgcataaacacgacaacaggagaccgcttcgatattgaagacgtgaataaccatacagattgtcttaagcttatcgagagaaatgagacagccaggtggaagaatgtcaaggtgaattttgataacgttggcttcgggtatttatctctgttgcaggtagctacatttaagggatggatggatatcatgtacgctgccgtggatagtaggaacgtggaactgcagcctaagtatgaagagagcctgtatatgtatctctattttgtaatattcatcatatttggatcattcttcaccttgaacctttttatcggagtgattatcgacaactttaatcagcagaaaaaaaaatttggcggtcaggatatctttatgacagaggagcagaagaaatactacaatgccatgaagaaactcggctcgaaaaaaccccagaagcctatccctagaccgggcaacaagtttcagggaatggtcttcgatttcgtgactcggcaagtgttcgacatttccatcatgatcctcatctgcctaaacatggtcaccatgatggtggagacagatgatcaaagcgaatacgtcactactatcttatcgagaataaatctggtcttcatcgttctctttactggcgaatgcgtcctcaaacttatctccctgcggcactattacttcacaatcggctggaacatatttgactttgttgtggtcatcttatcaattgtcggcatgtttttggcagagttaatcgagaaatatttcgtgtcaccaacattgttccgggtgatccgcctggcaagaatcggccgcattcttaggttaattaagggggcaaaaggcatccgcacacttctgtttgctcttatgatgagcttgcctgcactttttaacatcggcttgctactctttctagttatgtttatttatgcgatcttcgggatgagcaatttcgcttacgtaaagagggaagtggggattgatgacatgttcaatttcgagacctttggaaatagcatgatatgtctgttccagattaccactagtgccggatgggatgggcttctggccccaattctgaatagtaagcctcctgactgtgatccgaacaaggtcaaccccgggagctcagttaaaggtgattgcggaaatccatccgtgggcatatttttttttgtcagctacatcataatctccttcttggtcgtcgtgaacatgtatattgcagttattctcgagaactttagcgtagccacggaagaaagcgccgagccactgagcgaggacgactttgagatgttttacgaagtctgggagaaattcgaccccgatgcaacccagtttatggagtttgagaagctaagtcagttcgccgccgccctggagccaccgctaaacctgccccagccgaataaactccaactgattgccatggatctgccgatggtgtccggagaccgcatccattgcctggatattctgtttgccttcacgaagcgcgtgctcggggagtcaggagagatggacgccctgagaatccaaatggaagagcggtttatggccagcaacccttccaaagtttcctaccagcccatcaccacaactctgaagcggaagcaggaggaagtgtctgctgttatcattcagcgggcctacagacggcatttactaaaacggaccgtgaaacaggcttccttcacttacaataaaaataaaataaaagggggcgctaatctcctcatcaaagaggacatgattattgacagaatcaatgagaactccatcaccgagaaaacggacttaaccatgtcaactgctgcttgtccgccaagctacgaccgcgtgacaaaaccaatagtggaaaagcatgagcaggaaggcaaggacgaaaaagccaagggaaagtag

SEQ ID NO: 134682 - DNA, 6030 bp, synthetic construct
  misc_feature 1..6030: note = Description of Artificial Sequence: Synthetic coding sequence
  source 1..6030: mol_type = other DNA
atggagcagacagtccttgtcccccctggccctgactcctttaatttctttactagagaaagtcttgccgcaatcgagcgacggatcgccgaggagaaggccaagaacccaaaaccggataagaaagatgatgacgaaaatggacccaagccgaactcggatctggaagccggcaaaaatctcccctttatctatggcgacattcctcccgagatggtcagtgagccccttgaggatcttgacccttactatatcaataagaaaaccttcatagtgcttaacaaagggaaagcgattttccggtttagcgcaactagcgccttgtatattttgacacctttcaaccccttaagaaagatcgccatcaagattctggtacatagcctttttagtatgctgatcatgtgcactatcctgaccaactgtgtctttatgacaatgtccaacccccccgattggaccaagaatgttgaatacactttcactggtatctacacattcgagtctttaattaagatcattgcccgggggttttgcctcgaggacttcaccttcctgagagatccatggaattggttagatttcactgtgataacattcgcttatgtgactgagtttgtcgatctgggcaatgtgagcgccctgaggacatttcgggttctccgggcactcaagactataagcgtcattcctggtctcaagacaatcgtcggcgcacttatccagtcagtaaaaaagttatctgacgtgatgatattgaccgtgttttgcctgtctgtgttcgctcttataggactccaactgtttatgggaaacctgagaaacaagtgcattcaatggccaccgacaaacgcctcacttgaagaacactccatcgaaaagaacattacagtgaactataacgggaccctcattaacgaaactgtcttcgaatttgattggaaatcttacattcaggactccagataccattatttcttggaggggtttctcgatgcactgctttgcggcaacagcagtgacgctgggcagtgccccgaaggctacatgtgtgtgaaggccggaagaaaccccaattacgggtatacttccttcgacacgttctcctgggcctttctgtcgctcttccgacttatgactcaggatttctgggagaatctctaccagttaacgctacgtgccgcgggcaagacttatatgatctttttcgtgctcgttatttttttaggatctttctatctgattaacctgattctagctgtcgtagctatggcttatgaagaacagaaccaagccacactcgaagaagctgagcagaaagaggcagagttccagcagatgattgagcagcttaagaaacagcaggaggcagctcagcaagcagccacggctactgcatccgagcatagcagagagccatccgctgccgggaggctgagcgattctagctctgaagcaagcaaactgtctagtaagagtgccaaggaacggagaaatcgccgaaaaaaacgaaagcagaaagaacagtcgggtggggaggagaaagatgaagatgagttccagaagtccgagtcggaggatagcatacgcagaaaggggtttcggttttcgatcgagggaaacagacttacctatgaaaaacgctattccagcccgcatcagtcgctactgtctattcgtgggtctctattcagccccagacgaaacagcaggacctctctgtttagtttccggggcagggccaaggatgttggatctgagaacgactttgcagacgacgaacactccacgttcgaagacaacgaatcaagacgggactcgcttttcgtcccgagacgccatggcgaacggcgcaactcaaacttgtcacagacaagcagatcctccagaatgctagcagtttttccggccaatggtaagatgcactcaacggtagattgtaatggcgtggtgtcactggtcggcggcccttctgttccaacatcccctgtagggcagctgctccccgaggtcattattgataaaccagcgaccgatgacaatgggacaacaaccgaaactgaaatgcggaaacgccgatctagttcatttcacgtatctatggacttcctggaagatccgagccaacgtcagcgtgccatgagtattgcctctatcctgaccaatactgtggaagagctcgaggagtcacgacagaaatgtccaccctgttggtataagttttctaatattttcctgatttgggactgtagcccatactggctgaaggtgaaacacgtggtgaacctggtggtcatggaccccttcgtcgatctcgctattacgatctgcattgtgctgaatacactgtttatggctatggaacattaccctatgactgaccacttcaataacgtgttgacggttgggaatttggtgttcacaggcatcttcaccgcagaaatgtttctgaagatcatcgccatggatccctactactactttcaagaaggatggaatatattcgatggcttcatcgttaccctgagtctggtcgagcttggtctggccaatgttgagggactctcagtgctgcgaagttttcgcctgctgcgcgtgtttaaattagctaagtcttggcctaccctaaacatgctgatcaaaatcataggaaattctgtgggggctctggggaatctgaccctcgttctcgccataattgtgtttatttttgccgtggtcggaatgcagctgttcggaaagtcttacaaggactgcgtctgtaaaatcgcttcggactgtcagctaccaaggtggcatatgaatgatttctttcactcatttctcattgttttccgggtcctgtgtggcgagtggattgaaacaatgtgggactgcatggaagtcgcgggacaggcaatgtgcctgaccgtatttatgatggtcatggttatcggtaacttggtcgtcctcaatctcttcttggccttgctgctgtctagcttctccgccgacaacctagccgcaaccgacgatgataacgagatgaataacctccagatcgctgtcgaccggatgcacaagggtgtcgcttacgtcaagaggaaaatctacgaatttatccagcagtcattcatcaggaagcagaagatcctagacgaaattaaacctcttgacgacttgaataataaaaaagatagctgcatgagtaaccatactgctgaaattggcaaggacctggactaccttaaggatgtgaacggaactaccagcggcatcggcaccggatcgagtgtcgaaaagtatatcatcgacgaatcagattacatgagttttatcaataatccatctttaaccgtcactgtcccgattgctgttggcgagagcgatttcgaaaatctgaacaccgaggatttctccagtgaatcagaccttgaggaaagtaaggagaagctgaatgaatcatcttcctcctccgaaggcagcactgtggatataggtgcaccagtggaggaacagcctgtcgttgaacctgaggaaaccctggagcccgaggcctgttttactgaaggttgtgttcagaggtttaagtgttgtcagatcaacgtggaagaagggcgcgggaaacaatggtggaatctacgacgaacgtgttttcggatcgttgagcataactggttcgaaaccttcatcgtgtttatgatcctcctttcaagtggtgccctagcgtttgaggacatctacatcgaccaaaggaagactatcaaaactatgctcgagtacgcggacaaagtgtttacgtatatcttcattctggagatgttgctcaagtgggttgcctacgggtaccagacatactttactaatgcttggtgttggttggactttctgattgttgacgtgagtctcgtgtctctcactgctaacgcacttggctattcagaactgggggcaatcaagtctctccgcaccctacgtgctcttagaccattgcgcgcactctcccggtttgagggtatgagggtcgttgtgaatgccttactcggcgcaattccctccataatgaacgttctccttgtctgcctcattttttggctgatcttttcaattatgggggtgaatctattcgccggcaagttctaccactgcattaataccactacaggggaccggtttgatatcgaagacgtgaataaccacacagactgcctgaaattaattgaacggaacgagaccgcaaggtggaaaaacgtgaaagtcaattttgacaacgtagggttcgggtatctgagcttactgcaggttgccacttttaaaggctggatggacattatgtatgccgcagtggattcccggaacgtcgagttacagccaaagtatgaggagtcactgtatatgtacctctatttcgtaatattcataatattcggttccttctttacgctgaacctctttatcggtgtgatcattgacaatttcaaccagcagaagaagaagttcggcggacaggacatctttatgacggaggaacagaagaaatactataacgccatgaagaaattaggctcaaagaagccccagaagccaattccacgccccggaaacaagttccagggcatggtcttcgactttgtcacacgacaagtgtttgatattagtattatgatactgatatgtcttaacatggttaccatgatggtggagactgatgaccaatctgagtatgtaacgacaatattgagccggatcaacctggtatttatcgtgctcttcaccggcgaatgtgtcctcaagcttatctctctgcgacactactattttaccatcggatggaatatcttcgacttcgtggtggtgatcctgtccatcgtgggcatgtttttggcagaacttatcgaaaagtacttcgtgagcccaactctctttagagtgatccgtctggctcgcatcgggcgcatcctgaggctcatcaagggcgccaaagggatcaggactttgctgtttgcactgatgatgagcctgccagcactgttcaacatcgggctattgttattccttgtgatgttcatctatgcaatatttgggatgtcaaactttgcatatgtaaaacgggaggtgggaattgacgatatgttcaatttcgaaacttttgggaacagtatgatctgtctgttccaaatcaccacatcagccggctgggatggtctgctagccccaatattgaactcaaaaccacctgattgtgatccaaacaaggtgaacccagggtctagcgtgaagggggattgcggcaacccttctgttggcatcttctttttcgtaagttatataatcatttcattcttggttgtcgttaatatgtacatcgctgttatattagagaactttagtgttgctaccgaggagtccgccgagccattatccgaggatgatttcgagatgttctacgaagtctgggaaaaattcgaccccgacgccactcaatttatggaattcgagaaacttagtcagtttgcagctgccctggagccccccctgaatctgccacaacctaataagctccaacttatcgccatggacctacccatggtgtctggggaccggatccactgtctggatatcttgtttgctttcacaaagcgggttctgggtgagtcaggcgagatggacgccctgcgaattcagatggaggagagatttatggcttctaatccttccaaggtgtcttaccaacctataacaaccaccctaaaacgaaagcaggaggaagtgtctgccgtgattattcaaagggcctacaggagacatctgctcaaaaggacggtgaaacaggcttcatttacctataacaagaacaagatcaagggcggggccaacttgctcattaaggaggacatgatcatcgacaggataaatgagaatagcatcacagagaagacagatctcactatgtctacggccgcttgccccccctcctatgaccgtgtcaccaagcccattgtggaaaagcatgagcaggaaggcaaggatgagaaggcgaaaggcaagtag

SEQ ID NO: 134683 - DNA, 657 bp, synthetic construct
  misc_feature 1..657: note = Description of Artificial Sequence: Synthetic coding sequence
  source 1..657: mol_type = other DNA
atgggaagactgctggccttggtggtcggagctgccttggttagtagcgcatgcggcggctgtgtagaggtggactctgagactgaagctgtgtacggcatgacctttaaaatcctctgtatttcatgcaaacggcggagtgaaaccaacgctgagacatttactgaatggacttttaggcagaagggtaccgaagaatttgtcaaaatcttacgctacgaaaacgaggtgttgcagcttgaagaggatgagcgctttgaagggagggttgtatggaacggctctaggggaacaaaggatctgcaagacctctccatatttatcaccaatgtgacatacaaccatagtggtgactacgagtgtcatgtgtatcgcctgctttttttcgagaactatgaacataatacgtcagtcgttaagaagatccatatcgaggtagtggataaggccaatcgggatatggccagcatagtatctgaaataatgatgtatgtgctcattgtggttctgaccatttggttggtggccgaaatgatatactgttacaagaagatcgccgcggctactgaaacagccgcccaagagaacgcaagtgaatatctggcgattacttccgaatcaaaggaaaactgcactggagtccaggtggctgaatag

SEQ ID NO: 134684 - DNA, 807 bp, synthetic construct
  misc_feature 1..807: note = Description of Artificial Sequence: Synthetic coding sequence
  source 1..807: mol_type = other DNA
atgggcaggctgctggcactagtcgtcggtgctgctttagtctccagcgcctgcggcggctgcgtcgaagtggattcagaaacagaagcagtgtatggcatgacttttaagattctgtgtatcagttgcaaacgaagaagcgagaccaacgctgagaccttcactgagtggacttttcgtcagaaaggcactgaagaatttgtgaaaatcctgaggtacgaaaatgaggtcctccagctggaagaagacgaaaggtttgagggaagagtggtatggaacgggagccgtggaaccaaggatctccaggacttatcaattttcattacaaatgtgacctataaccactccggggactatgagtgccacgtatataggctgctttttttcgagaattacgaacataatacctccgttgtgaaaaaaatccacattgaggtcgttgacaagggtgaatcgggcgcagcttgtcccttcactgtgacccaccgcagggcccggtggcgagatcgctggcaggccgtagaccgcacagggtggctgtgcgcctggccagccaacagaccacaacagagagccgagggcgagggctcctccccctcctgcccgctgcaactttggccgttatttctgtcttcacctcgcaggggacagagcatgccagtaccccatcggcgctctgggtatcgcacacagttgtgtcatctgtgctgcatgacctcaggcagatgcttgctctctctcagccagcgcgttgtgttaggtctgcccggtattatcattcgatgtgtgtctcgcggcgttgtgtag

SEQ ID NO: 134685 - DNA, 6018 bp, synthetic construct
  misc_feature 1..6018: note = Description of Artificial Sequence: Synthetic coding sequence
  source 1..6018: mol_type = other DNA
atggcccaatcagtccttgtgcccccgggaccagactcttttcggttcttcacaagagaaagccttgccgcaattgaacagaggatcgccgaagagaaggcaaaacggcccaagcaagaacgcaaggacgaagacgacgagaatggccctaaaccgaattcagatctggaagcagggaagtccctcccttttatctatggggatatacccccagaaatggtttctgtgcccttagaggacctggatccatactacatcaataaaaagacttttatcgtgttgaacaaaggaaaggcgataagcagattctctgccacgcccgccctctacatacttacacctttcaatccgattcgcaagctggccatcaagatattagtgcactccttgtttaatatgctgattatgtgtacgatcctcacaaactgtgtgttcatgacaatgagtaatccgcctgactggactaagaatgtagagtacaccttcaccggcatctacacctttgagagtttgataaaaatcctggcaagaggcttctgcctcgaggacttcacctttcttcgggatccctggaactggctcgatttcacagttatcacctttgcctacgttacagagttcgtcgatctgggcaacgtcagtgcccttcgcaccttcagagtactcagagcactcaaaacgataagcgtgatcccaggcctgaaaaccatagtcggagctctgatccagtctgtgaagaagcttagcgacgtcatgattttgaccgtcttctgcctatctgtcttcgcactgattgggctccagctgtttatgggcaatttacggaataagtgccttcagtggccacccgacaactctagctttgaaataaatattacgagcttcttcaataatagtttagacggcaacggaaccaccttcaacagaacagtttctatttttaattgggatgagtatatcgaagacaaatcccatttttattttctcgaaggtcaaaacgacgctctgctgtgcggcaactcctccgacgctgggcagtgccccgaggggtacatttgtgtcaaagcggggcgtaaccctaattacggatacacatctttcgacaccttctcctgggccttcctatcgttatttcgcctgatgacacaggatttctgggagaatctatatcagcttacattgagagccgccggtaagacgtatatgatcttctttgtgctggtcatctttctgggctccttttacctgattaaccttattcttgcagtggtagcaatggcctatgaagagcagaatcaagcaacattagaagaggctgagcagaaagaagctgagttccagcagatgcttgagcagcttaagaagcagcaggaagaggcacaggccgcagccgctgcagctagcgcagagagtagggatttcagcggggccggtggtattggagttttcagcgaatcaagctctgtcgcttcaaaactttcctctaaaagcgagaaggaattaaaaaacaggaggaagaagaagaagcagaaggagcaaagcggcgaggaagaaaagaatgacagagtgcggaagtctgaaagcgaggatagtattcgcagaaaaggctttcgattctcactggaagggtctcgtcttacttacgaaaagaggtttagcagcccacaccagtccctgttgtccatcagagggtccttgttcagtccaaggcgcaactcccgggccagcctcttctccttcagggggcgcgccaaggatattggtagcgagaatgattttgcagacgatgaacacagtactttcgaagacaatgactcacggcgcgattcactgtttgtgccacataggcacggtgagcgcaggcatagtaatgtgagccaggcatccagagccagccgcgttctccccatcctccctatgaatggcaagatgcacagcgccgtcgactgtaacggggtggtgagcctggtgggagggccaagtacccttacaagtgccggacagttgttaccagagggtaccactaccgagaccgagatacgaaagcggcgcagcagctcctatcacgttagcatggaccttctggaggacccaacttcccgccagcgggccatgagcattgcctcaatcctgacaaatactatggaggagcttgaggagtcccggcaaaagtgccctccatgttggtataagtttgccaacatgtgcttgatttgggattgctgtaagccatggctgaaagtcaagcatcttgtgaacctggttgtcatggacccattcgtagatctcgctataaccatatgcatcgtactcaataccctctttatggcaatggagcattatccgatgaccgaacaattttcatcggtcctaagcgtgggcaacctggtcttcactggcatctttactgctgagatgtttctgaaaatcatcgccatggacccatactactatttccaggaaggatggaacatttttgacgggttcatcgtgtccctgagtctgatggaactggggctagctaacgtggagggattatctgtgctcaggagcttccgtctgttaagggtcttcaagttggcgaagtcttggcctaccttaaacatgctgatcaagatcatcggcaatagcgtcggagccctcggaaatctgaccctcgtcctcgccatcatcgtctttatttttgccgttgtggggatgcagctgtttggaaaatcttacaaggaatgcgtgtgtaaaatctccaacgattgcgaattgccaaggtggcacatgcatgacttcttccactctttcctcattgtgtttcgcgtgctttgcggggagtggattgaaaccatgtgggattgcatggaggtggctgggcagactatgtgtctcactgtgttcatgatggtgatggttatcggcaaccttgtggtgctcaacctgttccttgccctgcttctgagcagtttttcctccgacaaccttgccgccacagatgatgacaacgagatgaataatctccagattgctgtgggacggatgcagaagggcatcgactttgtcaagcgcaaaattcgcgaattcattcagaaggcctttgtgcggaaacagaaggccctggatgagatcaaacccctcgaggatctcaacaacaagaaagactcatgtatctctaatcacaccacaatcgaaattggaaaggacctgaactacttgaaagacgggaacgggaccacgtcagggatcgggagttctgtggaaaaatacgtcgtggatgaatctgactatatgagcttcattaataatccttcactgactgtgactgtacccattgcagtaggagaaagcgacttcgagaacctgaatactgaggaattcagtagcgagagtgacatggaggaatccaaagagaaactaaatgccaccagtagctcagaaggctcgacagttgacataggtgcccccgcggagggagaacagcccgaagtcgagcccgaagagtctctggaacccgaggcttgcttcacggaagattgtgtaagaaagtttaagtgctgtcagatcagtatagaggaaggaaagggaaagctatggtggaatttaaggaaaacttgttacaaaatagttgagcataattggttcgagacattcatcgtgttcatgattctgctgtcgtccggcgccctggcctttgaagatatctacattgagcagagaaagaccatcaaaacaatgctcgagtacgctgataaggtcttcacatacattttcatacttgaaatgctactgaagtgggtagcctacggatttcaagtttactttacgaacgcttggtgttggctggactttctcattgtggatgtctctttagttagtctgacggctaacgctctgggatactctgaattgggagccatcaaaagcctgcgcacacttcgagctctcagacccctgcgcgcattatcgcggttcgagggcatgcgtgtagtggttaatgcactgctgggtgccatccctagtattatgaacgtccttctggtctgccttattttctggctgattttcagcatcatgggtgtgaatctgttcgcaggcaagttttatcactgcatcaactacactacaggagagatgtttgacgtatccgttgtcaataattacagcgagtgtaaggcgctgattgaatccaaccagacggccagatggaagaatgtcaaggtgaattttgacaatgtgggcctcggctacctaagccttctccaagttgcaacctttaaagggtggatggacatcatgtatgcagccgtggattcccgcaacgtggaactccaaccaaagtacgaggacaacctgtacatgtacctgtattttgtcatatttattatattcggctcattctttaccttgaacctgttcatcggcgtgatcatcgataatttcaatcagcagaaaaagaagttcggtggtcaagacatcttcatgaccgaggagcagaaaaagtattataatgccatgaagaagctgggatcaaagaagcctcaaaaacccatccccagaccagctaataagttccaggggatggtgtttgactttgtgactaagcaggtgttcgacataagcatcatgatcctgatctgcctcaatatggtgaccatgatggtggaaactgatgaccagtcccaagagatgactaatatcttgtactggatcaacttggtctttatcgtgctctttaccggcgaatgcgtgctcaaactgatcagcctccgctactattactttacaatcggctggaatatctttgacttcgtggtggtaatcctgtctatcgtgggcatgttcctagcggaactgatcgaaaagtatttcgtgtctccaaccctgtttagagtcatacgcctggcacgcattgggcggatactgcgcctcattaaaggcgcgaaaggcatccggacactgctatttgcacttatgatgagtctgcccgccctgttcaatattgggcttttgctctttttggttatgttcatctatgctatcttcgggatgtccaacttcgcctacgtcaaaagagaagtgggcatcgatgatatgttcaacttcgagacattcggaaatagtatgatctgcctcttccagattacaacttccgccggctgggacggtctcctggcccctattctgaactccgggcctccagactgcgaccctgacaaggatcaccccggctccagcgtgaaaggggattgtgggaaccccagcgtcggcatcttttttttcgtgagctacattatcatctcatttctcgtggtcgttaacatgtacatcgcagttatactcgaaaacttctctgttgccaccgaggagagcgcggagcctctttccgaggatgattttgaaatgttctacgaggtatgggaaaaatttgatcctgacgccacccaatttatcgaatttgcaaagttgtctgattttgctgacgcacttgacccaccattactgattgcaaagccaaataaagtgcagcttatcgccatggacctaccaatggtgagcggtgatcggattcattgcttggacatcctgttcgcctttaccaagagggttctcggcgagtccggcgagatggacgctctaaggatccagatggaagaaaggttcatggctagcaacccatcaaaagtgtcatatgagcccattactaccaccctcaaacggaaacaagaggaggtctcagccataataatacagagggcatacaggagatatttactgaaacagaaagtaaagaaggtgtccagtatctataagaaggataaagggaaggaatgcgatggcactcctataaaagaggataccttgattgacaagcttaatgaaaactctacaccagagaaaacagatatgacacccagtaccacatcccctcccagctacgacagcgttactaaaccagaaaaagagaagttcgagaaggacaagtccgaaaaggaagacaaaggcaaggatatcagggaaagtaagaagtag

SEQ ID NO: 134686 - DNA, 6018 bp, synthetic construct
  misc_feature 1..6018: note = Description of Artificial Sequence: Synthetic coding sequence
  source 1..6018: mol_type = other DNA
atggcacagtccgtgctggtgccacccggaccggatagctttcgcttctttaccagagaaagtttggcggctatagaacagaggatcgcagaagagaaagcgaaacggccgaagcaggagaggaaggatgaggatgatgagaacggacccaaacctaattcggacctcgaggcaggcaagagcctgcctttcatctacggtgacatacctcctgagatggtatcagtcccgctggaagatctcgacccatattacattaacaagaaaacctttattgtgctcaataagggaaaggccatctcccggttcagtgccactcctgctttatacatcctcacccccttcaaccctatcagaaagttagcgattaagattctggtgcactcactgtttaatatgctcataatgtgcacaatcctgacgaactgcgtctttatgactatgtctaatcctcctgactggaccaaaaacgttgagtacaccttcacagggatctacactttcgagagtttgattaagattttggcacggggtttctgtctcgaggatttcacctttctgcgcgacccttggaattggctcgactttaccgtaatcacatttgcttatgttacagaattcgtaaatcttggcaatgttagcgcattgcggacgttccgagttctccgcgctttaaagaccattagcgtgatccccggcctcaagaccattgtgggtgcccttatccagtccgttaagaagctcagtgacgtcatgatactgaccgttttttgcctgagtgtcttcgcgctgattgggttgcagctgttcatgggaaacttgcgaaacaagtgcctccagtggcccccagacaactcttcctttgagattaacatcacttcttttttcaacaacagtcttgacgggaacggaacaacctttaaccggaccgttagcatattcaattgggacgagtacatcgaggacaagtcccacttctatttcctcgaaggccagaatgacgccttactttgcggcaatagctccgacgctggacagtgcccagaaggttacatctgtgtcaaggctggacgaaatcccaactacgggtacacaagcttcgataccttcagctgggcctttttaagtctgtttagactcatgacccaggacttctgggagaatctatatcagttaacattgcgtgccgcagggaagacgtatatgatctttttcgtgctggtgatttttctgggcagcttctacctgattaacctcatattagcggttgtcgcaatggcctacgaggagcagaaccaggccacactggaggaggctgaacagaaggaagccgagtttcaacagatgctcgaacagctgaagaaacagcaggaagaagcacaggcggccgcagcagctgcttccgccgaatctagagattttagcggagcaggaggcattggggtgttctccgaatcctcttcagtggcttcgaaattaagctccaaatcggaaaaggagcttaagaaccgtcgaaagaagaaaaaacaaaaggagcaatctggcgaggaggagaagaacgacagggtcagaaaaagtgagagcgaggattccatacggcggaagggattcagattttcactagagggtagccgattgacatacgagaaaagattctcttctccgcaccagagtctgttaagtatccggggcagtctgttcagtccaagacgcaattctagagcgtctctcttttccttccggggccgtgccaaggatattgggtccgaaaacgattttgcagacgacgagcactccactttcgaggacaatgattctcgccgagactctctctttgtaccccatcgtcacggtgaacgcagacattccaacgtctcacaggcgtccagggcctctagggttctgcctatcctgccaatgaatgggaaaatgcattcagcggtcgactgtaatggagtcgtgtccctcgtgggcggaccgtcgaccctcacatccgcagggcagctcctgcctgagggcaccaccacagagactgaaatccgcaagcggcggtcatcaagctaccatgtctcaatggacttacttgaagatccaacaagtcggcagcgcgctatgtccatagcctctattctgacaaatacaatggaggagctcgaggaatcacggcagaagtgccctccttgctggtataagtttgctaatatgtgcctgatttgggattgttgtaagccatggctgaaggtgaaacaccttgtaaacctggtggtcatggaccccttcgtagacctggccatcactatctgcatcgtgctgaatactttattcatggccatggagcattaccccatgaccgaacagttcagttctgttttgagcgtaggtaatctagtcttcacgggaatcttcacagccgagatgttcctcaaaataattgcaatggatccatattattactttcaagaagggtggaacatttttgatggtttcatagtgtctctatctttaatggagcttggactggcgaatgtggaagggctctccgtcctacgatcgttccgccttttacgggtatttaaactggctaaaagctggcctacgctaaacatgctcattaagatcattggtaacagcgttggagccctaggaaacctgaccctggttcttgccatcatagtgtttatcttcgcagtagtcggcatgcagctgttcggcaagtcttataaggagtgtgtgtgtaaaatcagcaacgactgtgagctgcctaggtggcacatgcacgactttttccatagtttcctgatcgtcttcagggtgctgtgtggggagtggattgagactatgtgggattgcatggaagtggccggccaaacaatgtgtctgactgtctttatgatggttatggtaatcgggaacctggttgtactgaacctgttcctcgccctgctactgagctcttttagctcggacaacctggctgccactgatgacgataacgagatgaataatctccaaattgctgttggacgtatgcagaagggtatcgactttgtcaaacgtaagatccgagagttcattcagaaagcctttgtgaggaagcaaaaggccctggatgaaatcaagccactagaggatcttaataacaagaaggatagttgtatctctaaccacaccacaatcgagatcgggaaggacctgaactacctaaaggacggaaacggaacaaccagcgggatagggagtagcgtggagaaatatgtcgtggacgagtccgactatatgtcttttatcaacaatccatctctaaccgttactgtgcccattgctgttggtgagtctgactttgaaaatttgaataccgaggaattctcaagtgagtctgatatggaggagagcaaagaaaagctcaatgccacctcctcctctgagggttccaccgtggatattggggcccccgcagaaggcgagcagcctgaagttgagcccgaggagtctctggaaccagaggcatgcttcaccgaggactgcgtgaggaaattcaaatgctgtcaaatctccatcgaggaggggaagggtaagctgtggtggaacctgagaaagacatgttataagattgtggaacataactggttcgaaacttttattgtctttatgatcttgctttcatcaggcgcactggcctttgaagatatctacatagagcaaaggaagacaatcaaaactatgcttgagtatgctgataaggtgttcacctatattttcatactagagatgctcttgaagtgggtcgcttacggcttccaggtctacttcactaatgcgtggtgttggctggacttcctcatcgtggacgttagcctggtgtctctcacggctaacgcactgggatacagtgagttgggcgcaatcaaaagtctgaggacacttagagcacttaggcccctgcgcgccctgtctcggtttgagggcatgcgcgtggtggtaaatgccctgctcggtgccatcccaagtattatgaatgtgctgctcgtgtgcctgatcttctggctgatcttttctattatgggagttaaccttttcgccggcaagttctatcactgtatcaactatacaaccggcgagatgtttgacgtctctgtggtcaacaactactctgaatgtaaggccctcatcgagagcaatcagaccgcccgttggaagaacgtcaaggtgaacttcgataatgtgggcctggggtatctgtcattactgcaggtggcgacttttaagggctggatggacatcatgtacgctgctgtggacagtcggaatgtggaactccaacctaaatatgaagataacttgtatatgtatctgtatttcgtcattttcatcatattcgggagcttttttacactgaatttattcatcggtgtgattatcgataacttcaaccagcagaaaaagaaattcggcggccaagacatcttcatgacagaggagcagaagaaatattataacgccatgaagaagctgggtagcaagaaaccacagaagcccatcccacgcccagctaataaattccagggtatggtgtttgacttcgtgacaaagcaggtgtttgatattagcatcatgattctaatctgtttaaacatggtgacaatgatggtcgagactgacgaccagtctcaggaaatgacaaacatcctgtattggattaacttagtgttcattgtcctgtttacaggggaatgtgtgctgaaactcatctcacttaggtactactattttactatcggatggaacattttcgatttcgtcgtggtcattttaagcatcgtggggatgtttttagcggagttgattgagaagtacttcgtttcaccaactctcttcagagtgattaggctcgcccgcattggtaggatcctgagactgattaaaggcgccaaggggatcagaacacttctgttcgcactcatgatgtctctcccagcccttttcaatatcgggttactccttttcttggttatgttcatttacgccatattcggtatgagcaactttgcttacgtcaaaagagaagtaggtattgacgacatgttcaattttgagacttttggtaactccatgatctgtctctttcagatcaccacctccgcaggctgggatggccttttggctcctatacttaatagtggcccacccgactgtgatcccgataaggatcaccctggatcctccgtaaagggtgattgtggaaatcctagcgtgggtatcttttttttcgttagttacatcattatcagctttctggttgtggtgaatatgtatatcgccgttatcctcgagaattttagcgttgccacggaagagagtgctgagcccctgtccgaggacgatttcgagatgttttacgaggtctgggagaagttcgatcccgacgcaacgcaattcatcgaattcgcaaagctgtccgacttcgctgatgccttggatccccccctcctcatcgcgaagccaaataaggtgcagcttattgcgatggacctgcctatggtgtccggagaccggatccattgcctggacatcctgttcgcttttaccaagcgcgttttgggcgagtcaggggagatggacgccctgcggattcagatggaggagcgctttatggctagcaacccatcaaaggtgagctacgagcctataacaactactcttaaaagaaagcaggaggaagtgtcagctatcattatccaaagggcatatcggcgctacctgctcaaacagaaggtgaagaaagtgtcatccatctataagaaggataaagggaaggaatgtgatggaactcctatcaaggaagacactctcatagataaattgaatgagaacagcacaccagagaagacggacatgacaccttccaccacatcccctcccagttacgactctgtgacaaagcctgagaaagagaagttcgaaaaagataagtctgagaaggaagataaaggcaaggacatcagagaaagtaaaaaatag

SEQ ID NO: 134687 - DNA, 6018 bp, synthetic construct
  misc_feature 1..6018: note = Description of Artificial Sequence: Synthetic coding sequence
  source 1..6018: mol_type = other DNA
atggctcagtctgtgttggtgccccccgggcctgatagctttagattcttcacgagggaaagccttgcggccattgagcagcggatcgccgaggaaaaggctaagcgaccgaaacaggagaggaaggacgaggacgacgaaaacggtcctaagcccaacagcgacctggaagcaggcaagtcactgcccttcatctatggggatatccctccagaaatggtgagcgtacctctggaggaccttgacccatactacatcaacaagaaaacttttatcgttctcaacaaaggcaaggcaatctcacggtttagcgccactccagccctgtacatcctcaccccctttaatccgatacggaaactcgcaatcaagatcctggttcatagcctttttaacatgttgatcatgtgcacaatcctcaccaactgcgtgttcatgacaatgtccaacccccctgattggaccaaaaatgtggaatacacgtttactgggatctacacttttgagagtttgatcaagatcctggctcgggggttctgtcttgaagacttcacctttttacgcgacccctggaattggctggattttaccgttattacgtttgcctacgtgacggagtttgtcaacctgggcaacgtgtctgcactcagaacatttcgagtcctgcgagccctaaaaacaatctctgtgatcccgggtcttaagaccatcgtcggtgcactcatccagtccgtcaagaaactgagcgatgtgatgatactaacagtcttctgcctttccgtgttcgcccttattggtcttcaactgttcatggggaatctgcgtaacaagtgtctgcaatggccgcccgacaatagttcctttgaaatcaacatcaccagcttcttcaataattcattagatggtaacggaaccacattcaaccgcaccgtttccatcttcaattgggacgagtacatcgaggacaagtctcacttttatttccttgagggtcagaacgacgctcttctgtgcggaaactcttctgatgccggccagtgccctgagggatacatttgcgtaaaagctggaagaaatccaaattacggttatacctcattcgatacctttagctgggccttcctctctctttttcggttaatgacccaggacttctgggagaacttgtaccaactgacgctgcgcgctgctggcaagacttatatgatcttttttgtcctcgtcatctttcttgggtccttttacctcatcaatctcattttagctgtggtcgcgatggcatacgaggagcagaaccaggccactctcgaagaagctgaacagaaagaagcggagtttcagcagatgttggagcaactcaagaagcagcaggaagaggcgcaggctgcagccgcagccgccagcgcagaaagtcgcgactttagcggagccggcggtattggggtcttctccgaaagcagtagtgtcgcttcaaaattgagctccaagagcgagaaagaactgaaaaacagacgtaagaaaaagaagcagaaagagcagagtggcgaagaagagaaaaacgacagggtgcggaaaagcgaaagcgaggacagcatacgtcggaaaggcttccgattctcactcgaggggtcccgactgacgtacgagaagcgcttttcttctccgcaccagtccctcctgtctatcagagggagtcttttcagtccccgcaggaattcacgcgcatccttatttagctttagaggtcgcgctaaggacatagggagcgaaaacgactttgctgacgacgaacattcgacctttgaggacaacgatagtaggcgagatagtctgttcgtgcctcaccggcacggcgagaggcgacatagcaacgtgtcacaagcgagcagggcgtcacgggtgctgcccattctccccatgaacggaaagatgcactcagccgtcgactgcaacggcgtcgtcagtcttgtcggggggccatctaccctgacatctgcgggccagctcctgccagaaggcaccacaacagagactgaaatacgcaaacgcaggagcagctcttatcacgtaagcatggatttgctcgaggacccgactagtcgacagagagccatgagcattgcctccattttaaccaatacaatggaggaactggaggagtcaaggcagaaatgcccaccctgctggtacaagtttgccaatatgtgtctgatttgggattgctgcaaaccgtggctcaaggtgaagcatttggtgaatcttgtggtaatggaccccttcgtagacctcgcgattactatctgtatagtgctcaacacactgtttatggcaatggaacactatcccatgaccgagcagttcagttccgtgctgtccgttggaaacctggtgttcacaggcatttttacagcagaaatgtttctcaagatcatagcgatggacccatactactatttccaagaaggatggaacatttttgacggattcatcgtgagtttatcactgatggagttagggctcgccaacgtggaaggactgtctgttcttaggagttttcggctcctcagggtgttcaagttagccaagtcgtggccaactctgaacatgctcattaagatcatcggcaattccgtgggggcactgggaaatctcactctggtgctggcaattatcgtctttatctttgcggtggtcggcatgcagctcttcggtaagtcttataaggaatgcgtttgtaagatttcaaatgactgcgagctgccgcgatggcatatgcacgacttctttcatagcttcctgattgtatttagagtgctatgcggggagtggatagaaaccatgtgggactgcatggaagttgccgggcagactatgtgcctgacggtattcatgatggtgatggtcatcgggaacctggtggtcttgaatctgttccttgcccttctgctgtcctccttttcctctgacaacctggctgcgactgacgatgacaatgagatgaataacctgcaaatcgcagttggccgtatgcagaagggcatagatttcgtgaaaaggaagatccgtgaattcattcagaaggcctttgtcagaaaacaaaaagccttggacgagatcaaacctctggaagatctgaacaataaaaaggactcatgtatttccaatcacacgaccatcgagataggcaaagatctcaattacctgaaagacggcaacgggaccacaagtggcataggatcctccgtggagaaatatgtagtcgatgagtctgattatatgtcatttattaataatccctccctgaccgtcaccgtgccaattgccgtcggtgagtcagacttcgagaaccttaatactgaagaattctcctccgaatccgacatggaggaatccaaggagaagctcaacgccacctcgtcttcagagggcagcacggtggacattggcgcgcccgccgagggcgaacagccggaggtggagccagaagagtctctggagcctgaggcttgttttacggaggactgtgtgaggaaattcaagtgttgtcagatttctatcgaagaaggcaaagggaagttgtggtggaacctgagaaagacctgctacaagattgtggaacacaactggtttgaaactttcatcgtatttatgattctgctttccagcggcgctctggcattcgaagacatttacatagagcaaaggaaaacaatcaaaactatgttggaatacgccgacaaggtcttcacatacatattcattctcgaaatgctgcttaaatgggtggcttacgggtttcaagtgtattttactaacgcttggtgctggttagactttttgatcgtggatgtgagtctcgtttctctcactgcaaatgccctaggatactctgagctgggcgctattaaaagcttacggactctgcgtgcactgcgcccattacgggcactatcccggtttgaaggtatgcgtgtggttgtgaacgcccttcttggggccataccaagcattatgaatgtcctgctcgtgtgcctgatcttttggttaattttctctattatgggtgttaatctgttcgctggcaagttctaccattgcattaattacacaacgggggaaatgtttgatgtgtccgtggttaataattattctgaatgtaaggctttgattgagtccaatcaaacagcccgttggaagaacgtaaaggtcaattttgacaatgtgggactcggatatctcagcctgctccaggtggcgaccttcaagggttggatggacattatgtacgccgcggttgactcccggaatgtcgaactgcaacccaaatatgaagacaacctgtatatgtacctgtactttgtcatcttcattatcttcgggtcatttttcaccctgaacttattcatcggggtgattatcgataatttcaaccagcagaaaaaaaaatttggtggccaggatatattcatgacagaggaacagaagaaatactacaatgccatgaagaagctggggtcaaagaaacctcagaaaccaatccccagaccagccaataaatttcagggcatggtgttcgacttcgtgacgaaacaagttttcgacatcagcataatgatcctgatttgcctcaatatggtgacaatgatggttgagacagacgatcagtcgcaggagatgaccaacattctgtattggataaacctcgtgttcatcgtgttatttaccggagaatgtgtgttaaagctcatcagcctccgctattactactttactattgggtggaatatttttgatttcgtagtggtgattttgtctatcgtgggcatgtttcttgctgagctgatcgagaaatatttcgtcagccccacgttgtttagagtgattcggctcgccaggatcgggaggattttgcgcttgattaagggggcaaaagggatacgtacattgctctttgccctcatgatgtccctgccagctctctttaatatcggtttgctcctgtttttggtaatgtttatctatgctatattcgggatgtcgaacttcgcctatgtaaagcgcgaggtagggatcgatgacatgtttaactttgagacctttggcaattcaatgatttgtcttttccagattactactagtgcaggctgggacggactgctagcccccatcctgaatagcggcccacccgattgtgatcctgataaagatcaccccgggtctagcgtcaaaggtgattgcgggaatccttcagtaggcatctttttctttgtgagttatatcattatatccttcctggtggtggtgaacatgtatatagctgtgatactcgaaaacttcagcgttgccacagaagaaagcgcagagcccctgtcagaggacgactttgaaatgttttacgaggtgtgggaaaaattcgatcctgatgccacccaattcattgaatttgctaagctgtccgatttcgccgacgcccttgatccacccctactgatcgcaaagcctaacaaagtgcaattaatcgctatggacctgccaatggtgtccggggaccgtattcattgtctcgacattttgttcgccttcaccaaacgggtgctcggtgaaagcggagagatggacgcattgaggatccaaatggaggaaagattcatggcatctaatccctccaaggtgtcatacgaaccaatcaccacgacattgaagcgtaagcaggaggaggtcagcgctattattattcagagagcataccgtagatacttgctaaagcagaaagtaaagaaggtaagcagtatctataagaaggacaagggcaaagagtgtgatggaacaccaatcaaggaagacaccctcatagataagctgaatgagaactcaacaccagaaaaaacggatatgaccccaagcacaacatctccaccctcttacgattctgtgacaaaaccagaaaaggaaaagtttgaaaaagataagtctgagaaggaggataaagggaaggatattcgagaatccaagaaatag

SEQ ID NO: 134688 - DNA, 6018 bp, synthetic construct
  misc_feature 1..6018: note = Description of Artificial Sequence: Synthetic coding sequence
  source 1..6018: mol_type = other DNA
atggcacagtctgtgttggtgccccctggacctgattcatttaggttctttacaagggagagcctggccgcaattgagcagcgaatcgctgaagagaaggcaaaacggccaaaacaagaacgcaaggacgaggatgatgagaatggccctaaacccaacagtgatcttgaggccgggaagagcctgcctttcatctacggagatatccctcctgaaatggttagcgtaccactcgaggacctcgatccatattatattaacaagaaaaccttcattgtgttgaacaaagggaaggctatctctagattcagtgcgacacccgctctttacattctgaccccctttaaccctattagaaaactggctattaaaattctcgtgcatagtttattcaacatgcttattatgtgtactatactcacgaactgcgtattcatgacgatgagtaatccccccgattggaccaaaaacgtcgagtatacgttcactgggatctacacctttgagagtctaataaagatcctcgctcgcggcttctgcttggaggacttcacattcctaagagacccctggaactggctcgacttcacggtcataacgtttgcatacgtaactgagttcgttgacctcggaaatgtgagtgctctacgaacctttcgcgtgctgagagctctgaagactataagcgtgatcccgggcttgaaaaccatcgtcggagcacttattcagagtgtcaaaaagctcagtgacgtcatgattcttactgtgttttgcctgtcagtgtttgcactgatcggactgcaattgttcatggggaacttgcgcaataaatgtttgcagtggccacccgataactcctctttcgagatcaacatcacctcattctttaacaatagccttgatggaaatggtaccacctttaatcggaccgttagtattttcaattgggacgagtacatagaggacaaatcccatttctatttcctggaagggcagaacgatgccctgctgtgcggaaatagctctgatgcaggacagtgccccgagggatacatttgcgtgaaagctggtagaaatcccaactacggctacaccagtttcgatactttttcatgggcatttctgagcctgtttagactcatgacgcaagacttctgggagaatctgtatcagttaacactgagagccgccggaaagacttatatgatcttcttcgtgctggtgatcttcctcggatcgttctaccttataaatttgatcctggccgtagtggccatggcctacgaggagcagaatcaggcaactctcgaggaggctgaacagaaagaagctgagttccagcaaatgcttgaacaactaaagaagcagcaagaagaggctcaagcagccgcagctgccgcatctgccgaatcaagagacttcagtggcgctggaggaattggggtgttctctgaatcatcctcggttgcttctaagctgtccagtaagtccgaaaaagagctcaagaaccgtaggaagaagaaaaaacagaaagagcagtctggcgaagaagaaaaaaacgatagggtcagaaaaagcgagagcgaggatagcattcgcagaaaaggttttaggttctctctggaaggcagtcgtctcacatatgagaagaggttctcctctccacaccagagcctgctttctattagagggtccttgtttagcccccgccgaaacagccgggctagtttgttctcattccgaggcagggccaaagatatcgggtctgagaacgatttcgccgacgacgaacattccacttttgaagacaacgattctcgccgcgattcgctgttcgtgcctcatcgccatggtgagcgacgccactccaacgttagtcaggccagtagggcctcccgtgtactgcccatcttacctatgaacgggaaaatgcattctgcagtcgactgcaacggcgtggtgtctctcgtgggcggcccgtccacccttacgtccgccggtcagctgcttcctgaaggcacaacgacggagactgagatccgaaagagacggtcttcgtcctaccatgttagtatggacctgctcgaggaccctacatcccgacagcgcgcaatgagtattgcttccattctaaccaatactatggaggagttggaagaaagtaggcagaagtgtcctccctgttggtacaagtttgctaacatgtgccttatctgggattgctgcaagccctggctaaaggtgaagcacctcgtgaacctcgtggtgatggacccttttgtagacttggccatcacaatttgtattgtcctcaataccttgtttatggctatggagcattacccaatgacagaacagttttcatctgtcctgtccgtggggaacctggtattcaccggaatcttcaccgccgagatgtttctgaagatcattgcaatggatccctattactacttccaggagggctggaatatcttcgacggattcatcgtgagcctctcgctgatggagctgggactggctaacgtggaaggtctgagcgtgctgcggtcctttcgcctactccgggtgtttaagctcgcaaaatcatggccaacactcaacatgctgattaaaatcataggaaatagtgtcggcgctctcgggaatctgaccttagtcttagctatcatcgtcttcatctttgctgtggtcgggatgcaactattcggcaagtcatacaaggagtgcgtgtgtaaaattagcaacgactgtgagctcccccggtggcacatgcacgacttttttcacagttttctcatagtgtttcgggtgctgtgtggagagtggatcgaaactatgtgggactgtatggaagtcgccgggcagactatgtgcctgacagtgtttatgatggttatggtgattggcaatctcgtcgtcttaaatctgtttctcgctttattgctttcttcgttctcctccgacaatctggctgcgacagatgacgataacgaaatgaataatctacagatcgcagtcggcaggatgcagaaaggaattgacttcgtgaagcggaagatacgcgagttcatccaaaaagctttcgtgcgaaagcaaaaagcattagatgagattaagcctctggaggacttaaataacaagaaggactcatgcatttcaaaccacaccaccatcgagatcgggaaggacctgaactatttaaaagatggaaatgggacgacctcaggaatcgggtcttctgtggaaaaatatgtcgtggacgaatcagattacatgagcttcatcaataatccctcactcaccgtgacggttcctattgcggtcggagagtccgattttgagaatctgaatactgaggaatttagttccgaaagcgacatggaggagtccaaggagaagctgaacgctactagttccagcgagggatccactgtggacattggagcaccagctgagggggagcagcctgaggtcgaacccgaagagagccttgaacccgaagcctgctttactgaggattgcgttcgcaagttcaaatgttgccagatctctattgaggaggggaaaggcaaactctggtggaatctccgcaaaacctgttacaaaatcgtggagcacaactggtttgaaacctttattgtctttatgatccttttaagctccggcgccctcgccttcgaagacatttacatcgagcagaggaagactattaagaccatgctcgagtacgccgacaaagtgtttacttatatatttattctggaaatgttgctgaagtgggttgcatatggatttcaggtgtatttcacaaatgcctggtgctggcttgattttcttatcgtggacgtatccctcgtctcccttacagctaatgctttaggatattcagagctgggcgccattaaaagtctgagaacactccgggccctccgccctttgcgggccctgagccggtttgaaggcatgcgagtcgtagttaacgctctgctgggcgccatacctagcataatgaacgttctgctcgtctgcctgattttttggttgattttctccattatgggggtgaatctttttgccggaaaattctaccattgtatcaactacaccacaggagaaatgtttgacgtaagcgtcgtgaacaactactcagagtgcaaggccctgattgagtccaatcaaacagcgagatggaagaacgtaaaggtaaatttcgataatgtgggtctgggctatttaagcctattgcaggtggcaacttttaaaggctggatggacattatgtatgcagcagtggactcacgaaacgttgagctgcagcctaagtacgaagacaatttgtacatgtatctgtatttcgtgatttttatcatctttggatctttctttactttaaatctcttcattggagtgatcatcgacaatttcaatcagcagaagaagaagtttggcggtcaggacattttcatgacagaggagcagaaaaaatactataacgccatgaagaaactcggctccaagaagccacagaagcctataccgaggcccgccaataagtttcaggggatggttttcgattttgtgacaaagcaggtgttcgacatatctataatgatactgatctgcctgaatatggtgaccatgatggtggaaacggacgatcaaagtcaggagatgactaatatattatactggataaacctcgtgtttattgtcctatttacaggggaatgcgttctcaagctgataagtctcaggtactactattttactatcggctggaacatatttgactttgtggtggttattctttcaattgtaggaatgtttctcgcagaactgatcgaaaagtatttcgtgtctccgacactgttcagggtgattaggctggctcggattggccggatattacgcttgattaagggtgccaaaggtatacggacgctcctgtttgccttgatgatgtcactgccagcactttttaatattggacttctcctgtttctcgtcatgttcatatacgccatcttcggaatgtccaactttgcctacgtgaaaagagaagtgggaatcgatgacatgtttaactttgaaacttttggcaatagcatgatttgcctctttcagattacaacctccgcgggctgggacggcctactcgcacctattctgaactccgggcctcctgattgtgatcccgacaaggatcatcctggtagctcagttaaaggcgattgcggtaacccctcagtcgggattttcttcttcgtctcatacataatcataagctttcttgtggtcgtgaatatgtatatcgccgtgattcttgagaattttagtgtagctacagaagaaagtgccgaacctctatccgaagacgacttcgaaatgttctacgaagtttgggaaaaattcgatcctgacgctacccagttcatagaattcgccaaactgtcagactttgccgacgccctagaccctcccctcctgattgccaaacccaataaggtccaacttattgcaatggacctccctatggttagcggcgaccggattcactgtctcgatattctgtttgcttttaccaaaagagtgcttggcgagagcggcgagatggacgcgttacggatacaaatggaggagcggttcatggcttcaaaccccagcaaggtgagctacgaacccatcacaaccactctaaagagaaaacaagaggaggtgtccgccatcattattcaaagggcatatcgtaggtatctcttaaaacagaaggtgaagaaagtgagctccatttacaaaaaggacaagggaaaagaatgcgatggtacacccatcaaagaggatacactgattgataagttgaacgagaatagtacaccggagaaaactgacatgacaccttccacaaccagccctccgagttacgatagcgtcacaaaacctgagaaagaaaagttcgagaaggacaagtctgaaaaggaggataaaggtaaagacattcgggagagcaagaaatag

SEQ ID NO: 134689 - DNA, 1512 bp, synthetic construct
  misc_feature 1..1512: note = Description of Artificial Sequence: Synthetic coding sequence
  source 1..1512: mol_type = other DNA
atggcgcaaagcgtgctcgtgcctccaggccctgattctttccgcttctttacccgagagtctttggcggctattgagcagaggattgctgaggaaaaagcgaaaaggcccaagcaggaacgcaaggatgaagatgatgagaatgggcccaaaccaaatagcgacctcgaagctgggaaatcgctgcccttcatctatggggatatcccacctgagatggtcagcgtgcccctggaggacttagacccatattacattaataagaaaactttcatcgtgctgaataaggggaaggctatatctagattctccgccactccagcactgtacatcctgacaccattcaaccctatacgcaaattggcaattaagatccttgtgcatagtctgtttaatatgctgatcatgtgcactatattaactaattgtgtgttcatgacgatgagtaacccaccggactggacaaaaaacgttgaatacacgttcacaggcatatataccttcgaatctcttataaaaatcctcgctcggggtttttgcctggaggattttacttttctgcgcgatccatggaactggctggattttacagttataactttcgcgtacgtcacagagttcgtggacttggggaatgtgtctgccctaagaaccttcagagtgctgcgtgcgttaaaaaccataagtgtgattccaggtctgaaaaccattgtcggcgctctcatccaatcggtaaagaagttatctgacgtgatgatactcacggtgttctgtttgtcagtttttgccctcatcggcctgcagctgttcatgggcaatctgcgtaacaaatgcctgcagtggcccccagacaattcatcattcgaaatcaatattacaagcttcttcaacaattccctcgatggcaacgggaccacgttcaacaggaccgtttccatcttcaattgggacgaatacatagaagataaaagtcacttctacttcctcgagggtcaaaatgacgcactcttgtgcggcaactctagtgatgctggtcagtgtccagaggggtacatttgtgtcaaggcaggtcggaatcctaattacgggtatacatcttttgatacattcagttgggcttttctttcactgttcaggcttatgacgcaggatttctgggaaaacctgtaccagctgacactccgtgccgccggtaagacctacatgatcttcttcgtcttggtcattttcctcggttctttctatctgatcaacctgatattagccgtcgtggccatggcttatgaagagcagaatcaggcaaccttggaggaagccgagcagaaggaagccgagtttcaacagatgctcgagcaactgaaaaaacaacaggaggaggcgcaggccgctgcagccgccgcgtccgctgaaagcagggactttagtggcgccggtggaatcggagtatttagtgaaagttccagcgtggcctctaaactgtcaagcaagagtgaaaaggaacttaaaaattag

SEQ ID NO: 134690 - DNA, 648 bp, synthetic construct
  misc_feature 1..648: note = Description of Artificial Sequence: Synthetic coding sequence
  source 1..648: mol_type = other DNA
atgcaccgggacgcttggctgccccgccccgccttctccctgacaggtctttcgttgtttttctccctcgtgcctccgggaaggagcatggaagtaacggttcctgcgaccctcaatgttctaaacgggagcgacgctaggctgccttgtaccttcaattcttgctacacagtcaaccataaacagttcagtctcaattggacctaccaggaatgcaataattgctcggaggaaatgtttctgcagttcaggatgaaaatcatcaacctaaaactcgaacgtttccaggatcgagtcgagttttcgggcaacccctccaagtatgacgtgtctgtcatgttaagaaacgttcagcctgaggacgaggggatttataactgctatattatgaaccctcctgaccggcacaggggccacggtaaaatccatctgcaagtgcttatggaggaacccccagagagggactccaccgtggctgtgatcgtgggggcaagcgtgggcggattcttggcagtggttattttggtgctgatggtggttaagtgtgtgcggcgcaaaaaggagcagaaactgagtaccgacgacctcaaaacggaagaagaggggaaaacagacggcgagggaaaccccgatgatggcgctaaatag

SEQ ID NO: 134691 - DNA, 6003 bp, synthetic construct
  misc_feature 1..6003: note = Description of Artificial Sequence: Synthetic coding sequence
  source 1..6003: mol_type = other DNA
atggcccaggccctgctggtgccacccggcccagaaagtttccgcctattcacccgtgaaagtttggcggcaatcgaaaagcgagctgctgaagagaaagccaaaaagcccaagaaagagcaagacaacgatgatgaaaacaaacctaagcctaacagtgacctggaagccggcaaaaatctcccctttatttacggagatatcccccctgagatggtgagcgaacctttagaagatctcgacccctactatattaacaagaagacgtttattgtgatgaataaggggaaagccattttcagattcagcgctaccagtgccctgtacatcttgacgcccctgaaccctgtgagaaaaatcgccataaagattttggtgcactccctcttttccatgctgattatgtgcaccatacttactaactgcgttttcatgaccctttcaaaccctcccgactggaccaagaatgttgagtacacttttaccgggatctatacttttgagagtctgattaaaatactagctaggggattttgtcttgaagacttcacatttctgcgggatccctggaactggcttgacttttcggtgattgtgatggcgtatgtgacagagtttgtggatttgggtaatgtttctgctcttaggactttccgcgtactcagagccttgaaaaccattagtgtcatccccggtctaaaaactattgtgggcgcgctgatacaatcagtaaagaagttgtccgatgtcatgattttaacagtgttctgcctttctgtgtttgctctcattggacttcagctgtttatgggaaacctccgtaataaatgtctgcagtggccgccgagcgactccgcctttgagactaacacaaccagttacttcaatggaaccatggattccaacggtacctttgtgaatgtgacaatgagtacctttaactggaaggattacattggggacgactctcacttctacgtgctggacgggcagaaagaccctctactttgtgggaacggatcagacgcaggacaatgccctgaaggctacatctgtgtcaaggctgggagaaacccgaactacgggtacactagcttcgacacattcagctgggcctttctgtccctgttccggctgatgacacaggactactgggagaatctgtatcagttaaccctgagggcggctggcaagacttacatgatcttctttgtactagtcattttcttgggctccttttacctggtaaatctcatcctggccgtggtcgccatggcgtatgaggaacagaaccaggctaccctggaagaggctgaacagaaagaggcagagttccagcagatgctggagcagcttaagaagcagcaggaggaggcccaagctgtggctgcagcgtcagccgcttcccgggatttttcgggaatagggggtctcggagagctgctggaaagttcatccgaggcctcgaagctctcctccaaatccgcaaaggagtggagaaataggcggaagaagagacgacagcgcgaacacctcgagggcaacaataagggggaacgtgactcgttccccaaatccgagtcggaagattccgtcaagagaagttccttcttgttttctatggatggaaaccgcctgaccagtgacaaaaagttttgctcaccgcaccagtccctcctctccatcaggggatccctgttttccccccggcgaaactcaaagacaagcatcttttcctttcgtggccgcgccaaggatgttggtagcgagaatgactttgcggacgacgaacactctacgttcgaagatagcgagagcagaagggactcccttttcgttcctcaccggcacggtgagaggcgcaattctaatgttagtcaggcatctatgtcatccaggatggtgcctggcctgcccgctaatggcaagatgcacagcaccgtggattgtaatggggtggtgtctctggtaggaggcccaagcgctctgacatcccctacagggcagctaccccccgaggggaccaccacagaaactgaggtccggaaacgccgcctgagctcctaccaaatttctatggagatgctggaagattccagcggccggcagcgtgccgtctctattgctagtattttgaccaatactatggaagagctcgaagagtctcgccaaaaatgtccaccgtgttggtatcggttcgctaatgtgttcctaatctgggactgttgtgatgcttggctaaaggtgaaacatttggtcaatttaattgtgatggatccctttgtcgacctcgccatcacaatttgcattgtgctgaatacactgttcatggccatggagcattaccctatgacggaacagttctcatccgttcttactgtcgggaatctggtcttcacgggtatctttaccgccgagatggtgttgaaaataattgctatggacccatactattacttccaggaaggatggaacatctttgatggcatcatcgtttccctgtctctgatggagctaggattgtctaatgtcgaagggctttcggtgctgagaagctttagactgctccgcgtgttcaagcttgctaagtcctggcctacactgaacatgctgattaaaattatcggaaacagtgtgggcgcactggggaaccttaccttggtgctggccataatcgtgtttattttcgccgtggtcggtatgcagctgttcggtaagagctataaggagtgtgtgtgtaagatcaacgatgattgcacattgcctaggtggcatatgaacgattttttccatagcttcctgatagtgttcagagttctttgtggggaatggattgagaccatgtgggactgtatggaagtggccgggcagactatgtgtctcatcgtcttcatgcttgtgatggtgattggaaatctcgtggtgctgaacttgtttctagccctcctcctgtcatcctttagctccgacaacctagcggctactgatgatgacaatgaaatgaacaatctgcagatcgccgtcggccgaatgcaaaagggcatcgactacgttaaaaacaaaatgagggaatgcttccagaaggcgttctttcgaaagcctaaggtcatcgaaatccatgagggaaataagattgattcttgcatgtccaataacactggcattgagatctccaaagaactgaactatttgagagacggaaatggaactacctccggggtcggtacagggagcagcgttgagaagtatgtcatcgacgagaatgattacatgtccttcataaacaatcctagcttaactgtgacagtgcctatcgccgtgggagaaagcgattttgagaatctaaatacggaggagtttagctccgagagtgagctcgaagagagcaaagagaaattgaatgccacgagtagttcagaaggctccaccgtggacgtcgtactgccacgtgagggcgaacaagcagaaactgagccggaggaagacctgaaacctgaagcatgcttcacagaggggtgcattaaaaagttcccattctgtcaagtgtccacagaggagggaaagggaaaaatctggtggaatcttaggaaaacttgctacagcatcgtcgaacacaactggttcgaaacttttattgtatttatgatactgctgtcctcaggggcactcgcattcgaggacatttatatcgagcaaaggaaaaccatcaagactatgctggaatatgccgataaagtctttacctatatattcatcctggagatgctactcaagtgggttgcttacggtttccagacctattttaccaacgcatggtgttggttggactttctgatcgtggatgtgagtctagtgagcctcgtcgcaaacgctttggggtattccgaattgggggccatcaaatccctgaggacactgagggcccttagacctcttcgagctttgtctcgttttgaagggatgcgggtcgtcgtcaatgccttagttggagccatccctagcatcatgaacgtactgctcgtgtgcctgattttttggctgatcttcagcattatgggagtcaacttatttgcgggaaagttttaccattgtgtcaatatgaccaccggaaacatgtttgacatcagcgacgtgaacaacctgtccgactgccaggccctagggaagcaggcccgctggaagaatgtgaaggtgaactttgacaacgtaggcgccggataccttgctctacttcaggtggccacgttcaagggatggatggacataatgtacgctgctgtggacagtagggacgttaagcttcaacctgtttacgaggagaatctttatatgtatctatactttgtcatctttatcattttcggcagcttcttcacgctcaatctgttcatcggagtgattatcgacaactttaatcagcagaagaagaagttcggaggacaggatatcttcatgaccgaagaacagaagaagtattacaatgccatgaagaagcttggttccaaaaaacctcagaagccgatccctcggccagctaacaagttccaggggatggtgttcgactttgtaacacgtcaggtatttgatatttcgataatgattctcatatgtctgaacatggtgactatgatggtcgagacagatgatcagggcaagtatatgacacttgtactgagtaggattaatctcgtgtttattgtgctgtttacaggggagtttgtcttgaaactagtctcgttgaggcattattacttcaccatcgggtggaacatcttcgactttgtagtcgtgatattgtctattgtgggaatgtttctcgccgaaatgattgagaagtattttgtctccccaacgctgttccgcgttataaggctggctcgcatcggccgtatcctgcggttaatcaagggtgccaaagggattaggacactactgttcgcccttatgatgtccctgcccgccctattcaacatcgggttgctcttattcctggtaatgttcatatatgccatattcggaatgtctaatttcgcttacgtgaagaaggaggcaggtatcgatgatatgtttaacttcgaaacttttggaaactcaatgatatgtctttttcaaattaccacctctgcgggttgggacggtcttttggcaccaattctgaactctgcccctccagattgcgaccccgatacaattcaccctggtagctccgtcaagggcgactgtgggaatcccagcgtcggcattttttttttcgtgagctatatcattattagcttcttagtggtggtgaatatgtatattgcagtgatcttggagaacttctctgttgccacagaagagagtgccgaaccgcttagcgaggatgatttcgagatgttttatgaagtttgggaaaagttcgaccctgatgccacacagtttattgagttctccaagttgtctgattttgccgccgcactggacccacctctcctgattgctaagccaaacaaagtccagctgatcgccatggatctcccaatggtgtcgggcgaccgcatccactgcttagatatattatttgcattcacgaagagagtgctgggggagtcgggagagatggatgcattacggatacagatggaggatcgcttcatggcgagcaacccttcaaaagtttcatatgagcctattactacaacgttaaagaggaaacaggaggaggtcagcgccgcaataattcagcgcaattttcgctgctatttgctcaaacaacggctaaaaaatatatcttccaactacaataaggaagcgatcaaaggccgaattgatctcccgataaaacaggacatgatcatcgataaacttaacggcaatagcacaccagaaaagaccgacggctcatcctctaccacatctcctccctcgtacgactctgttacgaagccagataaagagaaatttgaaaaggacaagccagagaaggagagtaaaggaaaggaggtgcgggaaaaccaaaaatag

SEQ ID NO: 134692 - DNA, 6003 bp, synthetic construct
  misc_feature 1..6003: note = Description of Artificial Sequence: Synthetic coding sequence
  source 1..6003: mol_type = other DNA
atggctcaggcgctgctggttcctccagggcccgagagcttcaggctgtttactagggaatctctcgcagctattgaaaaaagggccgccgaggaaaaagccaagaagcccaagaaagaacaggacaacgacgacgagaacaagccaaaacctaattctgacctagaggctggtaagaacctgccttttatctatggagatattccaccggaaatggtgtcagagcccctggaggacctggacccctattacatcaataaaaagacattcatcgtgatgaacaaggggaaagccatcttcaggttctctgcaacctcagcgctctacatcctgaccccactgaatccggttcggaaaatagccatcaaaatactggtgcatagcctcttttcgatgcttatcatgtgcactatactaacaaattgcgtattcatgaccttgtctaacccccctgactggactaaaaatgtggagtacaccttcacaggtatttacaccttcgaatctctgatcaaaatcctagcgcgcggattttgtctggaagatttcacctttctgcgagacccctggaattggctcgactttagcgtgattgtgatggcttatgtcacagaattcgtgtcccttgggaatgtgagtgctctgaggactttccgcgttttacgcgctctgaagacaataagcgttatccctggccttaaaactatagttggtgcgctcattcaatcagttaaaaaactgtctgatgtgatgattttgaccgttttttgtctcagtgtgtttgccctgattgggttgcagctgttcatgggtaacttgaggaataagtgtctgcagtggcctccgtctgattcagcgtttgagaccaacactacatcttattttaatggtactatggacagcaatgggacatttgtaaatgtcactatgtctacattcaattggaaggactacatcggcgatgactcgcacttttatgtcctcgacgggcagaaagacccactgttatgtggcaatgggagtgatgctggccagtgcccagagggttacatttgcgtaaaagctggccggaacccaaactacggttatacatctttcgataccttttcatgggcttttctttccctgttcaggcttatgacccaggattactgggagaatctgtatcagctcaccttgagggccgccggaaagacttacatgatattcttcgtgctggtcattttcctcgggtcattttacttggtcaacctgatccttgccgtcgtggcaatggcctacgaggaacagaaccaagccactctggaggaggcggagcagaaggaggcggagtttcagcaaatgcttgagcaactgaagaaacagcaggaagaagcccaggctgtcgccgctgcaagtgctgcgagtcgagacttttccggaatcggcggcctgggggaactattggaaagtagctcggaggccagtaagctctcgtcgaaaagtgcaaaggagtggcggaatcgccgaaaaaagcggcggcagagggagcacttggaagggaacaataagggcgagcgcgatagtttcccaaaaagcgaatctgaggattccgtaaaacgcagtagcttcctgttctcgatggacggcaaccgtctgacttctgataagaaattctgcagtccacaccagagtctcttgagtatccgggggagcctcttctcccccagaaggaactccaagacctctattttttcttttcgcggccgtgctaaggacgtgggctctgaaaatgactttgctgatgacgagcactcaacctttgaggattcagagagcagaagagattccctgtttgtgcctcatagacatggggagcggaggaactccaatgtttcccaggcaagcatgtcatcgcggatggttcctggcctgccggccaatgggaagatgcactcaaccgtagactgtaacggagtggtttcactggtcggaggtccctctgcattaacaagccctacaggccagctgccccctgaaggtactacaacggaaactgaagtgcggaagaggcgtctatcctcataccagatttccatggagatgctagaagactccagtggtcggcaacgcgccgtgtctatcgcctctatcctcacaaataccatggaagaactggaggaatcccggcagaagtgtcctccatgttggtatcggttcgccaatgtgtttttgatttgggactgctgcgatgcatggttgaaggtgaaacatctggtaaacttaatcgtgatggatcccttcgtcgacctagcgattaccatctgtattgtactgaacacactcttcatggccatggagcattatccaatgactgagcagttctcaagtgtgctcacggtgggaaacctcgtgttcaccggaattttcacggccgagatggtacttaaaatcatcgctatggatccctactactatttccaagaaggatggaatattttcgacgggattatcgtctctctctcgctcatggaactgggactgtcaaatgtagagggcctgtcagtgctccggtccttcagattgctgcgcgtgttcaaactggccaaatcttggccaactttgaatatgttgattaagatcatcgggaactccgttggggcgctaggaaatttaactctcgtcttggccataatcgtattcatctttgccgtcgttggcatgcagctcttcggcaagtcctataaggagtgcgtgtgcaagatcaatgacgactgcacactgccgcgctggcacatgaatgacttcttccactcattcctgatcgtgttcagagttctgtgcggtgagtggatagaaacaatgtgggattgtatggaagttgccggccagaccatgtgtttgattgtctttatgctggtgatggtgatcgggaatctcgtcgtgcttaatttgttcctggcactcctcctgagctcgttcagttcagacaacctcgcagccacagacgatgataatgagatgaacaatctgcagatagccgtgggcagaatgcagaagggtatcgattacgtcaaaaacaagatgcgcgagtgctttcaaaaggccttctttcgcaaaccaaaagttattgagattcatgaaggaaacaaaattgatagttgcatgtcaaacaacacaggaatcgaaatctccaaggagctgaattatctgcgtgatggtaatggcactacctcaggagtggggacgggtagtagcgtggaaaagtatgtgattgacgagaatgattacatgtcttttattaacaatccctcattgacagtgactgttcctattgctgtgggggagtcagacttcgaaaatttgaacacggaagaatttagttccgaaagcgaactggaggaatcaaaagagaagctgaatgccacctctagttctgaagggagcacagtcgatgtggtgctgcctagggaaggggagcaggccgaaactgagcctgaggaagatttgaaaccagaggcatgttttactgaggggtgcatcaaaaagtttccattttgtcaggtctctacagaggaagggaaagggaagatatggtggaacctcagaaaaacctgctacagcatcgtggagcacaattggtttgaaaccttcatagttttcatgattctcctcagctccggggcgctggcatttgaagacatctacatcgaacaaagaaaaactattaagaccatgcttgagtacgccgataaggtgttcacttacatttttatactggagatgttactgaagtgggtggcctatggtttccagacctacttcacgaacgcctggtgctggcttgactttctgatcgtggatgtgagccttgttagtctggttgccaacgccctggggtatagtgagttgggggctattaagagcctgaggacgctccgagccctgcggccccttcgagctctgtcacggttcgagggaatgcgggtagtggttaatgccctagtcggcgccattccatcgattatgaacgtgctcctggtctgtctgatcttttggctgatattttccatcatgggtgtcaatcttttcgccgggaagttctaccactgcgtgaatatgactaccggcaatatgttcgacattagtgacgtgaataacctcagcgattgccaggccctgggaaagcaggcacggtggaaaaacgtgaaggttaactttgacaacgtgggagccggctacctggccctgctgcaggtcgcaaccttcaaaggatggatggatattatgtacgcggccgtggacagccgggacgtgaagctccaaccggtgtacgaggaaaacttgtatatgtatctatactttgttattttcattatcttcggctccttctttactctgaatctcttcataggtgtgatcatcgacaacttcaatcagcagaagaaaaagtttggaggccaagatatattcatgaccgaggagcagaaaaaatactataatgctatgaaaaaattggggtcaaaaaagcctcaaaaacctattcctagacccgctaataaattccaaggcatggtgttcgattttgttacgagacaggtctttgatatctcaattatgatccttatttgcctgaatatggtgactatgatggttgagactgacgatcaaggaaaatatatgacattggtcctgtctcgcattaatcttgtgttcatcgtgctgttcacaggcgaattcgtgctgaaactggtttcactgaggcattactacttcactattggctggaacattttcgacttcgtggttgtcattcttagcattgtggggatgttcctggctgagatgattgagaagtacttcgttagccctacacttttccgtgtaatccggctcgctagaatcggccgtatcctcagactgatcaagggagccaaggggatcagaacactcctgtttgcactcatgatgagcctgcccgccctgttcaacattggtctgcttctgttcctggtaatgtttatttacgccattttcgggatgtccaatttcgcctatgtgaagaaggaggctggcatagacgacatgttcaatttcgagaccttcggtaacagtatgatttgcctctttcagatcacaacctctgcgggatgggacggattgcttgcccccatcctgaactccgccccacctgattgtgaccccgatactatccaccccgggagcagtgtaaagggcgactgcggaaatccctcggttggcattttcttctttgtgagttacatcatcatcagctttcttgtggtggtcaatatgtacatcgctgttatcctggagaacttcagtgtagccactgaagagagcgccgaaccgctgtcggaagacgacttcgagatgttctacgaggtttgggaaaagttcgacccagacgccactcagttcatagagttttctaaactctctgacttcgctgcagcactggacccacccttgctcattgctaagcctaataaggttcagctgattgcaatggatctgcccatggtcagcggagatagaattcactgcctggatatattgtttgcattcactaagcgcgtgctgggggaaagtggcgaaatggatgccctgaggattcagatggaagatagattcatggccagtaacccctctaaagtgagctatgaaccaatcaccactactctgaagcgcaagcaggaggaagtctccgccgcgatcatacagcgcaatttccgatgttacctgctcaagcaaaggctcaaaaatatctcctccaactacaacaaagaggccatcaagggtcgaattgatcttcccatcaagcaggacatgattatcgacaagctcaatggcaatagtacacccgaaaaaaccgacggttccagctcaactacttctcccccaagctacgactccgtaacaaagcccgacaaggaaaagttcgaaaaggacaagcctgaaaaagaaagtaagggcaaggaggtgcgggaaaaccagaaatag

SEQ ID NO: 134693 - DNA, 5856 bp, synthetic construct
  misc_feature 1..5856: note = Description of Artificial Sequence: Synthetic coding sequence
  source 1..5856: mol_type = other DNA
atggcacaagccctcctggttcctcccggacccgagtccttcaggctgtttaccagagaatctctggccgctattgaaaagcgcgcggccgaagagaaagcgaaaaagcctaagaaggagcaagataacgatgacgagaacaagccgaaacctaactccgacttggaagctgggaaaaatctgcccttcatttacggagatatccctccagagatggttagtgagcctctcgaagacttagacccttattatatcaacaagaaaaccttcatagtgatgaacaaaggaaaagccatttttcgctttagtgccacctccgctttatatatactgacccctcttaatcccgtcagaaagattgcaatcaaaatcctggtacatagtctgttttcaatgttgataatgtgtactattttaaccaactgcgttttcatgaccctgagtaatccacctgactggactaaaaacgtagagtacacgttcactggcatttatacattcgaaagcctcattaagattttggccagggggttttgcctggaggatttcacctttttaagggacccatggaattggttagacttctcagttatcgtgatggcttacgtgacggaatttgtatctcttggcaatgttagtgcactcaggacattccgagtgctgcgggccttgaagaccatcagtgtgatccccggcttgaagactatcgtgggcgccctaatacagtccgtgaagaaactctcagacgtcatgattctgactgtcttctgcctcagtgtatttgcgctgatcgggttgcagctcttcatgggtaacctgcgcaacaagtgcctacagtggcccccgagcgatagtgcttttgaaacaaacaccacttcatactttaacggaactatggactcaaatgggacattcgtgaatgtaaccatgagtacctttaactggaaggattatattggagatgattcccacttctatgtgctggacgggcagaaggatccgttactgtgcggcaatgggagtgatgcagggcagtgcccagaagggtacatttgcgtgaaagctggacgcaaccctaattatggatatacttcgtttgacactttctcatgggctttcttgtctttatttaggctcatgactcaagactactgggagaacctgtatcagctgacattgagagccgccggcaagacttacatgatttttttcgtgctggtcatctttcttggatctttctatctcgtcaatttgatcctggcagtcgtcgccatggcctacgaggagcagaatcaggctactttagaggaagcagagcagaaagaggcagaattccagcagatgctggagcagctcaaaaaacagcaggaggaagctcaggctgttgcagctgccagcgcagcttctagagatttttccggcattgggggcctgggcgagctgctcgagtctagctcagaggctagcaagctgagttcaaaaagcgccaaagagtggagaaaccgaagaaagaagcgcaggcagagggagcatctggagggcaacaacaaaggtgaacgggacagtttccctaagagtgaatcagaggactcagtaaagcggagtagctttctgttcagtatggatggcaacaggttgactagcgataaaaaattctgtagtccccatcagagtctgctatccattagaggatctctgttctccccccggcgcaatagcaaaacaagtatcttcagctttaggggacgggccaaagacgtcgggagcgaaaatgatttcgcggacgatgagcacagcacatttgaggattctgagtcccgccgtgattcactttttgtgccacaccgacacggagaaagacgaaactctaacgggacgactaccgaaacggaggttagaaagcgcaggctgagctcctaccagatttctatggagatgctcgaggacagttccggtcgccagcgggcagtctcaatagccagcattctgactaacaccatggaggagctggaagagtctcggcagaagtgccccccttgctggtatagatttgcgaatgtgtttcttatctgggactgttgcgacgcctggctgaaagtaaaacatcttgtcaatttgatagttatggatccattcgtggacctcgctattactatctgtatcgtactgaatacgctgtttatggccatggagcactaccctatgaccgagcagttttcgtcagtattgacagttggcaacttggtgtttactgggatatttacggcagagatggtgttgaaaattatcgccatggacccttactactacttccaggagggctggaacatttttgacggcatcattgttagtttgagtctaatggagttaggtcttagtaacgtggagggtcttagcgtgctgaggagcttccgcttgttgagagtcttcaagctcgcaaagagctggccgacccttaacatgttgatcaagatcattgggaattcagtgggggccctgggaaatctcaccttggtgctcgccataatcgtcttcatttttgccgtcgttggcatgcagctgttcggtaaatcatacaaagagtgcgtgtgtaagatcaacgacgactgcaccctgcctcggtggcatatgaacgatttctttcactcattcttgattgtcttcagagttctctgtggggagtggattgaaactatgtgggattgcatggaggtcgcaggacagaccatgtgcttgattgtgtttatgctcgtgatggttataggcaatctggtggtcctcaatctctttctggcactgctcctgtcttcattctcaagtgataacttagcagctaccgatgacgacaacgagatgaacaacctgcagattgcagtgggacgaatgcaaaagggaatcgattatgttaaaaataagatgagagaatgttttcagaaggctttcttccgaaaaccaaaggtgatagaaatccacgagggaaataaaatcgactcttgcatgagcaataacaccggcatcgagatctccaaggaactaaactatctgagagacggcaatgggactacgagcggcgtggggacgggatcttccgtggaaaaatatgtaatagacgaaaatgactacatgtcatttatcaataacccgagccttaccgtgactgtgcctattgctgtcggggagtcagattttgagaatctgaatacggaggagttctcttcagagagtgaattagaagaatcaaaagaaaagttgaacgccacctccagctctgaaggtagcaccgtcgatgtagtactacctcgcgagggggagcaggccgaaactgagcccgaggaggatcttaagccagaggcctgtttcactgaaggatgcatcaagaagtttcccttctgccaagtatccacagaggagggcaaaggcaagatttggtggaacctgagaaagacctgctatagcatagtagaacacaactggttcgagacctttattgtttttatgattctcctgtcatctggggccctggcctttgaggatatctacattgaacagcgcaagaccattaaaacaatgctagagtacgctgacaaggtgttcacatacatttttattctggaaatgctgttgaagtgggtggcttatgggttccagacttacttcacaaatgcctggtgctggctagacttcctaatcgtggacgtgagtctggtgagcctcgttgcaaacgccctgggttattccgagctcggcgcaattaaatcgctgaggacactgcgtgctctgagacccttgcgcgctctttcaagattcgaggggatgagagtcgtagtgaatgcgctggtcggtgccataccctccataatgaacgtgctcctggtatgcctcatcttttggttaatcttctccatcatgggggtaaacttgttcgctggaaagttttaccattgcgtgaacatgacaaccggcaacatgttcgatatttccgacgtaaacaatctgtcagactgccaggctctcgggaaacaggcacgatggaagaatgtcaaggtcaactttgataacgtgggtgccggatatctggctcttctgcaggtggcaacatttaaaggttggatggacattatgtacgccgcagtggactcccgggacgtaaaattgcagcccgtgtatgaggaaaatttatacatgtatttgtacttcgtgatatttataatctttggatcattctttactcttaatctctttataggggtgatcattgataacttcaatcagcagaagaagaagtttggcgggcaggacatctttatgacggaggagcagaaaaagtattacaatgcaatgaagaaactgggttccaagaagcctcagaagcctatccctcgtcccgccaataagttccagggaatggtgttcgactttgttaccagacaggtgttcgatattagtatcatgatcctcatctgcttgaacatggtcaccatgatggtagaaacagacgatcaaggaaagtacatgactctagtgctgagccgaatcaacctggtttttattgtactcttcaccggggaatttgttctgaagctagtctcactaaggcactattactttacaatcggctggaatatctttgattttgttgttgtaattttgagtatcgttggcatgttcctggcggagatgatagagaaatactttgtgagcccgaccctctttcgcgttattcggctcgcccggatcggaaggatcctccgcctgatcaagggcgctaagggcattcgcaccctgctctttgccctgatgatgagcctccccgccctctttaacatcggcttgcttctctttcttgtcatgtttatttacgctatattcggaatgtcaaacttcgcgtacgtgaaaaaggaagctggaattgacgacatgttcaattttgagacttttggcaattcgatgatctgtctgtttcaaattacaacatctgccggctgggatggattacttgcacctatactgaattcagcccctcctgactgcgatccagacactatacatcccgggtcatcagtgaagggagattgtggtaacccatcagtaggcatctttttctttgtatcgtatatcattatctcattcctggtggtggtgaatatgtatattgccgtgattctggagaatttcagtgtcgccacggaggagtctgccgagccgctcagtgaagacgattttgagatgttctacgaagtgtgggagaaatttgacccagacgctacccaatttatcgagttctcgaaactgagtgactttgcagccgcacttgatccgccactcctgatcgcaaagcccaacaaggtccagctgatcgcaatggacctgcctatggtgagcggtgatcgcattcattgtctggacatccttttcgcatttactaagcgcgtcctgggcgagtctggggaaatggacgctctgcggattcagatggaggaccgcttcatggcctcaaaccctagcaaggtgagctacgaacccatcaccactactcttaagcgcaaacaggaagaggtttcggctgcaattatccaacgaaattttcggtgttacttgctgaagcagcgcctgaagaacataagctccaactacaataaggaggctatcaaggggcggatcgatctgcccatcaagcaggacatgattatcgacaagcttaatggtaattcgacacctgagaaaaccgatggctcctcatccaccacatcacctcccagctacgacagcgtgactaaacctgacaaagaaaagtttgaaaaggacaagcccgagaaggaatcaaagggcaaggaggtgcgcgagaaccagaaatag

SEQ ID NO: 134694 - DNA, 4095 bp, synthetic construct
  misc_feature 1..4095: note = Description of Artificial Sequence: Synthetic coding sequence
  source 1..4095: mol_type = other DNA
atggcccaagccctcctggtgccaccagggccggagtcattcaggcttttcacgcgagagtctctcgccgccatagaaaagcgggccgccgaggagaaggccaaaaaaccaaagaaggagcaggacaacgacgacgaaaataagcccaagcctaactctgacctcgaagctgggaaaaatcttccatttatatacggagatatcccccccgaaatggttagcgagccactggaagacctcgatccctactatattaataagaagacattcatcgtgatgaataaggggaaagctatctttcgattttcagcgacatcagccctctatatcctgacgcccctgaatcctgtgagaaagatcgccataaagattctggtgcacagcttatttagcatgttgatcatgtgcacaatcctcaccaactgtgtcttcatgactctttcaaaccccccggactggacaaagaacgtcgagtacaccttcactggaatctacactttcgaatctctcatcaaaatactggcacgaggcttttgccttgaagactttacttttctgcgtgacccatggaactggctggacttttctgtcatagtgatggcctacgtaacagagttcgtagatttgggtaacgtgtccgcactcagaacattcagggtcctgagagctctgaagactatcagtgtgattcctgggttaaagacgatcgtaggagccctcatccagtcagtgaagaaattgagcgacgtgatgatccttacagtcttttgcctgtcagtctttgccctaatcggcttgcaactcttcatgggcaacctgaggaataagtgcctccagtggccacctagcgatagtgcctttgaaactaatacaacaagttacttcaacgggacgatggactcgaacggcacatttgtgaatgttacaatgtcgacgttcaactggaaggactatatcggagacgactctcatttctacgtgctcgacggtcagaaggaccccctcctttgtggcaatggatcagacgctggccagtgtcctgagggctacatctgtgtgaaagctgggaggaaccccaattatgggtataccagtttcgatacattctcctgggcgttcctgagcctctttaggcttatgactcaggactactgggaaaacctgtatcaactgaccttgcgggcagccggaaagacatacatgattttttttgtacttgtgatattcctgggatccttttatttagtgaacctcatcctggccgtggtggctatggcttacgaagaacagaaccaagccaccctggaggaagctgaacagaaggaggctgagttccagcagatgctcgaacaactgaaaaagcagcaagaggaggcccaggccgtagctgccgcttccgctgcttctcgggacttttctggcataggggggctgggcgaactcctggagagctcaagtgaggcctccaagctatcatccaaaagcgcaaaggaatggcgtaatagacgcaaaaagcgcaggcaacgggaacatctggagggtaataacaaaggtgagcgcgactcctttccaaagtcagaatcagaagattcagttaagcgatctagtttcctatttagcatggatggaaatcgccttacatccgacaagaaattctgtagcccacatcagtctttgctgagcattagaggctccctgttctcccctagacggaatagcaaaacatccatcttttcctttaggggtagagcgaaggacgtcgggtctgagaatgatttcgccgacgacgaacatagcacctttgaagattcggagtctcgcagggacagtctttttgtgcctcatcgacacggtgaaagaagaaattctaatgggaccacaacggaaaccgaggtgcggaaacgacggctgagtagctaccagataagcatggagatgttagaagacagttctggccgccagagagcagtgtccatcgccagcattctgacaaacacgatggaagagctggaggagagcaggcaaaaatgcccgccatgctggtaccgattcgccaatgtgttcctgatctgggactgctgcgacgcctggttgaaggtcaaacatctcgttaaccttatcgtgatggacccgttcgtggacctggccataaccatttgtatcgtgctgaacaccctgttcatggccatggaacactatccaatgaccgagcagttctcctcagtgcttacagtaggcaatctggtgttcactggcattttcacagccgagatggtcttaaagattattgcaatggacccctactattatttccaggaaggatggaacattttcgatggaattatagtttcgctgtctctgatggagctcgggctcagcaatgtagaagggttgtctgtgttaaggagttttcggctgcttcgcgtttttaagctcgcaaaatcatggccgaccctgaacatgcttattaaaattattggcaactccgtgggggcgcttggcaatctcacacttgtactagcgataattgtgtttatcttcgccgtggttggtatgcagttgtttggcaaatcttacaaagaatgcgtttgcaagattaacgacgattgtaccctccccaggtggcacatgaatgatttcttccactccttcttaatagtttttagagtgttgtgtggggaatggatcgagacaatgtgggattgtatggaggtggctggccaaaccatgtgcttgatcgtgtttatgctggtgatggtgatcgggaacctggtcgtgttgaacctgttcctggcgttgttactatcttccttttccagcgataatctcgcggctactgacgacgacaacgagatgaacaatttacagatcgccgtcggccggatgcagaaaggcatagattacgtgaagaacaaaatgcgggaatgctttcagaaagctttttttaggaagccaaaggttatagagattcacgagggcaacaaaattgacagctgcatgagcaacaacactggtatagaaatatcaaaagaactgaattaccttagagacggaaatggcactacaagtggtgtgggtaccggatcctctgttgaaaaatatgtgatcgacgaaaacgattacatgagtttcattaacaatccctcccttaccgtgaccgttcccattgctgttggggagagcgacttcgaaaacttaaataccgaagaattcagctcagagtctgagctggaggagagtaaggaaaagcttaacgccacgtcatcctctgagggctcaacagtggatgtggtgctgcccagggagggagaacaggccgaaacggagcctgaggaagacctgaagccagaagcttgcttcacagagggctgcattaagaaattccctttttgccaggtgagcactgaggaaggtaaaggcaagatatggtggaacctccgtaaaacttgctacagcatagttgagcacaactggttcgagacctttatcgtgttcatgattctgctctccagcggagcactcgcattcgaagatatttacattgaacagaggaaaactatcaaaacaatgctcgaatatgcagacaaggtgtttacctatatatttatactggagatgctgcttaaatgggtcgcttatgggtttcagacttatttcaccaacgcctggtgttggctggacttcctaatcgtggacgttagcctagtctcattagtggccaacgcgcttggatactctgagctaggagccatcaagtctcttcgcacgctgagggcgttgcggccactacgagccctctccagattcgagggcatgagagttgttgtgaacgcactcgtgggcgcgattccctctattatgaacgttcttctagtgtgtctgatcttctggctgatctttagcataatgggagtcaatctgtttgctggtaagttctaccactgcgtaaatatgaccactggcaatatgtttgacatctccgatgtgaataacctgtcagactgtcaggccctcggtaagcaggctcgttggaaaaacgtcaaagtaaattttgataacgtcggagcaggttatctcgctttactccaggtgtag

SEQ ID NO: 134695 - DNA, 603 bp, synthetic construct
  misc_feature 1..603: note = Description of Artificial Sequence: Synthetic coding sequence
  source 1..603: mol_type = other DNA
atggcccaggccctgcttgtacctccagggccagagtcttttagactgttcacaagagaaagtttagcagcgattgagaagcgggctgcagaggagaaagccaaaaagccaaagaaggaacaggacaacgatgatgagaataagcctaagccgaactctgatctcgaggcagggaagaatctgccattcatctatggggatatccccccagaaatggtcagcgagcccctggaagaccttgatccctactatattaataagaaaacattcattgtcatgaataaaggaaaggccattttccgtttctccgccacatccgccctgtacattctgacacccttaaaccctgttagaaaaatcgccatcaaaatcctggtgcattctttgttttccatgctgatcatgtgcactatcctcacgaactgcgtgtttatgacgctgtcaaatccccccgactggactaaaaacgtcgaatacactttcactggcatctacaccttcgaatcactcatcaagatccttgccaggggcttctgcctggaggactttacattcctcagggacccctggaattggctggactttagcgttatagtgatgtag

SEQ ID NO: 134696 - DNA, 1452 bp, synthetic construct
  misc_feature 1..1452: note = Description of Artificial Sequence: Synthetic coding sequence
  source 1..1452: mol_type = other DNA
atggtcttcgacttcgttacaagacaggtgttcgacatatcaattatgatcctgatctgcttaaatatggttactatgatggtagaaaccgatgatcagggaaaatatatgaccctcgtcctctctcgcatcaacctggttttcatcgtgctcttcacaggggaattcgtactgaagctggtgtcactccgccattattactttactatcggctggaacattttcgacttcgttgtagtcatattgtcaatcgtggggatgttcttggcggaaatgattgagaaatacttcgttagcccaaccctgttccgggtgatccggctagcaagaatagggaggatactacgcctcataaaaggggcaaagggcatcagaaccctgctctttgcactgatgatgtccctacccgccctgttcaatataggcttgcttctctttctcgtgatgttcatctacgctattttcggtatgtctaactttgcatatgtgaagaaagaagccggtatagatgacatgtttaattttgagaccttcggtaatagtatgatttgtctctttcaaatcactaccagtgccgggtgggatggactgctggcaccaatcctaaatagtgccccgcccgattgcgatcctgataccatccacccaggatcgagcgtgaaaggagactgcggtaacccatccgttgggatctttttctttgtctcctatatcataattagcttcctcgtggtagtgaacatgtacatcgccgtgattctcgagaatttcagtgtcgctaccgaggaaagtgcggagcccctcagcgaggatgattttgaaatgttctacgaggtgtgggaaaagttcgatcccgatgcgacacaattcatcgaattttctaagctgagcgattttgcagctgccctggatccacctctgctgattgcaaagccaaacaaggtgcagttgatagccatggatcttccaatggtcagtggcgaccgaatccattgcctggatattctcttcgccttcacgaagcgggtccttggggagagcggggaaatggatgctctccgtattcagatggaggaccgctttatggcctcaaacccatcaaaagtgtcgtatgaacctatcaccactaccttgaagagaaaacaggaagaggtcagcgctgcgatcatccagcgaaacttccgatgctacctgttgaagcaaagactgaagaatatctccagcaattacaacaaggaggccattaagggtcggattgatttgcccatcaaacaggacatgattattgacaaactcaatggcaactccacacctgagaagactgacggaagctcttcaaccacttctccacccagctatgattcagtaaccaagcccgacaaggaaaaattcgagaaggataaaccagaaaaggagagcaagggcaaagaggttcgcgaaaatcagaaatag

SEQ ID NO: 134697 - DNA, 648 bp, synthetic construct
  misc_feature 1..648: note = Description of Artificial Sequence: Synthetic coding sequence
  source 1..648: mol_type = other DNA
atgccggccttcaatcgtctctttccattggcaagtctcgtgctaatctactgggtgtccgtgtgcttcccagtgtgcgtggaagttcccagcgagacagaggctgtgcaaggcaaccctatgaaacttaggtgtatttcttgcatgaaaagagaggaggtggaagcgaccactgtcgtcgagtggttttacaggcctgagggaggcaaagatttcctgatctacgaataccgcaacggtcaccaagaggtggagtctccttttcagggacgcctccagtggaacggctctaaagacctccaggatgtgtctattacagttcttaatgtgactctgaatgatagcggactgtacacctgtaacgtgagcagggagttcgagtttgaagcccacagacccttcgtgaagacaacacgcctgattcctcttcgcgtgacggaggaggccggcgaggattttacaagcgttgtgtccgaaatcatgatgtatatcttgctcgtgttcctgacactctggctgctcatagaaatgatctactgttaccgaaaggtatctaaggccgaagaggccgcccaagagaacgcctcggactatctggccataccatctgagaataaggaaaacagtgccgttccagtggaggagtag

SEQ ID NO: 134698 - DNA, 648 bp, synthetic construct
  misc_feature 1..648: note = Description of Artificial Sequence: Synthetic coding sequence
  source 1..648: mol_type = other DNA
atgccagcttttaataggctgtttccactagcctctttggtgcttatctattgggtgtctgtttgcttccccgtgtgcgtagaagtcccaagtgaaacagaagcagtccagggcaatcctatgaagctgcgctgtatctcatgtatgaaacgcgaggaggtggaggctactacagtggttgagtggttttataggccagaaggggggaaggattttctgatctacgaatatagaaacggccaccaggaagtagaatcaccattccaaggccgattgcagtggaatggaagtaaggatctccaggacgtttctatcaccgtacttaatgtcactctgaatgacagtgggctgtatacctgtaatgtgagtcgagaattcgagtttgaggctcacaggccgtttgtgaagactactcgcctgatcccactgagggtaaccgaggaagctggggaggactttacaagcgtggtctccgagattatgatgtacatacttctggtgttcctgaccctgtggctgctcatagaaatgatttactgctatagaaaggttagcaaagccgaagaagccgcccaggagaacgcctcagactatctcgctattccgagcgaaaataaagaaaactctgccgtcccagtggaagagtag

SEQ ID NO: 134699 - DNA, 426 bp, synthetic construct
  misc_feature 1..426: note = Description of Artificial Sequence: Synthetic coding sequence
  source 1..426: mol_type = other DNA
atgcccgcctttaaccggctcttcccgcttgcatctttggttctaatttattgggtcagtgtgtgtttccccgtttgcgtcgaggtccccagtgaaacagaggccgtacagggtaatcccatgaagttaagatgcatttcctgtatgaaacgggaggaggtagaggccaccacagtagttgagtggttttatagacccgaaggggggaaagattttctgatatatgagtacaggaatggacatcaggaggtagagagtcccttccagggccgcctgcagtggaatgggtccaaggacctccaggacgtcagcattacagttcttaacgtgactctgaatgactcaggcctctacacttgcaacgtctcacgagagttcgaatttgaggcccacaggcccttcgtgaaaacaaccaggctcatatag

SEQ ID NO: 134700 - DNA, 648 bp, synthetic construct
  misc_feature 1..648: note = Description of Artificial Sequence: Synthetic coding sequence
  source 1..648: mol_type = other DNA
atgccggccttcaaccggctgttcccgctggcgagtttggtcctgatatactgggtttcagtttgctttcccgtctgcgtggaagttccaagcgaaaccgaggccgtgcaagggaaccctatgaagctgaggtgtatttcttgtatgaaacgcgaagaggtggaggccaccacagtagtggaatggttctacagaccagagggggggaaagatttcctcatttatgagtatcgcaacggacaccaagaggtggaatccccattccaggggcgcctacagtggaacggaagtaaagatttgcaggacgtatccataaccgtcctcaatgtgactttgaacgacagtggcctgtacacgtgcaatgtgtcccgggagtttgaattcgaggcgcaccggcccttcgttaaaacaactcggctgatccctcttcgtgtcacagaggaggctggcgaagatttcaccagcgtcgtgtctgaaatcatgatgtatattcttctcgtcttcttgaccctgtggttactgatcgagatgatatattgctaccggaaggttagtaaggccgaagaggcggctcaggaaaatgcctccgattatcttgcaataccaagcgaaaacaaggagaatagtgccgtgcctgtcgaagagtag

SEQ ID NO: 134701 - DNA, 5511 bp, synthetic construct
  misc_feature 1..5511: note = Description of Artificial Sequence: Synthetic coding sequence
  source 1..5511: mol_type = other DNA
atggccagaccatctctgtgtaccctcgtgcctctgggtcccgagtgtcttcggccatttacacgggaatctctggctgccattgaacagagagccgttgaagaggaagctagactacagcggaataagcaaatggagattgaagagccggagaggaaaccccgtagcgacttggaggcgggaaagaatctaccgatgatttacggcgacccacccccggaagttatcgggatcccactggaagacctggacccatattatagcaacaagaagaccttcattgtgctaaataagggcaaggccattttccggttcagcgctacacccgccctgtacctcttatctcctttttctgtggtgcgccgaggagcaatcaaggttcttatccatgccctctttagcatgttcataatgattaccattctgactaactgcgtgtttatgactatgtcagatccgccgccatggagcaaaaatgtcgaatatacctttactggcatttatactttcgagagcctgattaagatccttgcccggggattttgcgtggatgactttacgttcctacgagatccctggaattggctggatttctccgtaatcatgatggcatacctgacagagttcgtcgatctcggaaatatctcagccctgcggaccttccgtgttctgcgggccctgaaaacaattacggtgatccccggactgaagactattgtaggcgccttgattcagtcagtgaaaaagctgtctgacgtgatgatcttgactgtgttctgccttagcgtgtttgccttggtgggattacagttgttcatggggaatctgagacaaaaatgcgtgagatggccacccccctttaacgacactaataccacttggtatagcaacgatacttggtacgggaacgatacctggtatggaaacgagatgtggtacgggaatgactcttggtatgctaacgacacatggaatagccacgcctcctgggctaccaacgatacattcgattgggatgcctacatcagcgatgaggggaatttctacttcctcgaggggtccaatgatgcactgctgtgtggtaacagcagcgatgccggacactgtcctgaaggctacgagtgcatcaagaccggtagaaaccccaattatggatatacctcatatgacacattttcctgggcgttcctcgccctgttccggcttatgacccaggactattgggaaaacttgttccagctcactctgagagcggccggcaagacttacatgatctttttcgtggtcataattttccttgggagtttttacctcattaatttgatcttagcggtcgtggctatggcctatgccgaacaaaacgaagccacactcgcagaagataaggagaaagaagaggaatttcagcagatgctggagaaattcaagaagcatcaggaagaactggaaaaggcgaaggccgcgcaagccctggaaggaggagaagctgacggggaccccgcccacggcaaagattgtaacggatcccttgacactagccagggcgagaaaggcgccccccgccagtcttcaagcggggactcagggattagtgatgcgatggaagagctagaggaagcccaccagaagtgccccccatggtggtataagtgcgcacacaaagttctgatatggaactgctgtgccccatggttgaaatttaagaatatcattcatctgatcgttatggacccattcgtcgacctgggtattaccatctgtatagtgctgaataccctttttatggccatggagcactacccaatgacagagcactttgataatgttttgaccgttggaaacctggtcttcaccggtatattcaccgccgagatggtgcttaagttgatcgctatggacccctacgagtacttccaacaaggctggaacatcttcgactcaattattgtgaccctgtctctggtggagctggggctcgctaacgttcagggacttagtgttcttagatcttttcgcctcctaagagtatttaaactagccaaatcttggccgacacttaacatgctgattaagatcataggtaacagcgtcggcgcccttggcaatctcactctagtgctagccatcatagtgtttatttttgctgtcgtgggcatgcaactgttcggaaagagttataaagaatgtgtgtgcaaaatcgctttggactgtaacctgccgagatggcatatgcacgacttttttcattcgttcctgattgtgttcaggattctgtgtggcgaatggattgaaactatgtgggattgcatggaggtcgcgggccaggcaatgtgtctgacagtgtttttgatggtcatggtcatcggcaacctggtggtccttaatctatttttggccctgcttttatcttcatttagtgccgactcactggcggcatctgacgaggatggcgagatgaataatctccaaatcgctataggtagaatcaagcttggaatagggttcgcaaaagctttcctcctaggcctcttacatgggaagattttgtcaccaaaagatattatgttgagtttaggtgaggccgacggcgcgggtgaagcgggggaggccggggagacggcccctgaggacgagaagaaggagccaccagaggaagaccttaaaaaagataatcacatcctcaatcatatgggtctggccgatggaccgccttcctcccttgaattggaccacctgaactttatcaacaacccctacctgactattcaggtgcccatcgcaagcgaggagtcagacctggaaatgccaactgaggaagaaactgacacattctctgagcccgaggatagcaaaaaacctccgcaacctctttatgacggaaactcctctgtgtgctctaccgccgactacaaacccccagaggaagaccccgaggagcaggcagaagaaaaccctgagggcgaacagcccgaagagtgtttcacagaagcctgcgtgcaacggtggccttgcctttatgtcgatattagtcagggaaggggtaagaagtggtggaccctgcgacgggcatgcttcaaaattgtcgaacataactggttcgaaacgttcatcgtcttcatgatcctgctgagctctggcgccctcgcgttcgaggacatttacatcgaacagcgccgcgtcatccgaacaatcctggaatatgccgataaagtctttacctacatcttcatcatggagatgctgttgaagtgggttgcttacggcttcaaggtgtacttcactaatgcttggtgctggttggattttctgattgtcgacgtgagcatcatatccctggttgcgaactggttgggatactcagagctgggtccaattaagtctctcaggacgctccgggcccttaggccgctgcgcgctctttcccgcttcgagggtatgcgagttgttgtcaatgcactgctcggggccatacccagcatcatgaatgtgctacttgtttgtctgatcttttggctaatcttttcaattatgggggttaacttattcgcagggaagttctactactgtatcaataccacaacctctgaacgctttgacataagtgaggtgaacaataaatccgaatgtgagtcccttatgcataccggtcaggttcggtggctgaacgtgaaggtgaactacgataatgtgggactgggatatctgtccctgttgcaggtagccacttttaagggttggatggacataatgtatgcggcagtagactcgcgcgaaaaggaggaacaaccccagtatgaagtgaatctgtatatgtacctgtactttgtcattttcattattttcggatctttcttcacgctgaatctcttcatcggggttataattgataacttcaaccagcaaaaaaaaaaactcggaggcaaggacatattcatgaccgaagagcagaagaaatattacaacgcaatgaagaagctgggcagcaaaaaaccacaaaaacccattcctaggccgcagaacaagattcagggtatggtttacgaccttgtcaccaagcaggcctttgacataactataatgattctgatctgcctgaatatggtaacgatgatggtggagacggataatcagagccagcttaaggtggatattctatataatattaacatgatcttcattatcatctttaccggggagtgcgtcctcaagatgctcgctctgagacagtattacttcacggtcggctggaatatttttgattttgtggtggtgatcctgtccatcgtgggactcgcgctatcagatctgatccagaaatactttgtaagtcctaccttgtttcgcgtgattcgccttgcccgcatcggcagagtgcttaggttaataagaggggctaagggcatccgcaccctcctatttgcgctgatgatgagccttccggcattgttcaatatcgggctgctgctctttttagttatgtttatatatagtatattcgggatgtccaactttgcttatgttaaaaaggaaagcggcatcgacgatatgttcaatttcgaaacgtttggcaattctatcatctgtctcttcgaaataaccacctcagcaggctgggatgggttgctaaatcctatattgaattcagggccgcctgactgtgatcctaatctggaaaacccggggaccagtgtaaagggcgactgcggaaacccttctataggcatttgttttttttgctcatacattattatctcgtttcttattgtggtgaacatgtatatcgccatcatcttggaaaatttcaatgttgctaccgaagaatcttcggagcctctgggcgaggacgacttcgaaatgttttatgagacctgggagaagttcgaccccgatgccacccagtttattgcctattcccggctctcagactttgtggacactttacaagagccccttcgtattgccaagcctaacaagattaagctgattactctggatcttccgatggtgccaggggacaagattcattgtctcgacattctcttcgccttgacgaaggaagttttgggagactcaggagagatggacgccctgaaacaaacaatggaagaaaagtttatggctgccaatccctcaaaggtttcatacgagcctattaccaccacactcaaacgcaagcacgaggaggtgtgcgctattaagatccagagagcataccgcaggcacctcttacagaggagtatgaagcaggcttcttacatgtatagacatagccacgatgggtcaggggatgatgccccggagaaggagggccttttagctaatacaatgtctaaaatgtatggccacgaaaacggtaactccagctccccctcccctgaagaaaagggcgaggccggtgacgccggcccaacaatgggccttatgcccatatccccctctgacacagcatggcctccggctccccctccagggcaaaccgtgaggcctggcgtgaaggagtctctagtctag

SEQ ID NO: 134702 - DNA, 687 bp, synthetic construct
  misc_feature 1..687: note = Description of Artificial Sequence: Synthetic coding sequence
  source 1..687: mol_type = other DNA
atgccaggggccggggatggcgggaaggccccagctcgatggcttggaacaggactgctcggactatttctattgccggttactttaagcctggaggtgtccgtggggaaagccacagacatatacgccgtaaacggcaccgagatccttctaccctgtacattctctagttgctttggcttcgaggacttacattttcgatggacctacaactcatcggacgcttttaagattctaattgaggggaccgtcaagaacgaaaagtcagatcccaaggtgacacttaaggacgacgaccgtatcaccctggtgggtagcacaaaggaaaagatgaacaacattagcatcgtcttgagggatctggaattcagcgatacaggcaaatatacatgtcatgtaaagaatcctaaggagaataatctccagcatcacgccaccatcttcctccaggtcgtggataggctggaagaggtagacaatactgtgacactgatcatcctggcggtggtgggcggggtgattggactgctgatcttaattctactcattaagaagttgattatcttcatactgaaaaagacccgggaaaagaaaaaggagtgtctggtgtcaagttccggcaatgacaatacagagaatgggctgccaggcagcaaggcggaagaaaagcctccttccaaggtttag

SEQ ID NO: 134703 - DNA, 285 bp, synthetic construct
  misc_feature 1..285: note = Description of Artificial Sequence: Synthetic coding sequence
  source 1..285: mol_type = other DNA
atgcctggggccggcgacgggggcaaagcccctgcaaggtggctgggcacaggtctcttagtcgaggaagtggacaacacggttaccctcattattctcgctgtggtgggcggggtcatcggacttttgatcctcattttgctgatcaagaagctgattatattcatcctcaaaaaaacacgggaaaagaagaaggagtgtctcgtgtcttccagtggcaatgataacacggagaatggattgccggggagcaaggccgaggagaagccaccatccaaagtctag

SEQ ID NO: 134704 - DNA, 5970 bp, synthetic construct
  misc_feature 1..5970: note = Description of Artificial Sequence: Synthetic coding sequence
  source 1..5970: mol_type = other DNA
atggcgatgttgccccctcccggtccccaatccttcgtccactttacaaagcaatccctcgcactaatcgaacaacggatcgccgagaggaaatccaaggagcctaaagaggagaaaaaggacgacgatgaggaagcacccaaaccttcatcggatctggaggcggggaaacagcttcccttcatctatggggatatcccacctggcatggtgtccgagccactcgaggacctggatccttattacgctgacaagaaaacatttatagtgcttaataagggcaagactattttccgctttaatgcgactcccgctctttacatgctgtcacctttctcgcccctcaggcggataagcattaagatcctcgtccacagcacgctgttcagtatgctgattatgtgtaccatcctcacaaattgcatcttcatgaccatgaacaacccaccagattggacaaaaaacgtggaatacacctttaccggcatctacaccttcgagtcccttgtcaaaattctggcaagaggattttgcgtgggggagttcacctttttgcgcgatccatggaattggctggattttgtcgtgatcgtctttgcctatctgactgaatttgtcaatctcggtaatgtcagcgcactgaggacatttagggttctgcgtgcactcaaaaccatcagtgtgatcccaggattgaagaccattgtgggcgctctgatccagtcagttaagaaactatcagacgtgatgatcctcaccgtcttctgcctatctgtgttcgctctcatcggtttgcagttgtttatggggaacctcaagcacaagtgcttccggaatagcctggaaaacaacgagaccctggagtctataatgaacacccttgaaagcgaggaggacttccgcaagtatttctactacctggaaggttctaaggatgctctgttgtgtgggttcagcacagactccgggcaatgtccagagggctacacatgcgttaagatcggtcgtaatccggactatgggtacacctctttcgacacattttcttgggcattcctggctctgttccgtttgatgactcaagattactgggagaacttgtaccagcagacactgagggctgcagggaagacgtatatgattttctttgtggtggtaattttcctcggctcgttctacctgattaacctaatcctcgctgtggtggccatggcctacgaagagcagaaccaggccaatatcgaggaagccaagcagaaagagctcgagtttcagcagatgttggacaggctaaagaaggaacaggaggaggccgaggcaatcgctgccgccgctgctgagtacacctctatcaggcgcagtagaattatgggcttatcggaaagctcaagcgagacctctaagctgagcagcaagtcagcaaaggaacgacggaaccggagaaagaagaaaaaccaaaagaagttatcttctggagaggagaagggggacgctgagaagctgtctaaatccgagtccgaggacagcatcaggcgtaagtcctttcacttaggagtggaaggccatcgacgcgcacatgagaagcggcttagcaccccaaaccagtcccctttgtccatccgaggtagcctcttctccgcaaggcggagtagtagaacaagcttgttctcctttaagggccgcggccgggatatcgggtcggagaccgaatttgctgatgacgaacactccatcttcggggataacgaatcacgacgagggtcactgttcgtaccgcaccggcctcaggaaagacgctctagcaatatcagccaagcttcccgtagcccccctatgctgccagtgaacgggaagatgcatagtgccgtggattgcaacggggtggtgtcacttgttgatggcagatccgctctgatgctgcccaacggacaattgttgcctgaagtcataatagacaaggccacctccgacgacagtggaacgacaaatcagattcacaaaaagagacgatgctcgtcctatctgttgtctgaggacatgctcaatgatcctaacctgcggcagcgcgccatgtccagggcgtccattctgaccaacaccgttgaagagcttgaggaatcaagacagaagtgtccaccgtggtggtaccgatttgctcacaaatttctcatatggaactgcagtccctactggatcaagttcaagaaatgtatttatttcatcgttatggacccatttgtggatttggccattacaatctgcattgtgttaaacactctttttatggccatggaacatcatccaatgacagaagagttcaaaaatgtgctcgcgatcggcaatctagtttttaccggaatctttgccgcagagatggtactgaagctgattgctatggacccgtacgaatactttcaggtgggatggaacatcttcgactctctcatagtcacactctccctagtcgagttgttcctcgccgatgtagaaggcctgtctgtccttcgttcatttcgcctgctgcgggttttcaaactggctaagtcctggcccaccctgaacatgctgattaaaatcattggaaacagcgtgggggcgctggggaacttaactcttgtgctggctattatcgtgttcatctttgccgttgttgggatgcagttgttcggcaaatcttacaaagaatgtgtttgtaaaattaatgatgattgcacactgcctaggtggcatatgaacgacttcttccattctttcctgattgtgttcagagtcctgtgtggagagtggatcgagaccatgtgggactgcatggaggtggccggccaagccatgtgtttaattgtgtatatgatggttatggtgatcggcaaccttgttgtgctgaacctgtttctcgctctcctgctgagctcattttcgtccgataaccttactgcaatagaggaggaccccgatgccaataatctgcagatcgccgtcacacgcattaagaaggggatcaattatgtgaaacagacattaagggaattcatcctaaaagcatttagcaaaaagccaaagatttcacgcgaaattcgccaagctgaagatttaaatactaagaaagaaaactacatctccaaccacaccttggcggaaatgagtaaaggacacaatttcctgaaggaaaaagataagatttccggtttcggctcgagtgttgacaaacatctcatggaggactccgacggccagagtttcattcacaatccctcactcaccgtcaccgtgcctatcgcacctggcgaatctgatcttgaaaatatgaatgccgaggaactctcatctgactctgactctgaatactccaaagtgcgtctgaatagaagctctagtagcgagtgttctactgtcgataacccactgcctggtgagggcgaggaggccgaggcggagcctatgaactctgatgagcccgaggcctgctttacagacggatgcgtttggcggttttcatgctgccaagtgaatatagaaagcggtaaaggtaagatttggtggaacatcaggaagacctgctataaaattgtggagcactcctggttcgagtcttttatcgtcctcatgattctgctttccagtggggcgctcgcgtttgaggatatttacatcgagcgtaagaagacaataaaaataatcctggagtatgctgataaaatctttacctacattttcattctggaaatgttgctgaaatggatcgcctacggatataagacctacttcaccaatgcgtggtgttggctggacttcctcattgtcgatgtgtccctggttaccctcgtggccaacaccctcgggtacagtgatcttggtcccattaagtctctccgaactcttcgcgcactccggccactccgtgctctgagtaggtttgagggcatgcgagtggtggtcaacgccctgatcggagcaatacctagcattatgaatgtgctgctcgtgtgcctcatcttctggctcatcttttccatcatgggcgtgaacttgttcgcaggcaagttttacgagtgcattaacacaaccgatgggtcacgcttccccgcctcacaagtgcccaaccgtagcgagtgttttgccctgatgaatgtctctcagaacgttcggtggaaaaatctgaaggtcaactttgataacgttggtttgggctacctctccctactccaggtggcaacttttaagggctggacgatcattatgtacgcagccgttgattcggttaacgtggataagcagcccaagtacgaatattcactttatatgtatatctacttcgtggtgttcattatctttggatctttcttcactctgaatctttttatcggggtaatcatagacaactttaatcagcagaaaaaaaagctcggcggccaggatatatttatgaccgaggagcagaagaaatattataacgccatgaaaaagctcggcagtaaaaaacctcaaaagccgatccctcgtcctggcaataaaatccaaggatgtattttcgacctggtcaccaaccaggcttttgatataagcatcatggtgctcatctgtctgaatatggtgacaatgatggtagaaaaggaaggccagtcacagcatatgacggaggtactgtactggattaacgttgttttcattattctgttcactggtgagtgtgttttaaaacttattagtttacgtcactactacttcactgttgggtggaacatcttcgatttcgttgtcgttattattagcattgtggggatgttcctcgctgacctgatagaaacgtattttgtgagccctaccctctttcgtgtgatcagattagctcgcatagggcgtattctgcgactcgtcaagggagcaaagggcattcggaccctcctcttcgccttaatgatgagcctccccgcgttgttcaacatcgggcttcttctgttcttagtgatgttcatctatgctatattcggcatgtcaaatttcgcctacgtgaaaaaggaggatggaatcaatgatatgtttaatttcgaaacctttggcaattccatgatctgcctcttccagatcacgacttccgctggttgggatggtctcctcgctcccatactcaacagcaagcccccggactgcgatccgaaaaaggtccatccagggtcaagcgtggagggagattgcggaaatccaagcgtcggaattttttattttgtgtcatacattatcattagtttcctggtagtggtcaacatgtacatcgcagttatcttggagaatttctcagtagccaccgaagagtctaccgaacccctgtccgaagatgacttcgagatgttttacgaagtgtgggagaaatttgaccctgatgctacacaattcattgagttctcaaagctgtcggactttgccgccgccttagaccccccgctcttaatcgccaagccaaacaaggtgcaactgatcgcaatggacctaccgatggtcagcggggacagaattcactgtctcgacatccttttcgcttttacgaagcgggtgctgggtgaatcaggagaaatggacagtcttcgcagtcagatggaggaacgcttcatgtccgcgaatccgtcaaaagtcagctatgagccaataacaactacactaaaaagaaagcaggaggacgtcagcgcgactgtaatccagagggcctaccggaggtacagacttcgccagaacgtgaaaaatatctcatccatctatatcaaagacggagaccgggacgacgacctcctgaataaaaaagacatggcctttgacaacgtgaatgaaaattccagtccagagaaaacagacgctactagtagtactactagtccaccttcctatgattccgtgaccaagccggataaggaaaagtatgaacaggaccgcacagagaaggaggacaaaggaaaagatagtaaagagtctaaaaaatag

SEQ ID NO: 134705 - DNA, 5970 bp, synthetic construct
  misc_feature 1..5970: note = Description of Artificial Sequence: Synthetic coding sequence
  source 1..5970: mol_type = other DNA
atggccatgttaccaccgcctggtcctcagtcttttgtgcacttcactaaacagtcccttgctctcattgaacagcggatcgcagagcgcaagagcaaagaaccaaaagaagaaaagaaagatgacgatgaggaagctccaaaaccctccagcgacctggaggctggaaagcagctccccttcatctacggcgatattccaccggggatggtttctgagccccttgaggacttggatccttattatgccgataaaaagactttcattgtgttgaacaagggtaagactatcttccggttcaacgccacacccgccctctacatgctgagcccattttcccctctccggaggatttctattaagatcctggtgcactccacgttgttttcaatgctgattatgtgcacaattctgacgaactgtatcttcatgaccatgaacaaccccccggattggacaaagaatgtggaatacacgttcacagggatctatacgttcgagagcctggtaaagattctggcccgggggttttgtgtgggagagttcacgtttctgcgagatccttggaattggctggacttcgtggtgatcgtctttgcttatgtcacagaattcgttgacctcgggaacgtgagcgctcttagaacatttagagtcctgagggctctcaaaacgatatcagtgattccggggctgaagactatagttggggccttgatccagtctgtcaaaaaactgagcgatgtcatgatcctgactgtgttttgcctcagtgtcttcgccctcatcggcttgcaattgttcatgggaaacctcaagcataagtgctttagaaattcccttgagaataatgagacactagagtcaattatgaatactttggaaagcgaggaggactttaggaaatacttttattatctagagggctctaaggacgccttactgtgcggcttcagcactgattccggccagtgccccgaggggtacacttgcgtgaaaatcggacggaatcctgattatggatacactagctttgacacattttcttgggcatttctggctctctttcggcttatgacccaggactattgggaaaatctttaccagcaaaccttacgggccgccggtaaaacttacatgatcttctttgtcgtggtgattttcctggggtcattctatctgatcaatttaatccttgcggtcgtggcgatggcctatgaggaacagaatcaggcaaacattgaggaagctaagcagaaggagctggagttccagcagatgctggaccgcttaaaaaaggagcaggaggaggccgaggcaatcgccgctgctgccgctgagtatacctctatcagacggagtaggatcatgggcctgagcgaatcttccagcgagaccagcaagctgtcgtcaaagtctgccaaagaaagaagaaacaggcgaaaaaagaaaaaccaaaaaaagctaagttctggagaagaaaagggagacgcggagaaactatcaaagtcggaatcagaagacagcattcgtaggaaaagctttcacctcggggtggaggggcacaggcgagcacacgaaaagaggctgtctacgcctaaccagtcccctttatccatccgcggaagcctattttccgccaggcgcagctcgcgaaccagtctgttctcgtttaaaggcagaggtcgcgacatcgggagtgaaaccgagtttgccgacgatgaacattccatcttcggcgacaacgaatcacggaggggctccctgtttgtgccgcaccgccctcaggagcgacgttccagtaacatttcacaggcgagtcgatcccctcctatgttgcccgttaacggcaagatgcacagcgctgtcgattgcaacggagtggtaagcctggtcgacggaagatctgccctcatgctgcccaatgggcaactcttaccagaagtcatcattgacaaggcaaccagtgatgacagcgggactaccaaccagattcataaaaagagaagatgtagctcgtaccttcttagcgaagatatgcttaatgaccccaatctgaggcagagggctatgagccgggcttcgattctgactaatactgtcgaggagctggaagagtccaggcaaaagtgtcctccttggtggtatcgattcgcacacaagtttctgatctggaactgctcaccttactggatcaagttcaagaaatgtatctatttcatcgtcatggatccatttgtcgatctggccatcacgatctgtatcgtgttgaacactctctttatggccatggagcatcatcctatgaccgaggagttcaaaaatgtgctagccatcggtaacctggtcttcacgggtatctttgccgctgaaatggtactcaagttgatagcgatggacccttatgagtatttccaggttggctggaatattttcgatagtttgatcgtgactctttcacttgtggagttgttcctggcagacgtcgaaggtctaagcgtgctgaggtctttccgcttgttgagagtgtttaagcttgcgaagagctggcctactctgaatatgctgatcaagatcatcggaaacagcgtgggggcgcttggaaatctcaccctcgtcctggccatcatcgtttttattttcgcggtggtcggtatgcaactgtttggaaagtcttataaagagtgtgtgtgcaaaatcaatgacgattgcacgcttccacggtggcacatgaacgatttttttcactccttcctcattgtgtttcgggtgttgtgcggggagtggatagaaacaatgtgggattgtatggaggtcgcaggacaggcaatgtgcctgattgtgtacatgatggtgatggtgataggtaatctggtggtactgaatcttttcttggctctgctgttgtctagcttttcatccgacaacctgactgcaatcgaggaggaccctgacgcgaataacttacaaatcgccgtgaccaggatcaaaaaggggatcaactatgtgaagcaaactttacgggagttcatccttaaggcttttagcaagaagccaaaaatatctagagagatccgacaggcggaagatctaaatactaagaaggagaattacatttctaatcacaccctcgctgaaatgtcaaaaggccacaactttcttaaggagaaggataaaattagtggcttcgggtcttcagtggataaacacctcatggaggactctgacggacagtcctttatccataacccatccctgaccgtcactgtgccgatagccccaggcgagtctgaccttgagaatatgaacgctgaagagctgagctcagattctgactctgagtattctaaggtaagactgaatcgctccagcagttctgagtgtagtacagtcgacaacccattgcctggagaaggggaagaagctgaggctgaacccatgaactccgacgagccggaggcttgcttcaccgatggttgcgtgtggagattttcttgctgccaggtgaacattgaatcaggtaagggcaaaatctggtggaatatcagaaagacctgctataaaatcgtggaacacagttggtttgagtcattcattgtactgatgatcctcctgagttcaggtgcacttgctttcgaggatatctacattgagcgaaagaaaactattaagatcatcttggagtacgcagataagatttttacctacatttttattctggagatgctgcttaagtggatagcctatggctataagacgtatttcacaaacgcctggtgctggttagatttcctgatagtagatgtttcattagtgactctggtggctaatacgttagggtattccgacctggggccaatcaagtcactgcgcactcttagggctctccggcccctcagagccttgtctcggttcgagggaatgagggttgtggttaatgccctgatcggtgccatcccaagcattatgaacgtgctgctggtgtgcttgatcttctggctcatattcagtataatgggggtgaacttattcgctggcaaattctacgaatgcatcaacactacggacggctctaggtttccagctagtcaagtacctaatcggtcagagtgtttcgcccttatgaacgtgtctcagaatgtacgatggaaaaacctcaaagtcaactttgacaacgtcggattgggctacttatcgctactccaggtcgccacctttaagggatggacaattataatgtatgcagcggtggactcggtgaatgtagacaaacagccaaaatacgagtattccttgtatatgtacatttactttgtggtcttcataatctttggctccttttttaccttaaatcttttcattggcgtgatcatcgacaattttaaccagcagaagaagaaactgggggggcaagacatatttatgactgaagaacagaaaaagtactataacgccatgaagaaactgggctcaaagaaacctcaaaaacctatccctagacccggcaataagattcaagggtgcatcttcgatctggtaacaaaccaggccttcgatatctcaatcatggtccttatctgtctaaatatggtgactatgatggtggagaaagagggacagtcacagcacatgacagaggtgctgtattggattaacgtggtctttatcatattatttacaggggagtgcgtcctcaagcttatttcattgcgtcactactacttcacagtaggctggaacatctttgactttgtcgtggtgattatctccattgtcgggatgtttctggccgatctgatcgagacctattttgtgtccccaactttatttagagttattcggctagcccgtataggtcgcattcttcgacttgtgaagggcgctaaaggaattagaactcttttatttgcccttatgatgtctctccccgcactgtttaatatcggcttattgctgtttctggtgatgttcatctatgcaattttcggaatgtcgaattttgcatatgtcaagaaggaagacggtatcaacgatatgtttaatttcgagacttttgggaattctatgatctgtctcttccaaataacaacctcagctggctgggatgggcttctggccccaatacttaactcgaagccgccagattgcgaccctaaaaaggtgcatccaggttcctctgtggaaggggactgtggcaacccttcagttgggatcttttacttcgtctcctacattataattagcttcctagttgtagttaatatgtacatcgccgtgattttggagaatttcagcgtggccactgaagagtccaccgagcccctttcagaggatgattttgagatgttctatgaggtttgggagaaatttgaccccgacgctactcagtttatagagttctcaaaattatccgattttgctgcggcgctggaccctccgctgctgatcgctaagcctaacaaagtacagctaattgctatggacctcccaatggtgagtggagacagaatccattgccttgacatcctatttgcctttaccaagcgggtgctcggggaaagcggagaaatggacagcctccggagtcagatggaggaaagattcatgtccgctaacccttcaaaggtttcttacgagcccattacaaccacgttgaaacgcaaacaagaggacgtaagcgctactgtgatccaaagggcctataggagatataggctgagacagaatgtgaagaatattagctcaatctacatcaaggatggagacagagatgacgacctcctcaacaaaaaagacatggcattcgacaacgtgaacgagaactccagccccgaaaagaccgatgctacctcttccaccacatccccacccagctacgatagtgttacgaaacccgacaaagagaagtacgagcaggatagaacggaaaaagaagacaaggggaaggactccaaagagtcgaaaaaatag

SEQ ID NO: 134706 - DNA, 5967 bp, synthetic construct
  misc_feature 1..5967: note = Description of Artificial Sequence: Synthetic coding sequence
  source 1..5967: mol_type = other DNA
atggccatgttgccccccccaggcccccaatcttttgtgcatttcactaagcagtcgctcgctcttatcgagcagcgcatcgccgagagaaagtctaaggagcccaaggaggagaagaaggacgacgacgaggaagcacccaaaccttcaagtgatctcgaggctggaaaacagctgccattcatttacggcgacattccccctgggatggttagtgagccccttgaggatttagatccatactacgccgacaagaagaccttcatcgtgctcaacaaagggaaaaccatttttcgtttcaatgcgacgccagcactgtatatgttgtccccattttccccgctgcgcagaatatcaataaagatcctggtgcactctctgttcagtatgctcattatgtgtactatcctgactaattgtatctttatgactatgaacaatcctcctgactggaccaagaacgtggagtacaccttcaccggcatatatacttttgagtctctggtcaagatactggcacggggcttctgcgttggggaattcactttcttacgcgatccttggaattggttggacttcgtagtcatagtgttcgcctatctgactgagtttgttaacttgggaaatgtaagcgcattgcgaacattccgtgtgctgcgtgctctgaaaacaatttcagttatcccgggactgaagaccattgtgggagcactaattcagtccgttaagaagctgtctgatgtgatgatcctaactgtattctgtctgtccgtgttcgccctgattggactgcaactttttatgggtaatctgaaacacaagtgctttaggaacagcctagaaaacaatgagactctggagagtataatgaacactctcgagagcgaggaagatttcaggaagtatttctactatctcgaggggagcaaagacgccctcctgtgtgggttttcaacggattcaggtcaatgcccagaggggtacacctgcgtcaagatcggtaggaacccagactatggatacacatcgttcgacaccttctcttgggcgttcttagccctgtttaggctgatgacacaagattattgggagaatctgtatcagcagacactgagggccgcagggaaaacatatatgatcttcttcgtggtggtgatttttctcggctccttctatctgatcaatttgatcctggcggtggtcgccatggcctacgaggagcagaaccaagcgaatattgaagaagccaagcagaaggagctcgagtttcagcagatgctggaccggctgaagaaagaacaggaggaggccgaggcgattgccgctgcagcagccgagtatacctctatcaggcgctcacggatcatgggcctttcggagtctagcagtgaaacgtccaagctgtcaagtaaaagcgccaaagagcggcggaacaggagaaagaagaagaatcagaagaaactgagtagcggtgaggagaagggagatgccgaaaagctttcaaaatcagagagcgaagattccatcagaaggaagtccttccacctcggggtcgaaggccatcgccgcgctcacgagaaaagacttagcaccccgaaccagagccccctctccattcgaggatctttgttctctgcgaggcggagcagccgcacttcactctttagttttaaggggcgtggaagggatatcgggtctgaaacagaattcgcggatgacgaacacagtatattcggtgataatgaatccagaaggggatctctgtttgtgccccaccggccgcaggagcgccggtcgtcgaacattagtcaagcctcaaggagcccgcccatgctgccggtcaacggaaagatgcactccgccgttgactgcaacggggtggtgtctctggtagatggtagatccgccctcatgttaccaaacgggcaactgctgcctgaggttataatcgacaaggctacctccgatgattctggaacgactaatcaaatccacaagaagcgtcgatgttcctcgtatctgctgtcagaagacatgttgaacgatcccaacctccggcagcgggcaatgtcaagagcttccatcctgacaaataccgtggaggagcttgaggaatcgcggcaaaagtgtcccccatggtggtatcggtttgcgcacaagtttctcatttggaactgctctccctattggattaagtttaagaagtgcatctactttatagtgatggacccctttgtggaccttgctatcacgatttgcatagtgcttaataccttgtttatggccatggagcatcatcctatgactgaagaattcaagaatgtgctagcgataggaaatcttgtttttacgggcatttttgctgcggagatggttttaaagttgatagcgatggatccctacgaatacttccaggttggatggaatatctttgactcccttatcgtaacactcagtctggtggagctctttctggcagatgtggagggcctgagcgtgctgaggtcattcaggctcctgcgtgtctttaagctcgctaaatcatggcccaccctgaatatgctgattaaaatcatcggaaattccgtgggggctctaggaaatctgacccttgtgctggctatcatcgtgtttatattcgcagtcgttggcatgcagctgttcggcaagtcctacaaggaatgtgtgtgtaaaattaatgacgattgcactctaccaagatggcacatgaacgactttttccattccttcttaattgtcttccgggtcttgtgtggcgaatggatagagaccatgtgggactgtatggaggtcgctgggcaggccatgtgtctgatcgtctacatgatggtcatggtgattggcaacctggtcgtgctgaatttattcttggcactactgttgagcagcttttcttctgacaacctgacagctattgaggaagatcctgatgctaataacttacagatcgcagtgaccagaattaagaagggaattaactacgttaagcaaactctgagagaattcattctgaaggcattctccaagaaaccaaagataagccgggagattcggcaagctgaagacctaaatacaaaaaaggaaaattatatttccaatcatacacttgccgagatgagcaaagggcacaactttctcaaggaaaaagataagattagcggttttggatcttccgttgacaagcacttaatggaggatagcgacggacagtcttttattcacaacccttccttaaccgtgactgttcctattgctccaggagagagtgacctggaaaacatgaatgctgaagaactgtccagcgattcagacagcgaatattctaaggtacgtcttaatagaagttcctccagcgagtgcagtactgtggataatcctctccccggcgagggcgaagaagctgaggccgaacccatgaacagcgacgaaccagaggcgtgtttcaccgacggttgcgtctggagattcagttgttgccaggtgaacattgaaagtggcaaaggaaaaatttggtggaatatacgaaagacatgctataaaatcgttgaacactcttggtttgaatctttcattgttttgatgattctgctttcaagcggagctctagcctttgaggatatttatatagagaggaagaagacaatcaaaataattttggagtacgctgataagatatttacttacatctttattttggagatgctactgaaatggattgcatatggctataagacttatttcacgaacgcttggtgctggctcgattttctaatagtggatgtgagcctggtgactcttgttgcaaacacacttggatatagcgatttgggccctatcaaaagcctcagaacactgagggccctgcggccattacgggctctctctcgctttgaagggatgcgggttgtggtgaacgcgcttataggagccatcccgtccattatgaatgtgctcctggtatgtctcatcttttggcttattttttctatcatgggtgtgaatttattcgcaggtaagttctacgagtgtatcaacactactgatggtagtcgattccctgcgtcacaagtgccaaatagatctgagtgctttgccctgatgaacgtgagccagaatgtcaggtggaaaaatctcaaggttaactttgataacgtgggattaggatatctatctctccttcaggttgctaccttcaaaggctggaccattataatgtatgcggcagtggattccgtaaatgtcgataagcagcctaaatatgagtatagcctttatatgtacatttacttcgtggtgttcatcattttcggaagttttttcaccctgaatctgtttatcggagtgattatcgataacttcaaccaacaaaaaaagaagctgggtggccaagatatcttcatgactgaagaacagaagaagtactacaatgcaatgaaaaagctcggcagcaaaaaaccccagaagccaataccacggccgggcaacaaaatccagggatgtatctttgatcttgtgacaaaccaagcattcgacatctccatcatggttctaatctgcttgaatatggttacaatgatggtagaaaaggagggtcagtcccagcacatgactgaagtactttactggatcaatgtggtcttcatcatcctgttcactggcgagtgcgtattgaagctgatctcccttagacattactatttcacagttgggtggaacatctttgactttgtcgtcgtcataatatccattgtggggatgttcctagcagatttgatcgagacttattttgtaagccccacacttttccgtgtcatacgtttggcccgaatcggtagaatcctgaggcttgtgaagggcgccaagggcatcagaacattgcttttcgccctcatgatgtcgcttccagcattgtttaacatagggcttctactctttctggtgatgttcatctatgcaatcttcggcatgtccaatttcgcctatgtgaaaaaggaagatggaatcaatgacatgtttaatttcgaaaccttcgggaattcaatgatatgcctattccagatcacaacaagcgctgggtgggacgggctactcgctcccatcctcaacagtaaaccaccagactgcgatccgaagaaggtccaccctggatctagtgtggagggtgattgcggaaaccctagtgtgggtattttttacttcgtctcatacatcattatcagtttcttggtggtggtgaatatgtatatcgcagtaattcttgaaaacttctctgtggctacggaggagagtaccgaacccttgtcagaagatgacttcgagatgttctatgaggtctgggagaagttcgaccctgacgcaacccagtttatagagttcagtaaattatctgactttgctgcagccctcgatccacctcttctgatcgctaagccaaataaggttcagctgatcgctatggatctccccatggtgtccggcgacagaatccactgcctcgacattttgttcgcctttacaaaaagagttctcggcgagagtggagaaatggattccctgcgctcccagatggaggaaaggttcatgtccgcaaacccctcaaaagtgagctatgaacctatcactaccactttaaagagaaagcaggaggacgtatctgctaccgtaattcaacgggcctatagacgctatcgactgcgtcagaatgttaagaatatctccagcatatacattaaggacggggacagagatgacgatctgctgaataagaaagatatggccttcgataacgtaaacgagaattcctcccccgaaaagaccgacgccaccagctccaccacatctcctccatcatatgatagcgtgaccaaacccgataaggaaaaatatgaacaggatcgcaccgagaaggaggacaaaggaaaggactcaaaggaaagcaagaagtag

SEQ ID NO: 134707 - DNA, 5934 bp, synthetic construct
  misc_feature 1..5934: note = Description of Artificial Sequence: Synthetic coding sequence
  source 1..5934: mol_type = other DNA
atggcgatgctccctccaccgggaccgcagtccttcgtacactttactaagcaaagccttgcgctgattgagcagcgtatagccgagcgaaagtctaaagagcccaaagaggagaagaaggatgacgatgaggaagctcccaaaccgagctctgacctagaagcaggtaaacagctgccatttatttatggcgacataccaccagggatggtgtctgagcctctggaggacctcgacccttactatgctgataaaaaaaccttcatagtactgaacaagggcaagaccatttttagattcaacgcgaccccagccctctacatgctgagtccatttagccctctgagacgcatctccattaagattctggtgcacagtctcttttcaatgctcatcatgtgtacaatcttaaccaactgcattttcatgaccatgaataacccccctgactggacaaaaaacgtagaatatacatttactgggatttacactttcgaaagtctggttaaaatcctggcgcggggattctgtgtgggagaatttacttttttgagagatccttggaactggttggacttcgtcgtgatcgtctttgcctatttgacggaatttgtgaaccttggcaacgtttccgctttgagaacattcagggtcctgcgggcactcaaaacgatctctgtgattccggggctgaaaaccattgtgggcgcgctgattcaaagtgtgaagaagctttcagatgtaatgattctgactgtgttttgcctgagcgtttttgcgctgatcggactgcaactttttatgggaaatctaaagcacaagtgtttcaggaatagcctggagaacaacgagacccttgagagcattatgaacaccctggaatcagaagaggattttcgcaaatatttctactatttagaaggctcaaaagacgctctcctctgcggattcagcacggattcgggccagtgcccggagggctatacatgtgtaaagattgggcgcaatcccgactacgggtacacatccttcgacacattcagctgggcttttttggcgctcttccgcctgatgacccaagactactgggagaacttataccagcagacactcagggccgccggcaaaacgtacatgatattcttcgtggtggtgatctttctggggagcttctatcttattaatttgatattagcagtggttgctatggcatatgaagagcagaatcaagccaacatcgaagaggctaaacagaaagagctagagttccagcagatgttggatagactgaagaaggagcaagaagaggccgaggctatcgcggctgccgccgctgagtatactagcattcgacggtcccgcatcatgggcctgagcgagtcttcatctgaaacgtctaagttgagttccaaatctgcgaaggaacggcgcaacaggagaaagaagaagaaccaaaagaaactcagctctggcgaggaaaagggggacgctgaaaaactgtcgaagtcagaatcggaggatagcatacgtcgcaagtcttttcacctcggagtggagggccaccgccgcgcccacgagaagcgactgtcaacaccaaatcagtctcctttatccattagagggtcattgttctccgcccggaggtcaagcagaacatcgctgttctctttcaagggacggggcagagacatcggcagcgaaaccgagttcgccgacgacgaacatagcatctttggtgataatgaatctcgtcgcggcagtctgttcgttcctcaccggcctcaggaaaggcggagttctaatatttcccaggccagtcgcagtccccctatgttgcccgtcaatggcaagatgcactccgccgtggactgtaatggcgttgtctcccttgtcgacggcaggagcgccttaatgctgcccaatgggcaacttctgcccgagggcactacgaaccagatacacaagaaacgcaggtgcagttcgtatctgctgagcgaggatatgctcaacgatcctaacctaaggcagcgcgctatgtcgcgagcctccatcctgacaaacacagttgaagagctcgaggaaagtaggcagaaatgtccgccttggtggtatcggtttgctcacaagttcctgatctggaattgttcaccttactggataaaatttaaaaagtgtatttactttattgtgatggatccttttgtcgatcttgcgatcaccatctgcatcgtgctgaataccctgtttatggctatggaacatcatcctatgacagaggaattcaaaaatgtgctggcaatcggaaatctggtgttcaccgggattttcgcggccgagatggttctcaaactgattgctatggatccttatgaatacttccaggtgggctggaatatcttcgacagcctgatcgtcaccttatcactcgttgagctgtttttggccgacgtcgaaggactcagtgtgctgcggtcctttcgcctgctgcgcgtttttaagctggctaagtcctggcccaccctcaacatgctgattaaaattatcgggaactcagtgggtgctttaggaaatctcaccctggtgctcgctataatagtgttcatctttgctgtggtgggcatgcagctgttcggcaaaagttacaaggaatgcgtttgcaaaataaacgatgactgcacacttccgaggtggcatatgaatgacttctttcactcttttctcatcgtctttcgcgtcttgtgcggtgagtggatcgagaccatgtgggattgcatggaggtggccggacaggccatgtgtttgattgtatatatgatggtgatggtaatcgggaatcttgttgtgttgaatctattcctggcactcctgctgtcttctttctctagtgacaatctgacagccatcgaggaagatcctgatgccaataatcttcaaattgccgtgacacggattaaaaaaggaataaattacgtgaagcagactctgcgggagttcatcctgaaggcttttagcaagaagccaaaaatcagccgcgaaataaggcaggcagaagacctgaatactaagaaggagaactacattagtaatcataccctggcagaaatgagcaaaggccataattttctgaaagagaaagacaagatcagcggattcgggagttccgtcgacaaacacttgatggaagactctgatgggcagagttttatccataacccatccttgacagtgactgtccctatcgccccaggtgaatcagaccttgagaacatgaatgcagaggagctctcctctgattctgacagcgagtactccaaagttagattaaacagatcaagctccagcgaatgttcgacggtcgataatcctttacctggcgaaggcgaagaggccgaggccgagcctatgaattcggatgagccagaggcttgttttaccgatggctgcgtgtggcgattcagttgttgccaggtgaacatagagagcggcaagggaaagatatggtggaacatacgtaagacctgctacaaaatcgtggagcatagttggtttgaatcctttattgtactgatgattcttctgtcaagcggggcactcgcattcgaggacatttacattgaaaggaaaaagaccatcaagataatcttagaatatgctgacaaaattttcacctatatctttatactagaaatgctgctgaaatggatagcctatggatacaaaacatattttactaatgcttggtgctggctcgatttcctcattgtggacgtaagtttggtcaccttggtggctaacacactcggatatagcgatttgggccctattaagagcctcaggactctgagagcgctcagaccacttagagcgctaagtaggttcgaagggatgcgcgtggttgtgaacgccctgatcggcgccattccctctataatgaatgtgctgctggtgtgcctgatcttttggctgatcttcagcattatgggggtcaacctgtttgcgggaaaattctacgaatgcatcaatactacagacgggagcagatttcctgcatcccaggtacccaatcgtagtgagtgttttgctctaatgaacgtctctcagaatgtgagatggaagaatcttaaggttaattttgataatgtgggcctggggtacctgtccctgctgcaggtggccacattcaaaggttggactatcataatgtatgccgctgtagacagtgtaaatgtcgacaagcaacccaaatacgagtacagtctctacatgtatatttacttcgtggtgttcattatctttggctctttttttacgctgaacctcttcattggcgtaatcatcgacaactttaaccagcaaaagaagaagctcggaggtcaggacatcttcatgacagaagaacagaaaaaatactataacgccatgaagaagctaggtagtaaaaagccccagaagccaatcccaagaccaggcaacaagatccagggatgcatctttgatctcgtaaccaatcaggcttttgatattagcattatggttttaatctgtttgaatatggttactatgatggtggagaaagagggtcagtcacaacacatgaccgaggtgctgtactggatcaacgtagtttttatcatcctcttcacaggcgaatgcgtgttgaagctcatcagtctgaggcattactacttcactgtggggtggaacattttcgattttgtggtcgttatcatcagtattgtgggcatgtttcttgcagatctgatcgaaacttactttgtgagtcccacactgtttagggtgatccggctggccaggatcggaaggattcttcggctggttaaaggggccaaaggcatccggacgctgctctttgcactgatgatgtctctgccagctctctttaacataggccttctactttttttggtgatgtttatctatgcaatttttggaatgagcaactttgcatacgttaagaaggaggatggtatcaacgatatgttcaattttgaaacgttcggcaattcgatgatttgcctgttccaaattactacgtccgccggatgggatgggttgctggctccaatcttaaattccaaaccccctgactgtgatcctaaaaaagtgcaccctggctcctcagtggaaggggactgcggcaatcccagcgtgggtatcttctacttcgtttcatacatcatcatctcctttctggttgtggtcaacatgtacatcgccgtgatactagaaaacttcagcgtcgctaccgaagaatctaccgaacccttgtccgaggacgatttcgagatgttttatgaggtgtgggagaagtttgatccggacgccacccagttcattgagttcagcaaactgtccgactttgctgccgctctagatccccctttgctgattgcaaaaccaaataaagtgcagctcattgctatggatctaccgatggtttccggggatcggatccactgtctcgatattctcttcgcatttaccaagagagtgctaggagagtcaggagaaatggactccctccgtagccaaatggaggagaggttcatgagcgctaaccctagcaaagtgtcatacgagcctatcaccaccacgcttaagaggaaacaggaagacgtgagcgccactgtcattcaaagggcctacagacggtacagactgcggcagaatgttaaaaacatttcttcaatatacatcaaagacggggatcgggatgatgatctgcttaacaaaaaagatatggcattcgataatgttaacgaaaactctagcccagagaaaactgatgctaccagctctaccacgagccccccatcctacgattctgtcacaaaacccgacaaagaaaagtatgagcaggatcgaactgagaaagaagacaagggcaaggactcgaaggaatccaaaaagtag

SEQ ID NO: 134708 - DNA, 1620 bp, synthetic construct
  misc_feature 1..1620: note = Description of Artificial Sequence: Synthetic coding sequence
  source 1..1620: mol_type = other DNA
atcctaacgaattgcattttcatgacaatgaacaaccccccggactggaccaaaaacgtagagtacacttttaccgggatatacacgtttgagtccctggtgaaaatcctggcacgcgggttctgcgtgggggagttcactttcttaagagatccttggaactggctcgactttgtggtcatcgtcttcgcatacgtgacagaatttgtcgacctcggcaacgtctccgcgctgcgcacattcagggtattacgggctctgaagactattagtgtcatccccggcttgaaaaccatcgtgggtgcgctgatacagtctgtcaagaagttatccgacgtaatgatactgacagtgttttgcctctccgtttttgcccttatagggctacagcttttcatgggtaacctgaagcacaaatgtttcagaaacagcctagagaacaatgaaacactggagtcaatcatgaacaccctggagagtgaagaggatttccgaaaatacttctactacttggaggggtccaaagatgctctcttgtgcgggtttagcaccgattcgggtcaatgccccgaaggctacacttgcgtcaaaattggccgtaatccggactacggctacacatcctttgatacattttcctgggcgttcctcgccttattccgtctaatgactcaggactactgggaaaacctatatcaacaaaccctgagggccgccggcaaaacttacatgatcttctttgtggtcgtgattttcttggggtccttctatctgattaatctgattctggcagtggttgcaatggcatacgaagagcagaaccaggccaacatagaagaggccaagcagaaggagttggagttccaacagatgttagatagactgaagaaagagcaagaggaagctgaggcgattgctgcggctgctgccgagtacacttctattagaaggtcaagaattatgggactttcagagtcatccagcgaaacgagcaagctctcaagcaaatccgctaaagagaggcgtaatcggaggaagaaaaagaaccagaaaaagctctcttccggtgaagagaagggcgacgccgaaaagctttcaaaatccgaatccgaggatagcatcaggcgaaaaagcttccacctgggcgtagaagggcatcgaagagctcatgagaagcgactctccactcctaatcagtctcctctcagtatacgtggttcacttttttctgccagacgtagctctcggacatctcttttctccttcaaggggcgcggaagggatatcgggtccgaaacagagtttgcggacgacgaacactctatctttggggacaatgaatcgcgccggggctcgctcttcgtcccacatagaccacaggagcgcaggagttcaaacatcagccaagccagcagaagtcctcctatgctccctgttaatggaaagatgcatagcgccgtcgactgcaacggggtcgtctcgttggtcgacgggcgttctgcactgatgctgccaaacggccaactccttcccgaagtgattattgataaagccaccagtgacgatagcggcaccaccaaccagattcataagaaaagaagatgtagctcctatctgtag

SEQ ID NO: 134709 - DNA, 198 bp, synthetic construct
  misc_feature 1..198: note = Description of Artificial Sequence: Synthetic coding sequence
  source 1..198: mol_type = other DNA
atggcaaatttcctgctgcctcgaggaacatcaagttttcgccggtttacgcgtgaatccctggccgcgatcgagaagaggatggcagaaaagcaagcccgtggcagcacaaccctgcaggagtctcgggaaggcctgcccgaggaagaagctcctcggcctcagttggatttgcaggcgtcaaaaaagctgccctag

SEQ ID NO: 134710 - DNA, 6051 bp, synthetic construct
  misc_feature 1..6051: note = Description of Artificial Sequence: Synthetic coding sequence
  source 1..6051: mol_type = other DNA
atggcaaactttcttctgcctagagggacatctagtttccgaaggtttacacgggaatcccttgccgcaatcgagaaaagaatggcagaaaaacaggctagaggctccacaacccttcaggagtctcgtgaggggttgcccgaggaggaggccccccgaccccagctggacttacaggcttccaagaaactccctgacctttatgggaacccgccgcaggagctgattggggaacctctggaggatctagatcctttttacagtacacaaaaaacttttattgtactgaacaagggtaaaacaatcttccggttcagcgccactaatgctctgtacgtcctgtcaccatttcatccaataagacgggctgccgtgaagatcctggtgcattcgctttttaacatgttgatcatgtgtactatactcacaaactgcgtgttcatggcccaacacgatccccccccgtggaccaaatacgtggaatacacattcaccgctatatacacattcgaatcccttgtaaagattttagcgcgcggcttttgcctacacgcgtttactttcttacgggacccttggaattggcttgatttttctgttattattatggcctacacaaccgagttcgtggatcttggaaacgtgagcgccctcaggacctttagggtgcttcgggccctgaaaactatttcagtgattagtggtctgaaaacaatcgttggagccctcattcagtctgtgaaaaaactggctgatgtgatggtattgaccgtgttttgtctgagcgtgtttgctctgattggacttcagctatttatgggcaatctgaggcacaaatgtgttcgcaacttcacagccctcaacgggactaacgggagcgtcgaagcagacggcctggtgtgggaatcactggatttatatctctctgatcctgaaaattatttgctcaaaaacggaacgagtgatgtcctgctgtgtgggaacagttcagacgcaggtacctgtcccgagggataccgctgtttaaaggccggggagaaccccgaccacggctataccagcttcgattcgtttgcatgggcgtttttggcgctgtttcgtctgatgacacaggattgctgggagcgcctttaccagcagaccttgcgctccgccggaaaaatctacatgatttttttcatgttagtgatattccttggctctttctacctcgtgaacctcatcttggcagtcgtagccatggcttacgaggaacaaaatcaggctaccatcgcagaaacagaggaaaaggagaagagatttcaggaagccatggaaatgctgaagaaagaacacgaagctcttactatcaggggagtggacacggtgagtcgcagctccctcgaaatgtcgccactcgctcccgtcaacagtcatgagagaaggagtaagagacggaaaagaatgagctcagggacagaggagtgcggcgaggaccgccttccgaagtctgacagcgaggatgggcctagggcaatgaaccatctctctctgacaagaggcttgagccgtacctctatgaagcccagaagcagtcggggatctatttttacatttcggaggagagatttggggagcgaagccgacttcgcggacgacgaaaacagcactgctggcgagtcggagagccatcacacttcactgcttgttccctggccattaagaagaacctcagcacaaggacagccatccccagggacatcagctccaggccatgccctccacggcaaaaaaaatagcaccgtggattgtaacggtgtagtaagtttgcttggagccggagatccagaggccacttcaccaggatcccacctgcttcggcccgtaatgcttgagcatccccccgatacgactacgccttcagaggaaccaggagggccacagatgctgacctcccaggcaccttgtgtggacgggttcgaggaacccggtgccaggcagagggccctatccgccgtgtccgtgctgacatcagctttggaagagttggaggagtctcgccacaagtgcccaccctgctggaaccggctagcacaacggtaccttatttgggagtgttgcccattgtggatgtcaattaaacagggtgtgaagctggtggtgatggaccctttcacagacctgactatcaccatgtgtatcgtcctcaataccctgtttatggcactagagcactacaatatgactagcgagtttgaggagatgcttcaggtgggcaacctcgtgttcaccggaatttttaccgccgagatgacatttaaaatcatcgccctggatccatactactactttcaacaggggtggaatattttcgatagcattatcgtcattctgagcctgatggaactgggactttcccgcatgagtaatctgagcgtactccgctcatttcgactgttgagagtctttaagctggctaagtcttggcctaccctgaataccctgataaagattattggcaacagcgtcggcgccctggggaatctcacgctcgtactggcgatcattgttttcatattcgccgttgtcgggatgcagctgtttggtaagaactattcagagttacgggactctgattctggactgctcccacgctggcacatgatggattttttccacgcttttcttataatattcagaatcttatgtggtgagtggattgagaccatgtgggactgcatggaggtctctggacaatctctgtgtctactcgtattcttgctggtgatggtaatcgggaatctcgtcgtgttgaatttgtttctggctttattactctcctccttcagcgctgacaacttgaccgctcctgatgaggatagagagatgaacaatctgcagctagccctggcgcgcatccagagaggcctgagattcgtgaagcgcactacttgggatttttgttgcggcctgcttcgacagaggcctcagaagccggctgcactcgcagcccaaggacaactgccgagttgcatagccaccccctacagccctccacctcccgaaacagagaaggtgccccccacacgcaaggagaccaggtttgaagagggggagcaacccggccagggcacaccgggagatcccgaaccagtgtgcgtccctattgcagtcgctgaaagtgataccgatgaccaagaggaagacgaggagaacagcctcggaactgaagaggagagcagtaagcagcaagagtcccagcctgtctccggcggccccgaagccccccccgactcccgaacctggagccaggtctcagccacagcaagctccgaagcggaagccagcgcatcacaggccgattggagacagcagtggaaagccgaaccacaggctcccggttgcggcgagacgccggaggacagctgttccgaagggtctaccgctgatatgacaaatacagctgagctgctcgaacagatacccgacttagggcaggacgtaaaggacccagaggactgcttcacagaagggtgtgtgcgtagatgcccctgttgtgcagtggacaccacacaggccccggggaaggtgtggtggaggttgcggaagacctgctatcatatagtggaacatagttggttcgaaacctttattatcttcatgattctgcttagttccggggccctggctttcgaggatatctatctagaggagcgcaagacgatcaaggtgctgttggagtacgcagacaaaatgtttacctacgtgttcgtgctggagatgttgcttaagtgggtcgcctacggatttaaaaaatattttaccaatgcctggtgttggctggactttctaatagtggatgttagcctcgtgagccttgttgctaatacactggggtttgctgagatggggccaattaagtccctccggacactcagagctcttcgccctttgcgcgctctttctagatttgaggggatgagagttgttgtcaacgctctggttggtgctatcccgtcaattatgaacgtgttactggtgtgcctcatcttttggttgatattcagcataatgggcgtcaacctgttcgctgggaagttcggccgctgtattaatcagaccgagggggatctgcctctgaattacaccattgtcaacaataaaagtcagtgtgaatctcttaatcttactggcgaattgtactggacaaaggtcaaggtgaactttgacaacgtcggtgcaggatacctggccctgcttcaggtggccacgtttaagggctggatggacatcatgtacgccgccgtggattctcgggggtatgaggaacagccacagtgggagtataacctttatatgtatatctatttcgtaatcttcatcattttcggtagcttctttacactgaatttatttattggcgtgatcattgacaacttcaaccagcagaagaaaaagctgggcggacaagatatatttatgacggaggaacagaaaaaatactataacgctatgaaaaaattaggatcaaagaaaccacaaaagcccatccctcgaccactgaataaatatcaggggtttatcttcgatatcgtgactaaacaggcttttgatgtgacaatcatgtttctcatttgtctcaacatggttactatgatggtcgagactgatgatcagagccctgagaaaattaacatcttggctaagattaatctactcttcgtggccatattcactggagagtgtattgtgaaactcgcagctctgagacactattactttactaatagctggaacatcttcgacttcgttgtcgttatcctctcaatcgttgggacagtcctctcagacatcatccaaaagtattttttcagcccaacactgttccgcgtgattaggcttgcccgtatcgggcgcattctgagactgatccgaggcgccaaaggcataaggaccctgctgttcgcattgatgatgtccctgcctgccctctttaacattggactactcctgtttctcgtgatgtttatttattccatctttggtatggcaaactttgcttacgtgaagtgggaagcaggcatcgacgacatgttcaactttcagactttcgcaaatagtatgctgtgtctgttccaaatcacaacctccgctggctgggacggcctgctgagtccgatcctgaataccgggcccccctactgcgatccaacacttccaaattctaatggcagccggggcgattgtggaagccccgctgtcggcattttgttctttacaacctacatcattatctctttcctgattgtggtgaacatgtacattgctatcattcttgaaaatttcagcgttgccacggaggagtcaactgagcccctcagcgaagatgattttgacatgttctatgagatctgggaaaagtttgaccccgaagccacccagtttattgaatacagcgtgctgagcgacttcgcagatgcactgagcgaaccgctaagaatcgctaaaccaaaccaaatctccttaattaatatggacctgccgatggtgagtggtgaccgtatccattgcatggacatactgtttgcattcactaaacgggtgctcggagaatccggagaaatggacgccctgaaaatccagatggaggagaagttcatggctgctaacccctccaagatttcttatgaacctattacaactacactcaggagaaagcacgaggaggtgtcagccatggtgattcagcgggcctttcgccgtcacctcctccagagaagcctcaagcacgcaagttttctgttccggcagcaggcaggttctgggctgagcgaggaagacgcaccagaacgtgaggggctgatagcctacgtgatgtccgaaaacttctctagaccgctggggcctccatcttcatcatcaatttcctcaacttcgtttccgccctcctatgactcagtaacacgcgctacctccgataacctacaggttcgaggttctgactacagtcacagtgaagatctggccgattttcccccaagcccagaccgggatcgagaaagtattgtgtag

SEQ ID NO: 134711 - DNA, 342 bp, synthetic construct
  misc_feature 1..342: note = Description of Artificial Sequence: Synthetic coding sequence
  source 1..342: mol_type = other DNA
atggcccaacacgatccccccccttggactaagtacgtggagtatgttagtgagaatattaaacttggtaacctgtccgccctgagaacgtttagggtattacgcgctctcaagactatcagcgtcatcccaggattaaaaactattgtcggggccctcatccagtcggtcaagaagcttgctgacgtaatggttttgactgtgttctgcctctcagtgttcgcgctcatcggtctgcaactctttatggggaatctgagacataaatgcgttcgcaatttcaccgcactgaacggaactaacgggtcagtggaggccgatggactagtctgggaaagctag

SEQ ID NO: 134712 - DNA, 6051 bp, synthetic construct
  misc_feature 1..6051: note = Description of Artificial Sequence: Synthetic coding sequence
  source 1..6051: mol_type = other DNA
atggcgaactttctattacctcgaggcaccagctcctttcggcgattcacacgggagtcgctggctgcgatagaaaagcgaatggccgagaagcaggctcgaggcagtaccacccttcaggaatcaagagaaggcctgcctgaggaagaggctccacgccctcagcttgatctacaggcctcaaagaaattgccagatttgtatggcaatcctcctcaagagctcatcggtgagcccctggaggaccttgatcctttttacagcacccagaaaacattcatagttctgaacaaaggtaaaaccatcttccgcttcagtgccactaacgccctctatgtgcttagccccttccacccgatacgtcgcgctgcagtgaaaattctggtgcactcattgtttaacatgttgattatgtgcacgattctcaccaattgtgtcttcatggcccagcacgatcctcccccctggacaaagtacgtggaatatactttcaccgctatctatacatttgagtcattggttaaaatcctcgcacgcggattttgtctgcacgcctttacgtttctaagagatccttggaactggctcgacttttcagtaatcatcatggcctacgttagtgagaacatcaagctcggtaaccttagcgcattgaggacttttcgggtcctcagagcattgaaaacgattagcgtaattcctggcctgaaaactatcgtgggagcccttatacaatcagtcaaaaaacttgccgacgtgatggttcttacagtgttttgcttgagcgtgtttgcactgattggactgcagcttttcatgggcaatctgaggcataaatgtgtccgcaacttcacagctctaaatggaaccaacggttctgtcgaagcagatggtcttgtttgggagtctctggacctgtacctctccgatccagaaaactatttactcaagaatggtacaagcgatgtcctgctctgcggaaattcgtcggatgctgggacctgcccagaaggttatcgatgcctgaaagctggcgagaatcccgatcacggctatacatcctttgacagcttcgcatgggcgtttttggccctttttcgtttgatgactcaggactgctgggagaggctctaccaacagactctcaggagcgctggtaagatctacatgatctttttcatgctcgtgatttttttaggcagtttttacctcgtcaacctgatcctggccgtggtggcgatggcatatgaggaacagaaccaagcaactatcgccgaaactgaggaaaaagagaagcgctttcaggaggccatggaaatgctgaaaaaagagcacgaagcactgactatacgcggagtcgacaccgtgtctcggagtagcctggagatgagccccctagcgccagtgaactctcatgagaggcgctctaaaaggcgcaaaaggatgagtagtggcaccgaagagtgcggagaggaccgcctaccaaaaagcgatagtgaggatggacctagagccatgaaccacctgtccctgaccagaggcttgtcgcgaacgtccatgaagccaagatcctctaggggttccattttcactttcagaagacgcgatctgggatctgaagccgacttcgctgacgacgagaacagcaccgccggcgagagcgaaagccaccacacttctctcctggtcccttggccactgcggcgtactagcgcacagggacagcctagccctggtacttctgcacctggccatgccctgcacggtaaaaagaatagcacagtggattgtaatggggtggtgtctctgcttggcgctggcgatccagaggcgaccagccccggttctcacctgctgcggcctgttatgctcgagcatccccccgacaccaccacaccttctgaggagccaggaggcccccaaatgctgacctcacaggcgccttgtgtggatggctttgaggagcctggcgcgaggcagcgggcattgtctgcggtgtccgtcttgaccagcgctttagaggagcttgaagagagccgtcataagtgtcccccgtgttggaaccggctggctcagaggtatctgatctgggagtgctgccctctttggatgagcatcaaacagggggttaaattggtagttatggaccccttcaccgacctgacaattactatgtgcatcgttttgaacacgctattcatggctctggagcattataatatgacttcggagtttgaagaaatgctgcaagttgggaacttggttttcaccggcatcttcactgctgaaatgacctttaaaatcatcgcgcttgatccctactactacttccaacaggggtggaatatttttgacagcatcatcgtgatcctctcccttatggagttagggctgtctaggatgtccaatctctcagtactcagaagttttcgactgttaagggtgttcaagctggccaagagctggccaaccttgaataccctcatcaagatcataggcaattcggtgggggcattgggtaacctcacacttgttctggctatcatcgtgtttattttcgccgtggttggaatgcaactgtttggaaaaaactactccgagctgcgggactctgactccggcttactgcctagatggcacatgatggatttcttccatgcctttcttatcatcttcaggatcctctgcggtgagtggattgaaacgatgtgggattgtatggaggtgagtggtcagagcttatgtctcttagtcttccttttagtgatggttataggcaacttggtggtccttaacctattcttggctcttctcctcagcagtttctcagcagataacctaacagctccggatgaagaccgagaaatgaataacctgcagctggcactcgccagaatccagcgcggtctgcggttcgttaagcgcactacatgggatttttgctgcggacttctccggcagcggccccagaagccggccgcgctagcagcccagggacagttgccttcgtgtatagccaccccttactcgccccccccacctgagaccgaaaaggtcccaccaacccgaaaggaaactcggtttgaagagggcgaacagcccggacagggcactccaggtgatcccgaacctgtgtgcgttccgattgcggtcgccgagtcagacacagacgatcaggaggaagacgaggagaacagcctgggtaccgaggaggaaagttcgaagcaacaggagtctcagccagtgtccggtgggcctgaggctcctcccgactcccgaacctggagtcaggttagtgctaccgcttcaagcgaagcagaagccagtgcaagccaagctgattggagacagcaatggaaagctgaaccccaggcacctggatgtggagaaactcccgaagatagctgcagtgaaggctcaaccgcggatatgactaacaccgccgagctgctggaacaaattcctgacctcggtcaggacgtgaaggacccagaggattgcttcacagagggatgcgtgagacggtgtccctgttgcgctgtggacaccacacaagctcctggcaaggtgtggtggcgcctacggaaaacttgctaccacatcgtcgagcattcttggttcgagacttttattatttttatgatcctcctgtcatctggggcacttgcattcgaagacatatatctggaagaacgtaagaccatcaaggtgctgcttgaatacgccgataaaatgttcacttacgtgttcgttctggagatgctgctcaaatgggtcgcctatggctttaagaagtattttacgaatgcatggtgttggctagacttcctgatcgtggacgtgagtctggtgagtctggtcgcaaatactcttggattcgctgaaatgggacctatcaagagtctgagaaccctccgcgccctgcgtcccctccgtgccctctcacgcttcgagggcatgagagtcgtggtgaacgcactggtgggtgctattcctagcatcatgaacgttctactggtgtgtctgattttttggcttatcttcagtattatgggagttaacttatttgccggcaagttcggtcggtgcatcaaccaaacagagggggacctcccacttaattacaccatcgtgaacaacaaatctcagtgcgaaagcctaaatttgacgggtgaactgtactggaccaaagtcaaggtcaattttgataacgtgggcgctggatatctggccctgctacaggtagctacattcaagggctggatggatatcatgtatgctgccgtggactcccggggctacgaggagcagccacaatgggagtacaatttatacatgtacatttattttgtcatcttcatcattttcggttctttcttcactttgaatttgttcatcggggtcattatcgataatttcaatcagcagaagaagaaactgggtggacaggacatcttcatgacagaagagcagaaaaagtattacaatgccatgaagaaactgggttctaaaaagccgcagaagccgattcccaggcccctcaacaagtaccaagggttcatcttcgatattgtaacaaaacaagcttttgatgtgaccatcatgttcctgatctgcctgaatatggttaccatgatggtggagacagatgatcaaagccctgagaagatcaatatcctcgccaaaatcaatctactgttcgtggccatctttaccggagagtgtatcgtgaaacttgcagctctgcgccattactacttcaccaacagctggaatatctttgatttcgttgtggtgattttatctatcgtgggcaccgtcctgtctgatattatccaaaaatactttttttcacccaccctgttccgcgtgatcagactggctagaattggacggattctgagactgataagaggcgcaaaggggatcaggacgctcttattcgccttaatgatgagcctccccgccctgtttaatatcggcctcttgctgtttttagtgatgttcatctacagcatcttcgggatggccaattttgcctatgtgaagtgggaagcagggatcgacgacatgttcaactttcagaccttcgcaaactcaatgttgtgcctttttcagatcacaacaagcgcagggtgggatgggctcctgagccctatcctgaatactggcccaccttactgtgatccaaccctccctaacagtaacgggtctagaggggattgtggtagccccgccgtaggcatactctttttcactacttacattattattagtttcctgattgttgtgaacatgtacattgcaataattcttgagaactttagtgtggctaccgaggaaagcacagagcctctcagcgaggacgattttgacatgttttatgagatctgggaaaaattcgacccggaagctacacaattcatcgagtactctgttctctctgactttgcggacgccctatcagagcccctccggatagcaaaaccaaaccagatttctctcattaacatggatctgccgatggtgagcggtgaccgcatacactgtatggatatcctgtttgccttcaccaagcgcgtgctgggtgaaagcggtgaaatggacgcacttaagatccagatggaggaaaaattcatggccgctaatccaagcaaaatttcttacgagccaatcactacaacactgaggagaaagcacgaggaagtttccgcaatggtcatccagcgggctttcaggcggcacctgctgcagcgttctctaaaacatgcatcctttctgttcagacaacaggccggctcaggcctgtcagaggaggatgcccccgagcgcgaaggcttaatcgcctatgtgatgtccgagaatttcagcaggcctcttggcccgccgtcaagcagctccatttcctccacatcttttccccctagttacgatagcgtgacgagagcaacatctgacaatcttcaggtccgtggatcagactatagccatagtgaggacctagcagacttcccccctagtcccgaccgagatagagagagtatcgtgtag

SEQ ID NO: 134713 - DNA, 5997 bp, synthetic construct
  misc_feature 1..5997: note = Description of Artificial Sequence: Synthetic coding sequence
  source 1..5997: mol_type = other DNA
atggcaaacttccttctgccaagaggcacgagtagcttccggcggtttactagagagtctcttgcggccatagaaaaaagaatggcagaaaagcaggcacgggggtccaccacattgcaggagagtcgcgagggcctcccagaggaggaggccccccggccgcagttggacctgcaggctagcaagaaactgccagatctctatggcaaccctccccaggaactgataggggagccactggaggacttggatcctttttattccacccagaagaccttcatcgtgctgaataagggcaagaccatcttcaggttctccgcaaccaacgccttgtatgtgctgtccccattccaccccataagaagagctgccgtgaaaattctcgttcatagcctgttcaacatgttgattatgtgtaccatcttaacaaactgtgtatttatggcccaacacgaccccccaccttggacaaaatatgtggagtacacatttaccgctatttacacatttgagtcgctggtgaaaatcctcgccagaggattctgtctacatgcgtttacctttctgcgtgatccttggaactggctggacttcagcgtaatcattatggcgtatgtgagcgaaaatattaagctgggcaacctgtcagctctgaggaccttccgggtccttcgagccctgaagacgatctctgttatccctggtttaaagaccattgtgggagcactgatccagtctgtcaaaaagcttgccgacgttatggttctgactgtgttttgcctgtccgtgtttgccctgattggcttacaactttttatggggaacctgaggcataagtgtgtacgcaactttaccgcacttaacggtacaaatggaagcgtggaagcggatggactggtgtgggaaagcttagatctgtatctctctgacccggaaaattatttgctgaagaacggaacctctgacgtgctgctgtgcggcaattcatcagatgctgggacttgccctgagggttacagatgtctcaaggccggagagaacccagaccacggctatacaagcttcgattcctttgcttgggcctttctcgccctgtttcgcctcatgactcaggattgttgggagcgactttaccagcaaaccctgaggtccgctggaaaaatctacatgatcttctttatgctcgtcatctttctgggctcattttatctggtcaacctgattttagccgtcgtagccatggcctacgaggaacagaaccaagctacaatcgcagagaccgaagaaaaggaaaaacgcttccaagaggccatggagatgttgaagaaagagcacgaagccttgacgattcgtggcgtcgacactgttagtcggtcatccttggagatgtcccccctagctcccgttaattcccacgagagaagatccaaaaggagaaaacgtatgtctagcggcactgaagagtgtggcgaagatcggttaccgaagtcggattcggaggacggacctcgggccatgaaccacctgtctctaacgagaggcctcagtagaaccagcatgaagccacggagtagtagggggtccatcttcaccttcaggcgcagggatctgggatctgaggcagattttgccgatgatgagaatagcaccgccggtgagtccgagtcccatcacacaagcctacttgtgccgtggcctcttagacggaccagtgcacaagggcagccctcaccaggaactagcgccccaggccacgctctgcacggtaaaaaaaactccactgtggactgcaacggtgtcgtgtccctactgggggcaggcgacccggaagcaacatcccccgggtcccacctgcttcgccccgtgatgctcgaacacccccccgatactaccaccccgtcagaggaacctggcggcccccagatgttgacctcgcaagcaccctgcgtggatggctttgaggaacctggagcccggcaacgcgcattaagtgccgtgagcgttcttacttcagccttggaggagctagaggagagcaggcacaaatgtcctccatgttggaaccggctggctcaacggtacctaatttgggagtgctgtcccctgtggatgtccatcaaacagggagtaaaattggtagtgatggatcccttcactgacctgaccatcactatgtgtatcgtcctgaacaccctgtttatggcgttagaacattataacatgaccagcgaattcgaagagatgctacaggtgggtaatctggtgtttacagggatttttacggccgagatgacctttaagatcatcgctctggatccttactattattttcaacaggggtggaacattttcgactctatcatcgttatcctgtcccttatggagcttgggctgtctagaatgagcaatctctctgtgttacgttcctttagactgttacgcgtttttaagctagcaaagtcttggcctacattgaatacgctaatcaagattattggcaattcagtaggggccctcggcaacctgaccctggtattggccatcattgtgttcatcttcgcagtggtggggatgcagctgttcggcaaaaactacagcgaactacgggattctgattcaggacttctgccgagatggcacatgatggacttcttccatgcatttctgattatttttagaattctatgcggcgagtggatcgagactatgtgggactgcatggaggtctcaggtcagtctctttgtttgctggtgttcctgctggttatggtaattggcaacctcgtggtgctcaatctgttcttggctctccttttgtcatcattctcggccgataatctcactgcgccagatgaagacagggagatgaacaacctccagctggccttggcgcgaatccagcgtggactgaggtttgttaaacggaccacctgggacttctgctgcgggctcctgcgccagcggccacagaagcctgcagccctggcagcacaggggcagttgccatcctgcatcgccactccttattctcctcctcctccagaaaccgagaaggtgccgccaactcgcaaagagacccgttttgaggagggtgagcagcctggacagggaacacccggcgatcccgagcctgtctgtgtccctatcgctgtggccgaatcagatactgatgatcaggaggaggatgaagaaaactctctgggcacggaagaggaaagcagcaagcagcaggagtcacaacctgtctccggaggacccgaggctcctcccgactccaggacctggtcacaggtttccgccaccgcatcaagcgaggctgaggcaagcgcgagtcaagctgactggcgccagcaatggaaggcagagcctcaagcccccggatgcggtgagacacccgaagacagttgcagtgaaggatccactgcggatatgacgaataccgctgaactgctggaacagatccccgacctgggacaagacgtgaaagatcctgaagattgtttcactgaaggctgcgtcagaaggtgtccctgctgcgccgtagataccacgcaagctccggggaaagtgtggtggcgcctgaggaagacctgttaccacattgttgaacattcttggtttgaaacattcatcatcttcatgattcttctgtcatcgggagcattagccttcgaagatatctatctagaggagagaaagactattaaggttctgctagaatatgccgataagatgttcacatacgtttttgtgctggaaatgctgctgaagtgggtggcctatggattcaaaaaatacttcacaaatgcatggtgctggctggatttcctgatcgtcgacgtgtcactcgtcagtcttgttgccaatacactgggcttcgccgagatggggcccatcaaaagcctgcggacccttcgtgccctgcggcctctacgagctttgtcccggttcgaaggaatgagggttgtggtaaatgccctagtgggcgcaatcccctctattatgaacgttctcctggtctgcctcatattctggctgattttcagcatcatgggtgtgaatctgttcgcaggaaagttcggacggtgtattaaccagacagagggcgacctccccctgaattacaccattgttaataataagtctcaatgcgagagtctgaacctgaccggagagctctattggactaaggtgaaagtgaactttgataacgtgggagctggttaccttgcactcctccaggtgtatgaggagcagcctcagtgggagtacaacctctacatgtatatttacttcgtcatctttatcatctttggctcatttttcacactgaacctttttatcggtgtgataatcgacaatttcaaccagcagaagaagaagttgggcggtcaagatatatttatgactgaggaacagaaaaaatactacaatgctatgaaaaagcttggctctaagaagcctcagaagcctattccacgtccgcttaataaataccagggattcatattcgacattgtgacaaagcaagccttcgacgtgacaataatgttcctcatttgtttaaatatggtcacaatgatggtggaaactgatgatcagagccctgagaagatcaatatcctggccaagatcaaccttctatttgtcgctatttttaccggggaatgcatcgtcaaactcgcagccctccgtcattattattttacaaacagctggaacattttcgacttcgtagtagtgatcctaagcattgtgggtaccgttttaagcgatatcatccaaaagtactttttttctcctaccctgttccgggttattcgcctcgcccgtattgggcgcattctgcgcttaatccgtggcgctaaagggattaggactcttcttttcgcactgatgatgagcctgccagccctctttaatattggattactgctgtttctggtcatgttcatatactctatctttgggatggcgaacttcgcatatgtcaagtgggaagctggaatcgacgatatgttcaacttccagacctttgccaacagcatgctctgtctcttccagatcacaacatctgccggttgggatggccttctgagcccaatattaaacacgggccctccctattgcgaccccaccctacccaacagcaacgggagtcgaggcgactgcggaagtccagccgtggggattctgtttttcactacgtatataatcataagcttcctgatcgtcgtcaacatgtacatagcaattatcctcgaaaatttctctgtggccacagaggaatccaccgagcctttgtctgaggacgactttgacatgttttacgaaatctgggagaaatttgacccagaggccacacaattcattgaatatagcgtcctttcagacttcgccgacgcgctctccgaacctctgcgtatcgccaagccaaaccagatcagtctcataaacatggatctgccgatggtgtccggagataggattcattgtatggacatacttttcgcattcaccaagcgggtgctcggcgaatctggggaaatggacgcgctgaaaattcagatggaagaaaagttcatggctgccaatcccagcaaaatttcctatgaacccataactaccaccttgcggcggaaacacgaggaggtatcagccatggttattcaacgggccttcaggcgccatttgctgcagcgatcactgaaacacgcatcctttcttttcagacagcaggcaggatccggtttgtccgaagaggatgcgccagagagagagggactgatcgcctacgtgatgtccgagaacttctcccggcctctaggccctcctagctcatccagtatctcgtccacatcattcccaccatcgtatgactccgtgactcgggccacttcggacaacctgcaggtgcgcgggtccgactacagccatagcgaagatctggcggactttcccccgtccccagatagggaccgagaaagcattgtgtag

SEQ ID NO: 134714 - DNA, 6048 bp, synthetic construct
  misc_feature 1..6048: note = Description of Artificial Sequence: Synthetic coding sequence
  source 1..6048: mol_type = other DNA
atggcaaattttctgctcccccgaggcacttcctcatttcgccgattcactagggaatcactcgcggcaatcgagaagcggatggccgaaaagcaggccagggggtccacaactctgcaggagagcagggagggactcccggaagaggaggcaccaagacctcagctcgatctgcaagcgagtaagaaattgccagacctgtacggcaatcccccacaggagttgatcggtgagcccttggaagacctcgatccgttctatagcacacagaagactttcattgtattgaataagggaaaaactattttccggttctcagccactaacgcgttatatgtcttgagcccatttcatccgattcgcagagccgccgtcaaaatactggtgcatagcttattcaacatgctgatcatgtgcaccatcctgacaaactgcgtgttcatggctcagcatgaccccccaccttggaccaagtatgtcgaatacacctttacagccatttatacattcgagagcctggtgaaaatcctcgcacgcggattctgtctgcatgctttcacgttcctgagagatccctggaactggctggactttagtgtgatcatcatggcttacacgacggaattcgtagacctgggaaacgtttccgccctgcggacattcagggttctgcgtgcactcaaaaccataagcgtaataagcggcctgaaaaccatagtgggcgccttaattcagagcgtaaagaaactggccgatgtgatggtgctgacggtgttttgtttgagtgtcttcgccctgatcggcctgcagctgttcatgggcaatctaagacacaaatgtgtacgtaattttactgccctgaacgggactaatggctcagtggaggcagacgggcttgtgtgggagtccttagatctgtatctctccgacccggaaaattatctgctgaagaacgggactagtgatgtgctgctgtgtggtaacagctccgacgccggcacgtgccctgagggatatcggtgtctgaaggccggcgagaatcctgatcatggctacacatctttcgattctttcgcctgggccttcttggcactgttcaggcttatgacccaagactgctgggagaggctgtaccagcagactctgagaagcgccggcaaaatctacatgatcttttttatgctcgtcatctttttaggatctttctacttggtcaaccttattctcgctgtggtggcaatggcttatgaggagcaaaatcaggccactatcgcagagacagaggagaaagaaaagcgatttcaggaggccatggaaatgctgaagaaagagcacgaggccctgaccatccgaggagtggataccgtgagcaggtcttccctggagatgagcccactggcaccagtaaactcccatgagaggagaagcaagcgtcgaaagagaatgagctctggcaccgaggagtgcggtgaagacaggcttcccaagtcagacagcgaggacggtccacgggctatgaaccaccttagtttgacccggggcttgagtaggacatcaatgaagcccagatccagtcgaggtagcattttcacttttaggcgaagggatctgggatcagaggctgatttcgctgacgatgaaaattccactgcaggcgagtctgagtcacatcacactagtcttctcgtaccctggcctctgaggcggacaagtgcacaaggccaaccctcccccggaacgtctgctccaggccatgccctgcacggcaaaaagaattcgaccgtggactgcaacggggtggtgagcctccttggagctggcgaccctgaggccacctcaccaggaagccatctgctcagacctgtgatgctcgaacacccacctgatacaactacccccagtgaagagcctgggggcccccaaatgttgacatctcaagctccctgcgtcgatggctttgaagaacctggcgcgcggcagagagcactaagcgctgtgagcgtcctgacgtctgctctggaagagctggaggaatctaggcacaaatgtcccccctgctggaatcgactggcccagagatatcttatttgggagtgctgccccctgtggatgtctataaagcaaggcgttaagttagtggtaatggatccgtttactgacctgacaatcacaatgtgtatagtgctaaacaccctattcatggccctggagcactataatatgacctccgagttcgaagagatgttgcaagtgggcaatctggtgtttactggtattttcaccgctgagatgacgttcaagattattgcacttgatccctattattacttccagcagggctggaacatctttgatagcattatcgtgatactgagtctgatggagctggggctgagcagaatgtctaatctgagcgtcctgcgatcctttcgccttttgcgcgtgttcaaattggccaaatcttggccaactctgaatacactcatcaagattataggcaatagcgtgggcgcactgggaaacttgacactggttttagctatcattgttttcatcttcgctgtggtgggtatgcagctcttcggtaagaactacagcgagcttagagatagtgatagcggtctcctgcctcgctggcacatgatggacttttttcacgcatttttaatcatatttcgcatcctgtgtggagagtggatcgagactatgtgggactgcatggaggtgagtgggcagtccctgtgcttgctagtgtttttgctggtcatggtgatcggcaatctcgtggtgcttaacctgttcctcgcacttttactgtccagtttttccgccgacaatctgactgcaccagatgaggatcgcgagatgaataacttgcaattagctcttgccaggatacagagaggccttagattcgtgaagaggacaacgtgggatttttgctgcggattattacgtcaaagaccccagaaacccgccgccctggccgctcagggtcagcttcctagctgcatcgcaacgccgtattctcccccgccccctgaaacggaaaaggtcccgcctaccagaaaagaaacccggtttgaagagggcgagcagccagggcagggtacacccggcgatcctgagcccgtctgcgtgcccatcgcagtagccgaatcagacaccgacgaccaggaggaagacgaagaaaatagtttgggtaccgaagaagaatctagtaagcaggaatcccaacctgttagcggaggccctgaggccccccccgattctcgcacatggagtcaggtctcagccaccgcaagttctgaggccgaggcttctgcctcccaggctgattggcggcagcagtggaaagctgaaccacaagcgcccggatgcggtgaaactccagaggactcctgttccgagggctccacggcggatatgaccaacacggccgagctgcttgagcagattccagatcttggccaggatgtcaaggatcctgaggattgcttcaccgaggggtgtgtgaggcgctgcccttgttgtgctgtggatacaactcaggcgccagggaaggtgtggtggcgactgcgcaagacatgttaccatatcgtcgagcactcctggtttgaaacgttcattatctttatgattttactctcttctggggccctggccttcgaagacatttacttggaggagcgtaagacaattaaggtcctgttggagtatgccgataagatgtttacatatgtcttcgtgctggagatgctgctgaagtgggtggcctacggtttcaaaaagtatttcactaatgcgtggtgctggcttgactttctaatagtcgacgtctcattggtaagccttgtggcgaacacactgggatttgccgagatgggccccatcaaatcccttaggacactgcgtgcccttcggcctctaagggcattatctcgtttcgaagggatgcgcgtagtggtaaatgcgcttgtgggcgcgatccccagcatcatgaatgtattgttggtctgcctgatcttctggctcattttttctatcatgggagtcaatttgttcgccggcaagttcggaaggtgtatcaaccagaccgagggggacttgcctctcaattatacgatagttaataataaaagccagtgtgagagcctgaatctaacaggtgaactgtactggaccaaagtgaaggtgaactttgacaacgtaggcgctggatacctggcccttctccaagtcgcaaccttcaagggctggatggatatcatgtacgctgcagttgacagtagggggtacgaggagcagcctcagtgggaatacaatctctacatgtacatttattttgtgattttcataattttcggatctttcttcacgcttaacctcttcattggagtgattatagataactttaatcagcaaaaaaagaaactgggggggcaggacatcttcatgactgaagagcagaagaagtactataatgcaatgaaaaagttaggttctaaaaagccgcagaagcctatccctagaccactgaataaataccagggcttcatcttcgatattgtgacaaaacaggccttcgatgtgactataatgttcttgatctgccttaacatggtgactatgatggtggagactgatgatcaatcccccgagaagatcaatattctggccaaaatcaaccttttgttcgtcgcaatttttactggtgaatgcatagtaaaacttgccgccctgcgacactactattttacaaattcatggaatatattcgacttcgtagtggtgatactcagcatcgtggggactgttttatcagatatcatccaaaagtacttcttctcgcctacactattccgtgtcataaggctagctcgaatcggaagaatactgcgactcatcaggggggctaaaggcatccgcacgctcctgttcgcgctaatgatgagcctgcctgccctgttcaatattggcttattattatttttagtcatgttcatttattctatcttcgggatggccaatttcgcctacgtgaagtgggaggccggaatagacgatatgttcaattttcagacattcgctaatagtatgctgtgcctgtttcagatcacaacgagcgccggatgggacggtctcctctcccccatcttgaatacaggaccaccctattgtgaccccacacttccaaacagcaatggatctaggggagactgcggatcgcctgcggtggggatcttatttttcactacgtacatcatcatctccttcctcattgtggtcaatatgtatatcgcgatcatcctggaaaattttagcgtggccacagaggagtcaaccgagcctctcagcgaagacgattttgatatgttttacgagatatgggagaagttcgatcccgaggcgacccagttcattgaatattcagttctgtccgacttcgccgatgccctttccgaaccactgcgcattgctaaaccaaatcaaatttctttgattaacatggatctgccaatggtgagtggtgatcgaatccactgtatggatatcctgtttgcattcacaaaacgggtgctgggagaaagcggcgagatggatgcgttaaagattcagatggaggagaaattcatggctgctaacccttccaagattagctatgagcctatcactactaccctgcggagaaaacatgaggaagtctccgcgatggtgatccagcgggccttcagacgacacttactccagagatcactgaagcatgcaagcttcctgtttaggcaacaagccggatccgggctatccgaggaggatgcccccgagcgggaagggctgatcgcttacgtgatgtccgaaaatttctcacgaccattgggacccccaagcagctcttccatttcttcaacaagttttccaccaagttacgactctgtcaccagagcaacgagtgacaacctgcaggtgaggggcagcgactactcgcattccgaggatctggctgatttcccaccatctccagaccgtgacagagaatccattgtgtag

SEQ ID NO: 134715 - DNA, 5997 bp, synthetic construct
  misc_feature 1..5997: note = Description of Artificial Sequence: Synthetic coding sequence
  source 1..5997: mol_type = other DNA
atggcgaacttcttgctcccacgagggacctcctcgtttaggcgttttaccagagaatcactcgcggcgatcgagaagcgcatggctgaaaagcaggcccgggggagtaccaccctgcaagaatcacgcgagggcctgcctgaggaggaagccccccgccctcagttagacctgcaggcttccaaaaagttgccggacctgtacgggaacccacctcaggagttgattggagaacctctcgaggacctggaccccttctactcaacacagaagaccttcatagttctcaataagggcaagaccatttttcggttttctgccaccaacgcgctgtacgtactgtccccatttcaccctatcaggcgcgccgctgtaaaaatcttggttcatagcctgttcaacatgcttattatgtgcaccattcttactaattgcgtgttcatggcgcagcacgacccaccaccttggacaaaatatgttgagtacacctttacagccatctacacctttgaatccctggtcaaaatcttggcccgcgggttctgtcttcatgcttttacctttttacgagatccctggaactggcttgatttcagcgtgatcattatggcctatgtgagcgagaatatcaaactgggaaacttatccgcgctacgaactttccgggtgcttcgggcgctcaagactatctccgtgattcccggtttaaaaacaatcgtgggagccctgattcagtctgtcaagaaactcgcagacgttatggtactcactgtgttctgcttatccgtgttcgcactaatcggcctgcaactattcatgggcaacctgcgccacaagtgtgtgagaaacttcacagcattaaacggcacaaacgggtcagtagaggcggatgggctggtttgggagtcattggatctctacctttctgatcctgagaattacttgctgaaaaacggtacatccgacgtgcttctctgcggaaacagctcggatgctgggacatgcccagaagggtatcggtgtctcaaagccggagaaaacccggaccacgggtacacatccttcgattccttcgcctgggcattcctcgctttatttaggctgatgacccaagactgctgggagaggctgtaccaacaaactctccgctctgcggggaagatttacatgatatttttcatgctagttatttttctgggcagcttctatttggtcaacctgatcttagctgtcgtggctatggcctacgaggagcagaatcaggctaccatcgccgagacagaagaaaaggaaaagcgcttccaggaggctatggaaatgttgaagaaggaacatgaggccctgactatcaggggggttgacacggtgagccgaagcagcctggagatgtcacccctggctcctgtgaattcccatgagcggcgttctaaaaggcggaagcgaatgtccagtggcactgaggaatgcggcgaggataggctaccgaagtcggactcagaagatggcccaagagctatgaaccatctatcactcacccgcggcttgtcacgcacttcgatgaaaccacgatcttccagaggatccatctttaccttcagaaggagagacctcggtagcgaggctgacttcgctgacgacgagaattccacagcaggagaatctgagagtcatcatacttccctcttggtaccttggcccctgcgcaggacgagcgcacagggacagcccagccccggaacctcggcacctggccacgcactgcatggaaaaaagaatagcaccgtggattgcaacggagtggtcagtctcctaggcgctggtgacccagaagctacctcaccaggatcacatctgttgaggccagtgatgctcgaacacccgcctgacacgaccacccccagcgaggagccaggcggtcctcaaatgttaacctctcaagcgccctgtgtcgacgggtttgaggaaccgggagccagacagagagcactgtctgcagtgagtgtcctgacctccgcattggaggagctggaggagtcaaggcataaatgcccaccgtgttggaaccgcctggcacagcgctacctgatctgggagtgctgcccactgtggatgtcgatcaagcagggggtgaagctcgttgtcatggacccattcacagacctcaccattactatgtgcatagtacttaatacgctgttcatggccctggagcattataatatgacaagtgaattcgaagagatgttgcaggtgggcaacctggtgttcacaggaattttcacagctgagatgaccttcaagattatcgctctcgacccatattactacttccagcagggctggaacatattcgacagtatcattgtaatcctcagccttatggagttaggcttgtcccgaatgagtaatctctccgtgttaagatcttttagactgttacgcgtgtttaagctagccaagtcatggcctaccctcaataccctgataaaaataatcggtaactctgtcggcgcgctcggcaatctaacactggtactcgcaatcatcgtattcatcttcgccgtcgtagggatgcaactgttcggtaaaaattacagtgaattaagggattccgactccggtctgttgcccaggtggcacatgatggacttcttccatgcctttctcataatcttcaggatcctctgtggcgaatggattgagacgatgtgggattgcatggaggtgtccgggcaatccctttgcctgttggtgtttcttctggtgatggtgattggcaacctagtggtgttgaacctgttcctcgctttactgctgtcctcattctccgccgataacttgacagcaccggatgaggaccgagaaatgaacaacctgcaactggcgctcgctagaattcagcggggattgcggtttgtaaagcgcaccacgtgggacttttgttgcggtcttctgcgacaaagaccccagaagcccgctgcgcttgcggcccagggccaactgccgagctgtatagccacgccttattcgcccccccccccggaaactgaaaaagtgccccctactaggaaggagacccgtttcgaggagggggaacagcccggccaggggactcccggggatcctgaacccgtttgtgttccaattgccgtcgcagaaagcgacaccgacgaccaagaggaagatgaggagaattcgctggggaccgaagaagagtccagtaagcaacaggagtcacagcccgtctcaggcggtcccgaggcgcctccggactcaaggacatggagccaggtgtccgccaccgcatcctcggaagccgaagcatccgcttcacaggctgactggcggcagcagtggaaagcagaaccacaggcccccggctgtggtgagactccagaggacagttgcagtgaaggatcgaccgcagacatgaccaacacagccgaactccttgagcagatacctgatttggggcaggatgtgaaagacccggaagactgttttactgagggatgtgtccgacggtgcccctgctgtgccgttgataccacccaagcgcctggcaaagtgtggtggcgcctacgcaagacctgctaccacatcgtcgaacactcttggttcgaaacattcatcatcttcatgatcttgctgagctctggagcattggcttttgaggacatatatctggaggaacggaagactatcaaagtattgctggaatatgccgataagatgtttacctatgtgttcgttctggagatgttactgaagtgggtagcttacggctttaagaaatatttcactaatgcctggtgttggttggatttcctcatcgttgacgtctcattagtgagtctagtagccaacactctcggcttcgctgagatggggccaattaagagcctcagaaccctgagagccctcaggcccctcagggctctgtctcgattcgagggtatgagggttgttgtgaatgctctcgtaggcgctattccatcaataatgaacgtgctgctggtgtgcctgattttctggctgatattttcaataatgggcgtgaacctgttcgcagggaaattcggccgatgcatcaaccagaccgagggggacctccctttgaattacacgatagtgaacaataagagccagtgtgagagtctcaaccttaccggcgagctctattggacgaaagtgaaagtgaatttcgacaatgtaggggccggctatctggccttgctgcaagtgtacgaggagcagcctcagtgggaatacaacttgtatatgtacatctacttcgttatcttcatcatcttcggatcatttttcaccttgaatcttttcatcggcgtcattatcgacaactttaaccagcagaagaagaaactcggaggccaggacattttcatgaccgaggaacagaaaaaatattacaacgctatgaaaaaattggggtcgaagaaaccacagaagccaatcccgcgccctctaaataagtaccagggttttatcttcgatatagtgactaagcaagctttcgacgtgaccattatgttcctgatttgtttgaacatggtcactatgatggtggagaccgacgatcaatctccagaaaaaattaacatcctggccaagattaatttattgtttgtcgcaattttcacaggcgaatgtatagtcaaactggccgcactacgccattattactttactaattcttggaacatcttcgacttcgtggtcgttatcctctcaatcgtgggcacggtgttgtccgatatcattcaaaaatacttttttagtccaaccctgtttagagttatacggctcgccagaatcgggaggattcttagactgattaggggggcgaagggtatcaggaccctgctgtttgccctgatgatgtctctacccgcactgtttaatatcggtctcctgttgttcctggtaatgttcatctattctatcttcggaatggctaactttgcctatgtaaaatgggaagccggaattgatgatatgttcaactttcaaaccttcgccaacagcatgctttgtctcttccaaattacaacctctgccggttgggacgggttgctcagccccatcctcaacactgggcctccgtactgtgaccctactctccccaatagcaatggtagtaggggcgactgcgggagtcccgccgtcgggattttgttctttacaacctatataattatttctttcctgatagtggttaacatgtacatcgcaattattttagaaaatttcagcgtcgcaactgaggaaagcactgagccgctgtccgaggatgacttcgacatgttttatgaaatatgggaaaagttcgatccagaagctacgcagttcatcgaatatagtgtcctgtctgactttgccgatgcactgtcggagccgctcaggatcgccaaacccaaccagatttccttaatcaatatggatctgccgatggtcagtggcgatcgtatacattgcatggatatccttttcgccttcaccaagagagttttgggggagagcggagagatggatgccctcaagatacagatggaggaaaaattcatggcagcaaacccttctaagatttcatacgagcccatcaccaccacactgcggcggaagcacgaagaggtgagtgccatggtaatacaaagggcatttcgcagacatctactccagcggtcgctaaagcacgcgtcttttcttttccgtcagcaggccggtagcggtctgagcgaagaggatgcgcccgagcgtgaagggctgattgcctatgttatgtccgaaaacttctcccggcctctcggtccaccttcctcgtcttctatcagtagtacatccttcccgcctagctatgattcagtaactagagcaacttcagataatctgcaggtccgtggctctgactactctcattccgaagacctggctgattttccaccttcgcctgatcgcgatagggagtccatagtatag

SEQ ID NO: 134716 - DNA, 6048 bp, synthetic construct
  misc_feature 1..6048: note = Description of Artificial Sequence: Synthetic coding sequence
  source 1..6048: mol_type = other DNA
atggctaatttcctcctgccccggggaacctcctccttcagaaggtttactcgggagtccctagccgcaatcgagaaacgcatggccgagaaacaggctcgtgggagtactacgctccaggagtctcgagagggactgccagaggaggaagcccctcgtcctcagttagacctccaggcgtctaaaaagctgccagatttgtatggcaaccccccccaggagttaattggagaaccactcgaggacctggatcccttctattcaactcagaagacttttattgttctgaacaaggggaaaactatctttagatttagcgctactaatgctttgtatgtactatccccttttcacccaatacgccgcgccgcagtgaagattctggtgcattcactgttcaacatgttgataatgtgcacaatcctgacaaattgcgtcttcatggctcagcatgatccgccgccttggaccaagtatgtggagtacaccttcacggcaatttatacgtttgagtccctggttaaaatattagcacgtggattttgccttcatgccttcaccttcctacgagacccctggaattggctcgacttctcagtaatcatcatggcatacacaaccgagtttgttgacctgggtaacgtcagtgccctcaggacatttcgggtgctgagggcacttaaaacaataagtgtgatctccggtcttaagacaatcgtaggagccctgatccagagcgttaaaaagttagccgatgttatggtgcttacagttttctgtctgagcgtgtttgccctgatcggactccagcttttcatgggaaatctcaggcataagtgtgtgaggaactttactgccctgaacggaacaaacggctcagtggaggccgacggcctggtgtgggagtccctggatttgtatctgtccgatcctgaaaactatctcctgaaaaatggaacctcagatgttcttctatgcgggaactcatccgacgcaggtacttgtcctgaaggataccggtgcctaaaggccggggagaatcccgatcacggttatacatcatttgatagctttgcatgggcctttctggcattgttccgcttgatgactcaggattgttgggaaaggctctatcaacagaccctgagaagcgccggtaagatctacatgatcttcttcatgttggtgatattcctaggcagcttttacctggtaaacttaattctcgctgtcgttgccatggcctacgaggaacagaaccaggccacgattgctgagactgaggaaaaagaaaagcggtttcaggaggcgatggagatgcttaagaaagagcatgaggcactgaccatccgaggtgtggataccgtgtcgagatcctcactggaaatgtcaccactggccccagtaaacagccacgagcggcggtcaaagcgtaggaaacggatgagctccgggacagaggaatgcggggaggaccgactccccaaaagtgattccgaggacggtcccagggccatgaaccacctgtcattgacaagaggactctcaaggactagcatgaagccgaggagttcacgggggtctatcttcacatttagacgcagggatctgggttcagaagctgactttgcagacgatgagaattcgaccgccggagagagtgaatcgcatcatacatctctgctcgtcccttggcctctgcgaaggacttctgcacaggggcagccctcgccaggcacgagcgcgcccggtcatgcactgcatggaaagaagaacagcactgtcgactgcaatggcgtggtaagtctgctgggagccggagatccagaggctacaagccctggttctcacctcctgcgtcctgtgatgttggagcatccaccagacaccactactccatcggaagagcctggcggcccgcagatgctcactagccaggctccctgtgtggacggattcgaggagcctggcgcaaggcaacgtgctttgagtgctgtgagcgtgctcaccagcgcccttgaggaacttgaagaatccaggcataagtgcccaccatgctggaatagactggctcaaagatacctgatctgggaatgttgcccgttgtggatgtccataaaacagggcgtgaaacttgtggtgatggatcccttcaccgatttgaccatcaccatgtgcatcgtgttgaataccctgttcatggcgctagagcactacaatatgacatccgagttcgaggagatgctgcaggttggcaatttagtatttaccggcatctttaccgccgaaatgaccttcaagataatagccctggatccctactactattttcagcaggggtggaatattttcgactccatcatcgtgatcttatctttaatggagctcggcttgtctagaatgtctaaccttagcgtgctgaggtcttttcgcctgttgcgggtgttcaagcttgctaagtcttggcctaccctgaacaccttgatcaaaattattggaaattccgtgggggcactcgggaatctgaccctggtgttagcaataatcgtatttatcttcgcagtggtgggcatgcagttatttgggaaaaactactccgagctgagggattcagattctggactgctgccacggtggcacatgatggactttttccatgctttcttgattatcttccgcatactgtgtggggaatggattgagacaatgtgggactgcatggaggttagcggccaaagtctgtgtttactggtcttcctgcttgtcatggtaattggtaatctggtagtgttgaatctgttcttggcactactgctgtcatcatttagcgccgataatttaaccgcccctgatgaggatcgggagatgaacaatttacagctggctctggccaggatacagagagggcttcgatttgttaagcgtaccacatgggatttttgttgtggtctcctgcggcaacgcccccagaaaccagccgccctggccgcgcagggacagctaccatcttgtatcgcgacaccttacagcccgcccccacccgagacagagaaggtgccccccactcgcaaggaaactcgcttcgaggaaggagagcagcctgggcagggaaccccaggcgacccagaacctgtgtgcgttcccatagctgtagctgaaagtgacaccgacgatcaagaggaggatgaggagaactctctcggcaccgaagaggaatcatctaagcaggagagtcagcccgtgtcgggcggaccagaggcacccccggattcccgtacctggtcccaggtctccgcaacagcatcttctgaggcagaagcgagcgccagccaggccgattggaggcagcaatggaaggccgagccacaggcccccggctgtggagaaacgccagaggacagttgttccgaagggtctacagccgacatgacaaacacagccgagcttctagagcagatccccgacctcggtcaggacgtcaaagatcccgaagattgcttcaccgagggttgcgttaggcgctgcccttgctgcgccgtggacacaactcaggctcctggtaaagtgtggtggcgactgagaaagacctgttatcacattgttgagcattcatggtttgaaacattcatcatattcatgatcctgctcagctctggcgctctggcctttgaggacatctacctggaagaacgaaaaacgatcaaggtgctcctggagtatgctgacaagatgtttacttacgtttttgtgctcgaaatgctcctgaaatgggtcgcctatggttttaagaaatactttactaatgcctggtgttggctcgactttctgatcgtggacgtcagcctggtcagcctggtagctaatactctaggcttcgctgagatgggacctattaagtccctgcgaaccctgcgtgcactccggcccctccgcgcgcttagtagattcgaaggaatgcgagtggtggtcaacgcccttgtgggggccattccatcaatcatgaacgttttgttggtgtgcctgatattctggctgattttcagcataatgggcgtgaacctttttgccggtaagttcggcagatgtattaaccagacagaaggtgacctcccactgaactataccattgtcaataataagtcccagtgcgagtcactgaacctcactggcgagttgtattggactaaggtgaaagtcaactttgacaacgttggggccggatatctggctctgctgcaggtcgccacgtttaaaggttggatggatattatgtatgccgccgttgacagtagggggtacgaggaacaaccacagtgggagtataatctttatatgtacatttatttcgtcatttttatcatcttcggatcattcttcaccctgaatctttttatcggcgtgataattgataattttaaccagcagaagaagaagctgggcggacaggacatcttcatgactgaggagcagaaaaagtattacaacgccatgaaaaagcttggctcaaagaaacctcagaagccgattccaaggccgttaaataagtatcaaggctttatctttgacatcgtcaccaagcaggcttttgatgttaccattatgtttctcatatgtctcaacatggtgactatgatggtagaaaccgacgaccagtcgccagagaaaattaacatcttggcgaaaatcaacctgctgttcgttgctatcttcactggtgagtgcatcgtgaagctagctgccctccgacattattactttaccaactcatggaatatctttgatttcgtcgtagtgattttaagtatagtggggacggtcctgagcgatattatccagaagtacttcttcagcccaaccctctttcgagtgatccggcttgcgcgcatcggccggatactgagactgattcgcggcgcgaagggcattagaaccttgctgttcgctctgatgatgagcctgcccgctctgttcaatataggcctactgctcttccttgtgatgttcatttactccatttttggtatggccaactttgcctatgtcaagtgggaggccggaatcgatgatatgttcaacttccagactttcgccaactcaatgctctgtctttttcagatcacgaccagtgccggctgggacggtctcttgagtccaatccttaacactggccccccttactgcgaccctacactgcctaattcgaacgggagccgcggggactgcggctccccggctgtcggcattctctttttcacaacatatatcattatcagtttcctgatagttgttaatatgtacatcgccatcattctggaaaactttagcgtggctacagaggaatcgactgaaccactgtcagaggatgattttgacatgttctatgagatctgggaaaagttcgatccggaggccacccagtttattgaatatagcgtgctcagcgacttcgcggatgctctgagcgaaccccttaggattgcaaagcccaatcagatcagtctcataaacatggaccttccgatggtgtccggggatcggatccactgtatggacattctgttcgcgtttaccaagagggtcctgggagaatccggcgagatggatgccctgaagatacagatggaggaaaaattcatggccgctaatccgagcaaaattagctacgaacccatcactaccacacttcgccggaagcacgaggaagtgtccgcaatggttatccagagggcttttagaaggcacctgctacagcgcagcctcaaacatgcatcattcctcttcagacaacaggccggtagcggtctgagtgaggaggacgcaccagaaagagaggggttaatcgcctatgtaatgtcagagaactttagcaggccactggggccaccatcctctagcagtattagttcaacatccttccccccttcctacgactccgtaaccagagccaccagcgacaaccttcaggtacgtgggtccgactactctcacagtgaggatctggcagatttcccaccttcccctgaccgggaccgcgaatctatcgtgtag

SEQ ID NO: 134717 - DNA, 5889 bp, synthetic construct
  misc_feature 1..5889: note = Description of Artificial Sequence: Synthetic coding sequence
  source 1..5889: mol_type = other DNA
atggctaactttttattgccacgcggcacatcttcctttagaagatttacccgggagtctctagcagcaattgagaagagaatggcggagaagcaggctcggggatccaccaccttgcaagaatcccgggaggggctgcctgaggaagaagccccgcgtccacagttagacttacaggcgagcaagaagttgccagacctgtatggaaatccccctcaagagctgattggggagcctctcgaagatcttgatcccttttatagtacgcagaagaccttcattgtgttgaataaaggaaagacaatcttccggttctcagccaccaacgccctgtacgtgctgtctccgttccaccccattcgcagagcagctgtcaagatcctagtccacagtctctttaacatgctgattatgtgtacgatactcacaaactgcgtcttcatggcccagcatgacccacccccttggaccaaatatgtggagtatacctttactgccatttataccttcgaatccctagttaaaatcttggctcggggcttctgtttacacgccttcacctttcttagagatccatggaattggctggatttttcggtgattatcatggcctacacaactgagtttgtggatttgggaaatgtttcagccctgcgcactttccgggtacttcgggctctcaagacaatatctgtgatcagcggattgaaaacaattgtgggagctctgatccaatcagtcaagaagctggccgacgtgatggtgctgaccgttttctgtttgtccgtgttcgctctcataggactacagctgtttatggggaatcttagacacaaatgcgttaggaatttcacggctttgaacggcacgaacgggagcgtggaagcggatgggcttgtctgggagagcctggacttatacctgtccgatccggagaactatctgctgaagaatggaacgagcgatgtactgttatgcggcaacagttcggatgctggaacctgcccagaggggtataggtgcctcaaagccggagaaaaccccgatcatggatacacttcattcgactcctttgcatgggccttcctggccctatttcggctgatgacacaagattgctgggagcggctgtatcagcagaccctgcggtctgccggcaagatctatatgatcttctttatgttggtgattttcttgggaagcttctacctcgtaaatcttatcctggctgtggtggccatggcatatgaagaacagaatcaggcgactattgccgagaccgaggagaaggagaagcgatttcaggaggccatggaaatgctcaagaaagagcatgaggctctaacaattagaggcgtcgacactgtgtcacggtcctccctcgagatgagccctttggcacccgttaactcacacgaaagacgctctaaaaggcggaagcgaatgtcatcgggaaccgaggaatgcggcgaggatcgcctgccgaagtcagacagcgaagatgggccacgggccatgaaccacttgagcttaacaagagggctgtcgcgcacatccatgaagccgcggtcctctcgtgggagtatttttacgttcaggcggcgcgatctcgggagcgaggctgacttcgcagacgatgaaaactccacggccggagaatccgaaagtcatcacacttcccttctcgtcccgtggcctcttcgtcggacttcagcccagggtcaaccctcccccgggaccagcgctcctggacacgcccttcacggaaagaagaattctacagtcgactgtaatggagtcgtgagtctcctgggcgctggtgatcccgaggccacatccccaggatctcatctgctcaggccagttatgctggagcatccacccgacacgacaacaccttccgaggaacccgggggccctcagatgctgacctcacaggccccatgtgtggacggcttcgaggaacctggtgcccggcagagggccctctccgctgtgtctgtcctgacaagcgcccttgaagagctggaggagtcgagacataaatgcccaccctgctggaaccggttggctcagaggtatctcatatgggagtgttgtccactgtggatgtcaataaagcagggcgttaagctggtagtgatggacccattcaccgaccttaccataacaatgtgcatcgtgcttaatactctgtttatggcgttagagcactataacatgacgagcgaattcgaggagatgttgcaggtcggtaacctggtttttacagggatttttactgcagaaatgacctttaaaattatagccctggatccctattattatttccagcagggatggaatatcttcgattcaatcatagtgatcctgagtttaatggagctgggattgtcccgtatgtccaacctgtccgtgctcagatcttttagattgctgcgagtgttcaagctcgccaagagttggcccactttgaacacactgattaagatcattggaaacagcgttggcgcgttggggaacctgactttggtgctggcaattatcgtgttcatctttgctgtggtggggatgcagctctttggcaaaaattatagtgagttaagagattcagatagcgggctgctaccaaggtggcatatgatggacttctttcatgcatttttaatcatatttaggattctgtgtggtgaatggattgaaacaatgtgggattgtatggaagtgtctggtcaatccctgtgccttttagtcttcctgctggttatggtgattgggaatctggtggtgctcaatctattcttagccctgcttctatcaagctttagcgccgataacctaactgcacccgatgaggatagggaaatgaacaatctgcagctggccctggccaggatacagcgaggcttgagattcgtgaagagaactacttgggacttttgctgtggactgttgaggcaacgcccgcagaagcccgccgctctggctgctcagggccaactcccttcctgcatcgccacgccttactccccacctccacctgagacagagaaagtgccaccaacccgaaaagagacgcggttcgaggaaggcgagcagcctggtcaagggaccccaggggatcctgaaccagtatgcgtgcctattgccgtcgcggaatccgataccgacgaccaggaggaggacgaggaaaatagcttgggcactgaagaggaatcaagtaagcagaccccagaagattcctgttctgaggggtccaccgcagatatgactaataccgccgagttgctcgagcaaattcctgatctcggacaggatgtgaaggatcctgaggattgctttacggaagggtgtgtgcgacgctgcccatgctgtgctgtagatacgactcaggcccctggtaaagtatggtggagattacgcaagacatgttaccatattgtggaacactcctggttcgaaacgtttatcatctttatgattttgctctcatctggagcacttgccttcgaagacatctacctggaagagcgtaaaacgattaaggttcttcttgagtatgccgataaaatgtttacttatgtcttcgtgctcgaaatgcttctgaagtgggtggcttacggattcaagaagtacttcactaacgcttggtgctggttggactttctgatcgtcgacgtcagcctggtgtcactggtggctaatacgctagggtttgccgaaatgggacctattaaatctctgcgaactctgagggcactgaggcccctccgcgcactctcccggttcgaggggatgagagtggtcgtgaatgctctggtaggagcaataccctcgatcatgaacgtcttgcttgtttgcttgatcttctggttgatctttagcatcatgggggttaacctgttcgcaggtaagttcgggcgttgtatcaaccagactgaaggagacctccctttgaactacaccattgttaacaataaatcacagtgcgagtccttgaacctgactggggagctgtactggaccaaagtgaaagtaaattttgacaatgtgggagcaggatacctcgccctgctccaggtcgcgactttcaagggatggatggacattatgtacgccgccgtggactcaagaggatatgaagaacagcctcagtgggagtataatctgtacatgtatatctacttcgtaatttttatcatttttggctctttttttacccttaacctttttatcggggtgatcattgataacttcaatcaacaaaagaaaaagttgggaggacaggacatctttatgactgaagaacagaagaagtactacaacgcaatgaaaaaactgggtagcaaaaagcctcagaagcccattcctagaccattgaataaataccagggattcatttttgatatagtcacaaaacaagcatttgacgtcaccatcatgttcctcatttgtctgaacatggtgacaatgatggtcgagacagacgatcagtctccggagaagatcaacattcttgccaaaatcaaccttctatttgtagccattttcaccggagagtgcattgtgaagctggccgctctgcgacattactacttcacaaacagttggaatatatttgactttgtcgttgtcatcctatctattgttggaactgttctatccgatattattcagaagtactttttttccccaactttgtttcgcgtaatccgcctggctcgtatcggtagaattcttcggctgattagaggggcgaaggggatacggacgctactctttgcgctcatgatgtccttacctgccctctttaacatcggactcctcctgtttctcgtgatgttcatttacagtatcttcggaatggccaattttgcctatgtcaagtgggaggcagggattgacgatatgtttaattttcaaacgtttgccaattcaatgctatgtcttttccagattactacatctgcaggctgggacggccttctatcccctatacttaacactggccctccgtattgcgatccaaccctgcccaacagcaacgggagccggggtgactgtggctcccccgccgtggggatattgtttttcaccacatacatcataatttccttcctgatcgtagtcaatatgtatatcgctataatactcgaaaacttctcagtggccaccgaagagagtaccgagccgctgtccgaggacgacttcgatatgttttacgagatctgggagaaattcgatccggaggcaacgcagtttatcgaatattccgtgctctcagattttgccgatgctctctccgagcccctgaggatcgctaagcccaaccagatcagtttgattaacatggatctcccaatggtgagtggggaccggatccattgcatggacatcctgttcgccttcactaaacgggtgttaggggaatctggggagatggatgcactgaagatacagatggaggagaagtttatggctgccaacccgagcaagatatcctatgaacctattacgaccacattacgccgcaagcacgaagaagtttccgccatggtgatccaaagggctttccgtcggcaccttcttcagagaagtctgaagcacgcttcttttctctttagacagcaggcaggatctggcctcagcgaggaggatgcgccagaaagggagggactgattgcctacgtcatgagtgagaatttctcgcgcccattagggcctcctagctcgagcagcatctcctctacgagctttcctccctcctacgacagtgtcacaagggcgacatctgacaacttgcaggtgcgcggctctgattactctcatagcgaggatctggcagacttcccccctagtcctgatcgcgacagagagtcaatcgtgtag

SEQ ID NO: 134718 - DNA, 5889 bp, synthetic construct
  misc_feature 1..5889: note = Description of Artificial Sequence: Synthetic coding sequence
  source 1..5889: mol_type = other DNA
atggctaacttcctgctaccccggggaacttcaagcttccgccgtttcactcgggaatccctggccgcgatcgagaaacggatggctgaaaagcaagcgcgggggtctactaccctgcaggagtcacgtgaaggtctgccagaggaggaggcccctcgcccccagttggaccttcaagcttctaagaaactgccagacctgtatggcaaccctccccaggaactaatcggcgagcctctggaggatctggaccctttctattcaacacagaagacctttatcgtcttgaacaaaggtaaaaccatttttcgcttcagcgctactaatgccctttatgtcttatccccattccatcctattcgtagagccgccgtgaagattcttgtccactccttgtttaacatgctcatcatgtgcaccattctcacaaactgtgttttcatggcacaacacgaccccccaccttggacgaaatacgtggagtacaccttcactgcgatctatacttttgaatctttggtgaagatactggcccgcgggttttgtctacatgccttcaccttcctaagggacccatggaattggcttgatttttctgtaattataatggcttatgtgtcagagaatatcaagctgggtaatttatctgcacttcggacctttagggtgcttagggcccttaagacgatttcagtaatcccagggttgaaaacaatcgtcggtgctctgattcaatctgttaaaaagctagccgacgttatggtgttgacagtgttttgcctgtcagttttcgccctgatcggcttgcaattgtttatgggaaatttacggcataaatgtgtgaggaattttactgctctgaacggaactaatgggagcgtcgaggcggatgggctcgtgtgggaatctttggacttgtacttgtccgatcctgaaaactacctgctgaaaaacggcacgtctgacgtcttgttatgcggaaattcctctgacgccggaacatgccctgaaggctacagatgtctgaaggccggcgagaatcccgatcacggctatacaagctttgattctttcgcatgggcatttttggcactgttccgtctgatgacacaggactgctgggagcgtttatatcagcagactttacggagcgcagggaaaatttatatgatattctttatgctggtgatcttcctgggcagtttctatttagtaaatctgatccttgctgtggtcgccatggcttacgaggaacaaaaccaggctacaattgcagagactgaggagaaggagaaacgctttcaggaggccatggagatgcttaagaaagagcatgaggcattgactattcgcggagtggacaccgtcagccggtccagtcttgaaatgtctccactggcaccagttaatagccatgagcggcgtagcaagagacgcaagaggatgtcatccggtactgaagagtgcggcgaggaccggctgcccaagtcggattcagaggatggcccccgagctatgaatcatctgtccctgactcgcggcctttcacgcacctctatgaaaccccggtcttcccggggatctatctttacattcagaagaagggacctcgggtccgaagccgatttcgcggatgacgagaactccacggctggcgagagtgagagccaccacacaagcctgctggtaccatggccactgcggcgcacctccgcccaaggccaaccgagcccaggaactagcgctcctggccacgccctgcacggcaagaagaattcaaccgtggattgcaatggcgtcgttagtctcctgggggccggggacccggaggcaaccagtcccggaagccatctcctgagaccagtgatgctggaacaccctccagataccacaactccctcagaagagccaggcggtccgcaaatgttgacctcccaggccccctgtgtggacggatttgaagagccaggcgctagacaacgcgcattgtccgctgtgtccgttctgacctctgccctggaggaattagaggagtccaggcacaagtgtccaccctgctggaaccggctggcacagcgctacctgatatgggaatgctgtcccctgtggatgtcaattaagcagggggttaaactggtcgtgatggacccctttactgacctcactatcacaatgtgtattgtcctaaacacactcttcatggctctggaacactataacatgacctccgagtttgaggaaatgctgcaggtggggaacctggtttttacaggaattttcacggccgaaatgacatttaagattatcgcactcgacccctactattattttcagcagggctggaacatcttcgacagcatcattgtgattctcagcctaatggagttaggccttagcagaatgagcaacctaagcgtgttgcggtcatttcgtttgctacgcgtgtttaagctagccaagagctggcccaccctcaatacacttattaaaatcattggcaatagcgttggcgcgcttggcaacctcactctggtcttagcaatcatcgtctttatctttgcagtggttggcatgcaattgtttgggaaaaattactccgaattacgcgactctgattcaggactgttacccagatggcatatgatggacttctttcatgcattcttgattatcttcagaatcctgtgcggcgagtggatcgagactatgtgggattgcatggaggtgtccgggcagtccctgtgtctgttggtgtttcttttggtgatggtgatcgggaaccttgtagtcttgaaccttttcctcgccctgctgctttccagcttcagcgctgataacttgacagcccctgatgaggacagagaaatgaataacctgcagcttgccctcgcacgcatacagcgcggattaaggttcgttaaacgtacaacttgggacttctgctgtggcctgcttcgccagcggccccagaaacccgcggcactggcagcgcaggggcaactgccttcatgtatcgccaccccatactccccaccgccaccagaaaccgagaaggtcccccctacgaggaaggagactcgattcgaggaaggggaacaacccggtcagggcaccccgggtgatcctgagccagtgtgcgttccgatagctgttgccgagagtgatactgacgaccaagaggaagatgaggaaaattcactaggcaccgaggaggaaagctcaaaacagacccctgaagattcatgctcagagggcagcactgccgatatgaccaacactgcagaactgttggaacaaataccagacctgggacaggatgtcaaggatccagaggactgtttcaccgagggctgcgtcagacgctgtccatgttgtgcagtggatactactcaagctcccgggaaggtgtggtggcgcttgcgcaagacgtgctaccacattgttgagcacagttggtttgagacgttcattatctttatgattctcctgtcttctggggcgctggcttttgaggacatctaccttgaggagcggaaaactattaaggtgttactggagtacgctgataagatgtttacttacgtgttcgtattggaaatgttactgaaatgggtcgcctacgggtttaagaagtattttacaaatgcctggtgttggctcgacttcctaattgtagacgtgtccctcgtctcactggtggcgaacacactgggatttgcggagatgggtccaatcaaatctctcaggacactccgggccctgagacctctgagggctctgagccggttcgagggcatgagggtcgtggtgaatgccctggtcggggccattccctccatcatgaatgttcttctggtgtgcttgattttctggctcatcttctctatcatgggagtgaatctttttgctggcaaattcggcaggtgcattaaccagactgaaggggatttaccattgaactacaccatcgtaaataacaagagccaatgtgagagtttaaacctgacaggggaactatattggactaaggtgaaagtgaactttgataacgttggtgctggctatctggcgctgctccaagttgcaacattcaaggggtggatggacattatgtacgcagctgtcgactcccgcggctacgaggagcaaccccaatgggagtacaacctgtacatgtacatctactttgttatcttcattattttcggtagcttctttacattgaatttatttataggagtgatcatcgataactttaaccagcagaagaagaaattaggtgggcaggatattttcatgaccgaagaacagaagaaatactacaatgcgatgaagaagctgggatctaaaaagccgcagaaacccatcccccgacctctgaacaagtatcagggattcattttcgatatcgtgacaaagcaggccttcgacgtgacaatcatgttccttatctgtcttaacatggttaccatgatggtggaaacagatgatcagtcaccagaaaagattaatatcctggctaagattaatctgttgttcgtggcgatcttcacaggcgagtgcattgttaaactcgccgcactcagacattattacttcactaattcatggaatatctttgactttgtagtggtcattcttagcatcgtgggcacggtgttgtccgatatcatccaaaagtactttttttcacctaccctgttcagagtgatcagattggctagaattgggcgcatcctgagattaatccgcggagcaaagggtatcagaaccttactcttcgcccttatgatgtctctgcctgcactattcaacatcggactgctgctgtttctggtaatgtttatttactcgatatttggcatggccaattttgcatacgtgaagtgggaggcaggcattgatgacatgttcaatttccagacctttgccaatagcatgctgtgtctattccagatcacgacttccgccgggtgggacgggcttctctcgcctatcttgaatactgggcctccgtactgcgaccctaccctgcctaattctaatggttcaaggggcgactgtggatcgcctgctgtggggatactgtttttcaccacgtatatcatcatttcttttctgatcgtggttaatatgtacatcgctatcatcttggaaaactttagcgtggcaaccgaggagtcgaccgaaccattatctgaggatgactttgatatgttctacgaaatctgggagaaatttgacccggaagcaacacagttcatcgagtactccgtgttgagtgatttcgctgatgccctgtctgaacccttaaggattgcaaaacctaatcaaatctccctgatcaacatggacttgcctatggtgtctggagatcgaatacattgcatggatatcttgttcgcgttcaccaagcgagtgctgggtgaaagcggagaaatggacgcactgaagatccaaatggaagaaaaatttatggcagccaacccttcaaagatatcttatgaacccattacaactactttacgccggaaacacgaggaagtgtcagctatggtgattcagcgcgcttttcggcggcatttgttacagcggtcgctgaagcacgcaagcttcctatttcggcagcaggcgggcagtgggctgtctgaagaagatgcgcccgagagagagggactcatcgcctatgttatgagtgagaatttcagcaggcctctgggcccaccctcgtcaagttccataagtagtacgagctttccccctagctacgatagcgttacaagggccacgagcgataacttgcaggtgaggggcagcgattacagccattccgaggacctggccgacttcccacctagtccggacagagatcgagaatctattgtgtag

SEQ ID NO: 134719 - DNA, 5889 bp, synthetic construct
  misc_feature 1..5889: note = Description of Artificial Sequence: Synthetic coding sequence
  source 1..5889: mol_type = other DNA
atggccaatttccttctcccccgtggtactagttccttccgacgcttcacccgggagagtctagccgccatcgaaaaaagaatggcggaaaagcaggctcgcgggtccaccactctgcaggaatcaagggaaggacttcctgaggaagaagccccacgcccacagctggaccttcaggcctctaagaaactgcctgatctatatggcaatccaccccaggagttaattggggaacctctcgaggacctagaccccttctactctacacagaaaaccttcatcgtcctaaataaaggaaaaaccatatttaggttctccgctacgaatgctttatacgttctgtcaccctttcatcccattaggagagctgccgtgaaaatcttggtgcacagcctgtttaatatgttaattatgtgcactatacttacaaattgcgtgttcatggcgcaacacgaccctcccccatggactaaatacgttgagtatactttcaccgccatctataccttcgaaagcttggttaaaatcctcgcaagaggattctgcctccatgcctttaccttcttacgtgacccttggaattggttagactttagtgttatcataatggcgtacgtcagcgaaaatatcaagctgggaaacctttccgcccttcggacctttcgcgtgctgcgcgcgcttaagaccattagcgtgattcctgggttgaagaccatcgtcggagctcttattcagtccgtcaaaaaactggctgacgtgatggtcttaactgtgttctgtcttagtgtgttcgctttgattggactccagttgttcatgggtaacctacgacacaaatgtgtgaggaactttacagctctgaacggtaccaatggaagcgtggaagccgatgggcttgtgtgggaaagcttagatttgtatctgtccgatccagaaaactatctcctgaagaatggtacgtccgacgtccttttatgcggcaactcaagcgatgctggcacctgtccagaaggctaccgctgcctcaaggctggagaaaaccctgaccatggctacactagttttgacagcttcgcctgggcatttctggcactgttccgtttgatgactcaggattgttgggaacgcttgtaccagcagactctgagatccgctgggaagatatacatgatcttcttcatgctcgtgatctttctgggttctttctatctggtgaatttgatcttagcagtggtggctatggcatacgaggagcagaaccaggccaccatcgcggagaccgaggagaaggaaaagcggttccaggaggccatggagatgctgaagaaggagcacgaggcgctgaccataagaggagtggatactgtttcaaggagcagtctagagatgtctccgcttgctcctgtaaattcccatgagagacgaagcaagcggaggaagcggatgtctagcggcactgaggagtgcggcgaggaccggctgccaaaatctgattccgaggatggcccacgtgccatgaaccatctgtccctgacgcggggacttagtcgcacatctatgaagccacggagctctcgcggtagcattttcacattcagaagacgcgaccttggcagtgaggccgacttcgctgacgacgagaattcaacggccggtgaatctgaatctcatcacacttcgttactggtgccatggccacttcgcaggacctctgcacaaggacagccctccccaggcacctcagcgcctggccacgcccttcacggaaagaagaactccaccgtagactgcaatggagtcgtaagccttttgggcgctggagatccggaggcaacgtcaccaggctcgcatttgctccggccagtcatgctcgaacatcctcctgatacaaccacaccttccgaggaacctgggggaccgcaaatgcttacgagtcaggccccctgtgtagatgggttcgaagaaccgggtgcgcgacaaagagccttatcggccgtatctgttctcacctccgcacttgaggaactggaagaatcacggcacaaatgtcctccatgttggaatcgactggcccagagatacttgatctgggagtgctgtcctctgtggatgagtattaaacaaggggttaagttagtggtgatggatccatttaccgatttgactatcacaatgtgtatcgtcctgaatactcttttcatggccctggagcactacaacatgacatctgaattcgaagaaatgttgcaggtaggaaacctggtgtttacaggaatatttactgccgaaatgacctttaaaataattgccttggacccatattattacttccaacagggctggaacatttttgactccatcattgtaattttgagcctgatggagttgggactgtctcggatgtcgaacctgagcgtcctgcggagtttccgcctcctccgggtgttcaaactagcaaaatcctggcctacgctcaatacactgataaaaattatcggcaacagtgttggtgcactggggaatctcaccctggtcctcgccatcatcgtgttcattttcgcagtggtcggcatgcagttattcggaaagaactacagcgaattaagagattctgactcggggcttctcccacggtggcacatgatggatttctttcatgcttttctgatcatctttcgaattctgtgtggcgagtggattgaaacaatgtgggattgcatggaggtgtcaggtcagagtctgtgtctgctggtctttctgttggtgatggttattggcaatttggtagtattgaatttgttccttgctctgctactgtctagttttagcgccgacaatctgacggctcctgacgaggatagggaaatgaataatctgcagttggccctggctcgaatccagcggggcctccgctttgtaaagaggaccacatgggatttttgttgtggactcctgagacaacgacctcaaaaacctgccgcactcgcagctcagggccagctccccagctgcatcgcgaccccttatagcccgcccccgccagagacagagaaagtgcccccaacgcgcaaggaaacccggttcgaagagggcgaacagccgggacaaggcacaccgggcgatccagagcccgtatgtgtgcccatcgccgtggcagagagtgataccgatgatcaggaagaggacgaggagaattccctgggtaccgaagaagagtcctcaaaacaaacgcccgaggactcctgcagtgagggctcaactgcggacatgactaacactgccgagctattggaacagatccccgacctggggcaggacgtgaaggatcctgaagactgcttcaccgagggctgcgtcaggaggtgcccctgttgtgccgtggacacaacgcaggccccaggaaaggtgtggtggcggctgaggaagacctgttatcatatagttgaacattcctggtttgagacatttattatctttatgatcttgctaagctccggagctttagcttttgaggacatttacttagaagagaggaaaacaattaaggtgcttttagagtatgcagacaaaatgtttacgtatgtgtttgtgctggaaatgctgctcaagtgggttgcttacggcttcaaaaagtactttactaacgcttggtgttggttggattttctgatagtggacgtctcccttgtttccttagtcgccaatacactggggtttgccgagatgggccccattaagtctttgaggactcttcgcgctctgcgccctctccgcgcactctctcggttcgaagggatgcgggtagttgtcaatgccctagtgggggccattccctctatcatgaatgtgctgctggtttgtcttatcttctggctgattttctctattatgggcgtgaatctgttcgccggaaagttcggtagatgcattaatcagacagagggagatctgcctttgaactacaccatcgtaaacaataaatcgcaatgtgagtctctgaacctgacaggcgagctctactggacaaaggtcaaagtgaacttcgataatgtgggtgcagggtatcttgcactcctccaggtagccaccttcaaaggatggatggatattatgtatgcggccgtcgattcaagaggttacgaggagcagccccagtgggaatacaacctgtacatgtacatatacttcgttatttttatcattttcggaagcttttttactctaaacctgtttattggtgtgattattgacaattttaatcagcagaagaaaaaactgggcggccaagacatattcatgactgaggagcaaaaaaaatactacaacgccatgaaaaaactaggtagcaagaagccacagaaacccattccaaggcccttgaataagtatcaggggttcatctttgacattgtgaccaagcaagcctttgacgtgaccatcatgtttctcatatgcctcaacatggtcacaatgatggtggagactgatgatcagtcaccagagaagattaacatcctggccaagattaacctccttttcgtggccattttcactggcgagtgcatcgtcaaactggctgcgctcaggcactattactttaccaactcatggaacatcttcgatttcgtagtcgttattctgtctattgtcggcactgttctttctgacataatacagaagtattttttctctcccaccctttttcgggtgatccgcttggcgagaatcgggcgcatcctcaggcttattaggggggccaagggaatcagaacactgctgttcgcgctcatgatgagtcttcccgcattgtttaacatcgggttactactgttcttggttatgttcatttattctatctttggtatggccaatttcgcgtatgtgaaatgggaggccggcatagacgacatgttcaactttcagacctttgccaatagtatgctgtgtctatttcagataaccacaagtgcggggtgggatgggttactgtcaccaatattgaataccggcccaccctactgcgaccctactctacctaattctaacggatccagaggagattgcggttccccagcagtgggcattctgtttttcacaacctatatcattatatcattcttaatagtggtcaacatgtacatcgctatcatcctggaaaacttctctgtggcaacggaggagagtactgagcctctgagcgaagacgatttcgacatgttctatgagatctgggaaaagttcgaccccgaagccacccagtttatcgaatattccgtgctttcagatttcgctgacgccctgtctgaaccactgcgaatcgccaagccaaatcaaatttcccttattaacatggacctgcccatggtttcgggggataggattcattgtatggatattttattcgcctttaccaaacgagttctgggagaatccggtgagatggacgccctgaagattcagatggaggaaaagttcatggctgctaacccttcgaaaatttcttatgaacccataaccacgaccttgcgccggaaacatgaagaagtgagtgctatggtgatccaacgcgccttcagaaggcatctgctccagagaagtctgaaacacgcaagcttcctgttcagacagcaagccggttccggcttgagcgaggaggatgcaccagagcgcgagggtctgatcgcttatgtgatgtccgagaatttttcaagaccgcttggaccaccttcaagcagttccatcagctccaccagcttccccccatcttatgatagtgtgacacgcgccacctccgacaacctgcaagtgagaggaagtgactactctcactctgaagacctggcggacttcccacctagtcctgaccgcgacagggagagcatagtgtag

SEQ ID NO: 134720 - DNA, 5952 bp, synthetic construct
  misc_feature 1..5952: note = Description of Artificial Sequence: Synthetic coding sequence
  source 1..5952: mol_type = other DNA
atggcaaattttctgcttcccagaggtacctcctctttcagaaggtttactcgggaaagcctggccgctatcgaaaaaaggatggccgaaaaacaggcccgtggatccaccaccttacaggagtcacgggaaggtttgcctgaagaagaagcgccacggccgcagctggatttgcaggccagtaaaaagctccctgacttatacggtaatccccctcaagaattgatcggagaacccctggaggacttagaccctttctacagcacccagaaaacattcattgtcttgaacaagggtaagactatcttccggttttccgctacgaatgccctgtacgtgctaagcccttttcatcccatccggagggcggccgtcaaaattctggtgcactccctgtttaacatgctgatcatgtgtactatcttgactaactgcgtctttatggcccagcatgatccccccccctggaccaaatacgtcgagtataccttcacagcgatttacacgtttgagtcactagtcaaaatcctcgctaggggtttctgcctacacgcttttacctttctcagagatccatggaactggctagacttttccgtgatcatcatggcgtacgtcagtgagaatataaagctcggcaatttatcagctctcagaacgttcagagtcttgagggccttgaagacgattagcgtgattcccggacttaaaacaatagtcggagcccttattcagagcgtcaagaagctcgccgacgtaatggtcctgactgtgttttgtctcagcgtgttcgccctgatcggattgcagttgttcatggggaatttaagacacaaatgtgttagaaacttcacagctctaaatgggaccaatggatcggtcgaggccgatggactcgtgtgggaatctttagacctgtacctctccgatcccgagaactatctgctaaaaaacgggacgagcgacgtcctcctttgcgggaacagtagcgatgccggtacatgccctgagggatatcgatgtctcaaagccggcgagaatcccgatcacggttacaccagtttcgattccttcgcttgggcgttcctcgccttattcaggctgatgacccaagattgctgggagagactctaccagcagaccttgcgatccgccgggaaaatctacatgattttcttcatgttggttatatttctgggctctttctacctcgtgaacttaattttggccgttgtcgccatggcctacgaggaacagaatcaggctaccatcgcagagacggaagagaaagagaagcggttccaggaagcaatggagatgctcaaaaaagagcatgaagccctgacaatcagaggcgtggatacagtatctcggtcatctttagaaatgagtcctttagccccggtaaacagccacgagcgcaggagcaaacgtaggaaaagaatgtcaagtggaacagaggagtgcggtgaggacaggctgccaaagagcgactctgaggacggtccccgtgcaatgaaccacttgagtctcacccgagggctgagtaggacttctatgaagcccagatcctcgcgaggttccatttttactttcaggcggcgagacctggggtccgaggccgacttcgccgatgatgaaaactcaacagcgggtgagagtgaaagtcatcacacctccctgcttgtaccttggccactcaggaggacctctgctcaggggcagcccagcccaggtacctctgccccaggccacgcccttcacggcaagaaaaattcaaccgtagactgcaatggtgtggtgtctctgctgggggccggtgatcctgaggctaccagcccggggtcccatctgttgaggccagtaatgttagaacatccacccgacactacaacacccagcgaggagcccggcggtcctcaaatgctcaccagccaggcaccttgcgtggatggtttcgaggagccgggggcaagacagcgggctctgagcgctgtgagcgtgctcaccagcgcactggaggagttagaagaaagtcggcacaaatgtcctccttgttggaatagattagctcagagatacctgatatgggaatgctgtcctctgtggatgtctatcaagcaaggagtaaagctcgttgtgatggacccattcacagatttgacaataacaatgtgcattgtgctgaatacactatttatggccctggaacattacaatatgacttccgaatttgaagagatgctgcaggtcgggaatctggtttttaccggaatcttcacagccgaaatgacctttaagattattgcccttgacccgtattactatttccagcaggggtggaatatttttgatagcattattgtaattttatccctgatggagctcggcctttcccggatgtctaatctctccgtgctgcggtcctttcggctacttcgcgtctttaagctcgccaaatcatggccaacgctgaacaccctgattaaaatcatcggaaacagtgtgggagccctgggaaatctgacactggtgctggccattattgtcttcatctttgcggttgttggcatgcaactgttcgggaaaaactacagcgaacttcgcgactccgacagcggcctgttgccacgctggcatatgatggattttttccacgccttcctgattatttttagaattctgtgcggggaatggatcgaaacgatgtgggattgcatggaggttagcggccagagcttatgccttctggttttcttgctggtgatggttatcggtaacctggtggtgcttaatttgtttctcgccttgttgctgtccagcttttccgcagacaatctgaccgcacctgacgaggatagggaaatgaataatctccagttagcactggctcgtatacagcggggacttaggttcgtgaagcggacgacatgggatttctgctgcgggctgctgaggcagcggccgcagaaacctgcggccctggctgctcagggacagcttccaagctgtattgccactccttattcccccccacctccagaaacggaaaaggtgccccctacgcgcaaggaaactcggttcgaagaaggcgagcagccgggacaagggaccccaggagaccccgagccagtatgcgttcctatcgcagtcgctgagtccgataccgatgaccaggaggaggatgaggaaaattccctgggtactgaggaggagagcagcaagcaagagtcccagcctgtgagcggaggccctgaggccccacctgattctaggacgtggtcacaggtcagcgctacagccagctctgaggcagaagccagcgcaagccaagcagattggcggcaacagtggaaagctgagccccaggcccccgggtgcggcgagacccccgaagattcttgtagtgagggatcaacagccgatatgaccaataccgctgagctgctcgaacagattccggacctggggcaggacgtgaaggatccagaagattgcttcaccgagggatgcgtgcgaaggtgcccgtgctgtgcggtagatacaacccaggcaccaggcaaggtctggtggagactacgtaaaacatgctatcatatagtggaacactcttggtttgagacttttattatttttatgattctccttagcagcggcgccctggccttcgaggatatctacctagaggagagaaagactatcaaagtgttgctggaatacgccgacaagatgttcacctacgtgtttgttctggaaatgctgcttaagtgggtggcttatggatttaagaagtatttcaccaatgcatggtgttggcttgactttctgatcgttgatgtcagtctcgtgtctttggtggcaaatacattgggctttgcagagatgggacccattaagtcccttcgcacgctacgcgcattgcggcctcttcgtgcactgtcacgttttgaaggtatgcgggtggtggtgaacgccctggttggagccattccaagcatcatgaacgtgctgctggtctgcttaattttctggctgatcttttccattatgggagttaacttatttgccggcaaatttggtcgctgcataaatcaaactgagggcgaccttcctcttaattatacaatcgttaataacaaatctcaatgtgaatctctcaatctgactggtgaactgtattggacaaaggtcaaagtgaattttgacaacgtgggagccgggtatctcgccctgttgcaggtcgccaccttcaaaggatggatggatattatgtatgcggccgtggattcacgagggtacgaggagcagccgcagtgggaatacaacttgtatatgtacatttactttgtgattttcatcattttcggatctttcttcactctgaacctgtttatcggcgtgataatcgacaacttcaaccagcaaaagaagaagctggggggccaggacatttttatgaccgaagagcaaaaaaagtattacaacgccatgaagaagttgggaagcaaaaagccacagaaaccaatcccaagacccctgaataagtatcaaggctttatctttgacattgtgaccaagcaagcctttgacgtgaccattatgtttttgatctgtttgaatatggtgaccatgatggtggagactgacgaccagtcacctgagaagatcaacattctggcaaaaataaatcttctgttcgttgccattttcacaggaaccgtgttatctgacattatccagaaatacttctttagcccaactttatttcgagtcattcggctggctagaattgggcgaatcctccgcctcattcgaggggcaaagggtatcaggacccttttgttcgccctaatgatgtcactacccgcactttttaacattggacttctgctgttcctcgttatgttcatttatagtatattcggtatggctaactttgcctacgtaaaatgggaggctggaatcgacgatatgttcaactttcagaccttcgcaaattctatgctatgcttattccagattaccacctccgcgggctgggacgggctcctgtcccccatcctcaacacaggtccgccctactgtgatcctacactcccgaattcaaatgggagccgtggcgactgtggctcaccagctgttgggatcctgttcttcaccacctacatcatcatctcatttctaatcgtggtgaacatgtatattgccattatactcgaaaacttctcagtggccaccgaggaaagcacagagcctctgagtgaggacgattttgatatgttctatgagatttgggagaaattcgatcctgaggcaactcaatttatcgagtacagtgtgctctcagacttcgccgacgctctcagcgagcctcttaggattgccaaaccaaaccagatttccctcattaacatggatctccctatggttagtggggatcgcatacattgcatggacattctgtttgcctttactaagcgggttctaggcgagtcaggggagatggatgctctgaagatccagatggaggagaaattcatggctgctaatccaagcaaaatctcatatgagcccattactaccaccctccggagaaagcatgaggaggtttcagctatggtcatccaacgcgcattccggcggcacttgctgcagcggtctttgaagcacgcaagcttcctgttccggcagcaagccgggtctggcctgagcgaggaggacgcgccagaacgagagggccttattgcgtatgtgatgagtgaaaacttttctcgaccattgggaccgccatcaagcagttccatcagctctaccagcttccctcccagttacgacagcgtgacacgggccacaagcgacaatctacaggtgagggggagcgactattctcattccgaggacctggccgatttccccccgtcaccggatagagaccgagaatcgatcgtatag

SEQ ID NO: 134721 - DNA, 5049 bp, synthetic construct
  misc_feature 1..5049: note = Description of Artificial Sequence: Synthetic coding sequence
  source 1..5049: mol_type = other DNA
atgttggcttcgcctgagccaaaaggcctcgtgccttttacaaaggaatcctttgagctgataaaacaacacatagctaagacacacaatgaagaccacgaagaggaggatctgaaacctacaccggacctagaggtgggcaaaaaactgccattcatctacggtaacctgtcccaggggatggtcagcgaacccctcgaggacgtcgacccttattattacaagaagaagaatactttcatcgtcctgaataaaaatcgaaccatctttcgctttaatgccgccagcatactatgcacactcagtccgttcaattgcatccggcggaccaccatcaaggtgttagtgcatcctttcttccaattgttcatactgatttctgtcctgatcgactgtgtctttatgtccctgacaaatctccccaagtggcggccggtgttggaaaacactctgttgggcatatataccttcgaaattctggtgaaactgttcgcgcgaggagtgtgggctggatcgtttagcttcttgggcgatccatggaattggctggatttttcggtcaccgtcttcgaggttattatcaggtactcccctctggatttcatcccaacactgcagaccgcaaggacactcaggattttaaaaataatccccctaaatcaaggcctcaagtcactggtgggggtactgattcattgtctgaaacagctgattggagtgattatcctcactctctttttcctgtcgatttttagcctgatcggaatggggctgtttatgggcaatctcaagcataaatgttttcgatggcctcaggagaatgagaacgaaactctgcataatcgaaccggtaacccctactatatacgcgagacggaaaatttctattatctggaaggcgagagatatgcccttctctgtggaaacaggactgacgccggtcaatgtccagaggggtatgtgtgcgtgaaagcgggtataaatccggatcaagggtttacaaacttcgacagtttcggctgggccttatttgcactctttcgcctgatggcgcaggattatccagaagtgctctatcaccagatactgtatgcaagtggaaaggtgtatatgattttcttcgtcgtagtttccttcttgttctctttttatatggctagcttgtttttggggatcctggctatggcttacgaggaagaaaaacagagagtgggcgagatttccaaaaaaattgaaccaaagtttcagcagacaggtaaagaactccaggaggggaacgaaactgacgaagctaagactatccagattgagatgaagaaacgatctcctatctcgaccgacacttccctcgacgtgctggaagatgctacgctgaggcacaaagaggagctcgagaaatcaaaaaaaatatgccccctttactggtacaaattcgccaagaccttcctaatctggaactgtagcccctgttggcttaagctcaaggagtttgtgcaccgtatcataatggcccctttcacggatctgttcctaatcatttgcatcatcctgaacgtctgcttcctcaccctcgaacattaccccatgagcaagcagacaaataccctgctgaacattggcaacctagtgtttatcggtatattcacggcggagatgatttttaaaataatagctatgcatccttatggctactttcaggtgggctggaacattttcgattctatgatcgtgttccacgggcttatcgaactttgtctggctaatgtggcgggcatggctctgctgaggctcttccggatgctgaggatttttaaattgggcaagtactggcccacattccagatcctgatgtggagcttaagtaatagctgggtcgctctgaaggatttggtcctgctgcttttcacctttatctttttcagtgctgcttttggcatgaagctgtttggcaagaattatgaggagttcgtctgccatatcgacaaagattgccagctcccccggtggcacatgcatgatttctttcattccttcctgaacgtgtttagaatactatgcggtgaatgggtcgaaacactctgggattgcatggaagtagcggggcaaagttggtgcatccccttctacttgatggtcatcttaattgggaacctactggtactttaccttttcctggccctggtatctagctttagttcttgcaaggacgtcactgctgaggaaaataacgaggccaagaatctgcagctagcggtggctcggatcaagaagggtatcaactatgtcctgctgaagatcctgtgtaagacacagaacgttccaaaagacactatggaccatgtcaacgaggtgtatgtgaaggaggatatttccgaccacacactgtctgagctttcaaatacacaggacttccttaaagataaggagaagtctagcgggactgagaaaaacgctactgaaaatgagtcacagagcttgatcccatccccctcagtgtccgagactgtccccattgccagcggagagagcgatattgagaacttggacaataaagagattcagtcgaaatcaggagatggcggctctaaggagaaaatcaagcagtcatcctcatcagaatgtagtaccgtagacatcgctattagtgaggaagaggagatgttctatggcggagagcggtctaagcacctaaagaacgggtgccgtagaggcagcagcctgggacagatttcaggagcatccaaaaagggcaaaatctggcagaacattagaaagacctgctgcaagatcgtggaaaacaactggttcaaatgcttcattgggctggtcacactcctgagcaccggaactctggcttttgaagacatctatatggaccaacggaagaccatcaaaatcctcttggagtacgcggacatgatatttacctatattttcatattggaaatgctattgaagtggatggcgtatggcttcaaagcctacttctccaacggatggtatcgactggactttgtggtggttatcgtcttttgccttagcctcatcgggaagaccagagaggaactgaaaccactgatttcgatgaagttcctgcgaccgctccgggtactgagtcagttcgaacggatgaaggtggtggtcagggccctcatcaaaacaactctcccaaccctcaacgtgtttttggtttgtctaatgatttggcttatattctcaataatgggcgtcgatttgttcgccggccggttttacgagtgcatcgatcccactagtggcgaacgcttccctagctcggaggtgatgaataaatcccgctgcgagtccctgctcttcaatgagagtatgctgtgggagaatgctaaaatgaactttgataacgtcggcaacggcttcctctctctactgcaagtggccacattcaatgggtggatcacgatcatgaacagtgcaatagatagcgttgcggtgaatattcagcctcacttcgaagtgaatatttacatgtattgttatttcatcaatttcatcatcttcggcgtctttctccccttatcgatgttgatcaccgttatcattgacaacttcaataaacacaagattaagctgggcgggtcgaatatttttatcacagtcaagcagcgcaaacagtatcgcagactgaagaagctcatgtatgaagattctcaacggccagtgccaagaccacttaacaagcttcagggatttatcttcgacgtagtgacctctcaggcctttaacgtgatcgtgatggtcctaatctgttttcaggccattgcgatgatgatcgataccgacgtgcagagtctgcagatgagcatagcactgtattggattaattccatcttcgtcatgctctataccatggaatgcatattgaagctgatcgccttccgctgcttttattttaccatcgcttggaacatctttgactttatggtggtgatcttttcaatcacaggtctctgcctaccaatgactgttggatcatatctggtgcccccatctctggtgcagctgatcttgctgtctagaattatacacatgctgaggttgggaaaaggcccgaaagtgtttcacaacctcatgcttcccttgatgctttctctgccagctctacttaacatcatcctgctgatattcctcgttatgtttatctacgctgtgtttgggatgtacaatttcgcgtatgtgaagaaagaagcaggaattaatgatgtaagcaattttgagacattcggcaattccatgttgtgtttgtttcaggtcgctatttttgctggatgggatggaatgctggacgcaattttcaactcaaaatggtcagattgcgaccctgacaaaattaacccgggtacacaggtccggggagactgcggcaatccttcggtgggaatattctatttcgtctcatacatactcatttcttggcttatcatcgtaaacatgtatattgtcgtggtgatggagttcctgaacatcgcctccaaaaagaaaaataagaccctttctgaagatgacttcagaaagtttttccaagtgtggaagcggttcgacccggacaggacccagtacatagacagctctaagctctccgactttgcagccgcactcgacccacctctgttcatggccaaaccgaataaaggccagcttatcgccctggacctgccaatggcagtgggggaccgcattcattgcctggatattctcttagctttcaccaagcgcgtgatgggccaggatgtcaggatggaaaaggtggtctccgagatcgaatcgggcttcctgctagcaaacccattcaaaatcacctgcgagccgattactaccactctcaaacggaagcaggaggccgtctcggccactataatacaaagagcctataagaactacaggctgagacgcaatgacaaaaacacttctgatatacatatgatcgatggggaccgggatgtgcacgctacaaaggagggagcctactttgacaaggctaaggaaaaatcccctatacaatctcagatctag

SEQ ID NO: 134722 - DNA, 5049 bp, synthetic construct
  misc_feature 1..5049: note = Description of Artificial Sequence: Synthetic coding sequence
  source 1..5049: mol_type = other DNA
atgctggccagccctgaaccaaaaggactagttccttttaccaaggaaagcttcgaattgatcaagcagcacattgccaaaactcataatgaagaccacgaagaggaggatctgaagcctaccccagatctcgaggtcgggaagaaactgcctttcatctatggaaacctgtcccaggggatggtaagtgagccgttagaagatgtagacccatattactacaaaaagaagaacacgttcatagtgctgaataagaatcgaacaatttttagatttaatgctgctagtatcctgtgcacattgtccccatttaactgtattagacggacaactatcaaagtcctcgtccaccctttctttcaactgttcattctcatctccgttctaattgactgtgtattcatgagtttaacaaatctccctaagtggaggccagtccttgagaacaccctcctcggtatctatacctttgaaatcctcgttaaactgttcgctcgaggtgtttgggcagggagctttagtttcctcggcgatccctggaactggctcgatttctcagtgactgtgtttgaggtgataattcgctactctcctctagattttatacccaccctgcagacagcgcgtacactgcgcatcctcaagatcattccattgaatcaggggctgaaaagtctggtgggggtgctaatacattgtttgaagcagcttattggggtgataatactaacactgtttttcctttctatttttagcctcattggcatggggttatttatgggaaatctcaaacacaaatgctttagatggccccaggaaaacgagaacgaaactctgcacaatcggactggcaatccttactatatacgcgagacagaaaatttttactacctggaaggagagcggtacgcactgctgtgcggaaatagaaccgacgcaggacagtgtcctgagggttacgtctgtgtgaaagccggaattaaccccgatcaggggtttactaattttgactcatttggttgggccctctttgccctgttccggctgatggcccaggactaccccgaagttctgtatcaccagatactatacgcgtcaggcaaagtgtatatgattttctttgtggtcgtgtccttcctcttctccttctatatggcttccctgtttctcggcatcctggccatggcctacgaggaggagaagcagcgagttggagaaatcagcaagaaaattgaacccaagttccagcagaccggcaaagaactgcaggaggggaatgagaccgatgaagccaaaactatccaaattgagatgaaaaagcggtccccaatttcaacagacacctcactcgacgttctggaagatgccaccttgcggcacaaggaggaacttgaaaaatctaaaaagatctgtcccctttattggtacaagtttgctaagacatttttgatctggaactgtagcccgtgttggttgaaactgaaggaatttgtccaccgtattataatggctcccttcactgacctgtttcttattatctgcataatccttaatgtttgcttcctcaccttagaacattatccaatgagtaaacagactaataccctgctgaatataggaaatctcgtgttcataggaatattcaccgctgaaatgatctttaagatcatcgcaatgcacccctacggttatttccaggtcgggtggaacattttcgatagtatgattgtgtttcacggcctgatcgagctgtgccttgccaacgtagctgggatggcactgctgcggctgttccgtatgcttagaattttcaagcttggcaaatactggccaacattccagattcttatgtggagcctctctaacagctgggtggcattgaaagatttggtcttgcttctgtttacgttcatatttttcagcgctgcgtttggcatgaagctcttcggcaaaaactacgaggagtttgtgtgtcatattgacaaggactgtcagttaccacgctggcacatgcacgatttttttcattctttcttaaacgtatttcgtatcctgtgtggcgaatgggtggagaccctttgggattgtatggaagttgccggacaatcgtggtgcattcccttttatcttatggtcatcctcattggcaacttgctcgtcctgtacctcttcctggctctcgtatcgtcattttcatcatgcaaggatgtaacagctgaagagaacaacgaagctaaaaacctgcagttggccgtggcacgtataaagaagggcatcaattatgtcttactgaagatcctctgcaagacccaaaacgtgcccaaggataccatggatcacgtcaatgaggtttacgtgaaggaggatattagcgaccacactctctccgagctgtccaacacccaagatttcttgaaggataaggagaagtcctcaggcaccgaaaagaacgcaaccgaaaacgagtcgcagagcctcatcccatcgccctctgtatccgagacggtccctattgcctctggcgaatctgatatagaaaacctcgacaacaaggagatacagagcaaaagcggtgacgggggttccaaagagaaaattaaacagtcgagttcctctgaatgtagtacggtcgacatagccattagcgaggaagaggagatgttctatggtggagagcgctcaaagcatttaaaaaatggctgtagaagaggatcaagcctgggacagatctccggcgcctccaaaaagggtaaaatctggcaaaatatcaggaaaacctgctgcaaaatagtcgagaataattggtttaaatgctttatagggttggtgaccctgctgtctaccggcacactggcattcgaggatatctacatggaccagaggaaaactatcaaaatcctcctggagtatgccgacatgattttcacttacatcttcattctggagatgctgttgaagtggatggcttacggttttaaggcatatttctccaacggttggtataggctcgacttcgttgttgtgatcgtcttttgcctcagcctcatcgggaagaccagggaggaattgaaaccccttatatctatgaaatttctgcggccactgagagtcctgagccagttcgagcggatgaaggtagtggtgcgcgctcttataaagacgacgctccctaccctgaacgttttcctcgtgtgcttgatgatttggctgatctttagcataatgggcgtcgatctgtttgctggtcgattctatgagtgcatagacccaacgtctggtgagcggttccccagcagcgaggtaatgaacaaatcacgctgtgaatcactcctttttaatgaatccatgctgtgggagaatgccaaaatgaattttgataacgtcggtaacggcttcctaagccttctgcaggtggccactttcaatggatggatcaccattatgaattcagcgattgactcagtcgctgtgaacattcagcctcattttgaagtgaacatctacatgtactgttattttattaactttatcatattcggcgtgtttttaccattgagcatgttgatcaccgtcattatcgataacttcaacaagcacaagatcaagctgggcgggagcaacatctttataaccgtaaaacaacgaaagcagtacaggaggttaaaaaaactcatgtatgaggatagccagcggcctgtgcctcgtccactcaataagttgcaggggttcatttttgatgtggtgacaagtcaagcttttaacgttatagttatggttttaatttgttttcaggccatagccatgatgatcgatacagatgtgcaatctttacagatgtccattgccttgtattggataaactctatctttgtcatgctgtataccatggagtgtatccttaaactaatcgcttttcgctgcttttatttcacaattgcctggaatatttttgattttatggttgtgatatttagtatcaccggactgtgcctgcctatgactgtgggttcatatcttgtgcctccatccctggtccaactcatccttctatcgcgcatcatccatatgttgcgacttggtaaagggcccaaggttttccataacctgatgctgcccctcatgctctctctccccgccttactaaatatcatcttgttaatcttcttggtgatgttcatttatgctgtgtttggcatgtacaactttgcttatgtgaaaaaggaagccgggattaacgatgtaagtaattttgaaacctttggcaactcaatgctgtgcctgtttcaggtggccatctttgccggatgggatggtatgctcgacgctatcttcaactccaaatggagcgactgcgatcccgacaagatcaatcctggcacacaggtcagaggcgactgtggtaatccctccgtggggatcttctattttgtgagttacattctgatttcatggcttataattgtgaatatgtacattgtggtcgtgatggagttcttgaacatcgcttccaaaaaaaagaacaagacacttagtgaagatgatttccgaaaatttttccaggtgtggaagcgcttcgatcctgataggacacagtatattgattccagcaagctgtccgattttgctgccgcgctcgatccccctttgttcatggcgaaaccaaataaggggcagctgattgccctcgacttacccatggcggtgggcgaccggatccactgccttgatatcctgctggcatttaccaagcgagttatgggccaagatgttcggatggaaaaagtggtgtcagaaatcgaatccggattcctcctcgctaacccatttaagatcacttgtgaacccataaccacaaccttaaaaagaaagcaggaggccgtgagcgctacaatcatccagcgtgcgtacaagaactataggcttcgcagaaacgataagaatacctcagatatacacatgatcgatggggatagagatgttcacgccactaaggagggggcctatttcgataaagcaaaagaaaaatctcctattcaatcacagatctag

SEQ ID NO: 134723 - DNA, 2592 bp, synthetic construct
  misc_feature 1..2592: note = Description of Artificial Sequence: Synthetic coding sequence
  source 1..2592: mol_type = other DNA
atgttagccagcccggagccgaaaggcctggtcccctttaccaaggagtcgtttgaactaatcaaacaacatatcgccaagacacacaatgaagaccatgaggaagaggacctcaagccgaccccagaccttgaggtggggaaaaaattaccctttatttatgggaacctctcacagggcatggtgagtgagcctttagaggatgttgacccctattattataaaaagaaaaacactttcattgtgttaaacaagaacaggactatatttcggttcaatgccgcgtctatcctatgtaccctctcgccattcaattgcattcgccgcaccacaatcaaagtgcttgtgcatcccttttttcagcttttcatcctgattagcgttctgatcgattgtgtttttatgtccctgactaacctgccaaagtggcggcctgtgttagagaataccctgctcgggatctacaccttcgagatcctggtcaagttgtttgcgaggggggtatgggccggctcctttagttttctgggcgatccttggaactggctcgactttagcgtgaccgtgtttgaggtgataataagatattccccccttgatttcattcctactctgcagacggctcgcacactaagaatcttgaaaatcattcctttgaaccaggggctcaagagtctagtaggcgtgctgatccattgcctcaagcagttgatcggcgtgatcatcctcacgttgttcttcctgagtattttttcccttataggcatgggtctctttatggggaacctgaaacataagtgtttcagatggcctcaggagaatgaaaatgaaactctgcataacagaactggcaacccctactatattagagaaaccgagaacttctattacctggagggagaaagatacgccctgctctgcggcaacaggactgatgccggccagtgccccgagggctacgtctgcgtgaaggcggggataaacccagatcagggatttaccaattttgacagtttcggttgggcactatttgctctgtttcgccttatggctcaggattatcctgaggtactgtatcaccaaatcctttatgccagcggcaaggtctatatgattttctttgtggtcgtatcgttcctcttctctttttacatggcttctctgttcctggggattctcgcaatggcctatgaggaagaaaaacagcgcgtcggcgagattagcaaaaaaatagagcctaaattccaacagaccggtaaagagctccaagaaggtaatgagactgatgaggccaagactatccagattgaaatgaaaaagcgttcacctatatccacagacacttctcttgacgtgttggaggacgctaccctcagacacaaggaggagttggaaaagagcaagaagatttgtcccctgtattggtataagtttgctaaaacttttttgatctggaattgctctccgtgttggctgaagttgaaagaatttgttcaccgcataatcatggcaccgtttacagatctctttctgattatctgtattattctgaacgtgtgcttcttgaccttagaacactaccctatgtcaaagcagaccaacaccttgctgaacattggcaatttggtttttatcggcatctttactgctgagatgatatttaagataatcgctatgcatccctatggatatttccaggtggggtggaacatattcgattcgatgatcgtgttccacggcctgatcgaactctgtctagccaacgtggccggcatggctctgctcaggttatttcgcatgctccggatttttaaactgggcaagtactggcccacatttcagattttgatgtggtctctatccaactcatgggtagctctgaaagatctcgtgctgctgctgtttacgttcatatttttcagcgctgcctttggaatgaagttattcgggaaaaattacgaggagttcgtttgtcacatagacaaagattgtcaactccctcgatggcatatgcatgacttctttcatagtttcctcaacgtatttaggattctttgtggggagtgggttgaaaccctttgggattgtatggaggtagcaggtcagtcctggtgtatccctttttacctgatggttatcctgatcggcaacctactggtattgtacctcttcctcgcacttgtttcctccttctcctcctgtaaagacgtgactgccgaggagaacaatgaggccaaaaatctccaattggcagtggccagaatcaagaagggcatcaattatgtgctcctgaaaatcttgtgcaaaacacaaaacgtcccaaaagatacgatggaccacgtcaatgaagtgtacgtgaaggaagacatctctgaccacacacttagtgaactgtctaacacccaggactttctgaaagacaaagaaaaatcatcaggaactgaaaaaaacgcgactgagaacgagtcacagtccttaataccgagcccgagtgttagtgaaacagtgcctattgccagcggagaaagtgacattgaaaatttggacaacaaggaaattcagtcaaagtcgggcgacggcggttccaagtag

SEQ ID NO: 134724 - DNA, 1209 bp, synthetic construct
  misc_feature 1..1209: note = Description of Artificial Sequence: Synthetic coding sequence
  source 1..1209: mol_type = other DNA
atgctagcctcaccggaacccaaaggactggtgccttttaccaaagagtcttttgagttgatcaaacagcatattgccaaaactcacaatgaggaccacgaagaggaggacctgaagcccacgcccgacttggaggtgggaaaaaaactgccctttatttacggcaacttatcccaaggaatggtaagcgaacccctggaggatgtggatccatattactataaaaagaaaaataccttcattgtactcaataaaaacaggaccatcttccggtttaacgccgcctcgattctgtgtacactttctccatttaactgtatcaggagaacgacgattaaggtcctggtgcatccattcttccagctctttatccttatcagtgtgcttattgactgcgtgtttatgagcctcaccaacctccccaagtggagacctgttctggaaaatactctgctgggcatctacacctttgagatactggtgaagctgttcgctagaggcgtgtgggccgggagcttctcctttctgggcgatccatggaactggctcgattttagtgttacagtgtttgaagtgatcatacggtatagccctctggactttatccctacactgcaaacagcgcgcactctcagaatcctgaagatcattcctcttaatcaaggcctcaagagcctcgtcggtgtgctcattcactgtctaaaacagctgattggagtaatcattcttactttgttcttcctgtctatctttagcctgattgggatgggtctcttcatgggcaatctgaaacacaaatgctttagatggcctcaggagaacgaaaacgagacactccacaacaggactgggaacccgtattacatcagggagaccgaaaacttctactatctggaaggggagcgatatgctctcctgtgcggtaacaggacagatgcgggacagtgccctgaaggttacgtgtgtgtgaaagccggtattaaccctgatcaggggttcacaaatttcgactcgttcgggtgggcgttgttcgccttgtttagacttatggcccaggattacccagaggttctgtatcaccagattctctatgcaagcggtaaggtttacatgatttttttcgtggtggtgtcctttctgttttcattctatatggccagtctttttttgggcattttggccatggcatacgaggaggagaagcaatag

SEQ ID NO: 134725 - DNA, 5871 bp, synthetic construct
  misc_feature 1..5871: note = Description of Artificial Sequence: Synthetic coding sequence
  source 1..5871: mol_type = other DNA
atggaattccccatcggtagtctagagacaaacaatttcaggcgcttcacacctgaatctttagtcgagatagaaaagcagattgcagctaagcaggggacgaaaaaggccagagaaaaacatcgagagcaaaaagaccaggaggagaaaccaaggccacagttggaccttaaagcatgcaatcagctacctaaattctacggtgagctccccgctgaattgattggcgagcccctagaggatctggatcccttttatagcacccaccggaccttcatggtgctaaacaagggcagaacgatatcccggttctctgccacacgggcactttggctgttctccccattcaatctcatccggagaactgcaatcaaagtgtccgtccactcatggttcagcctgtttattaccgtgaccattttagtgaattgcgtgtgtatgacacgcaccgacctgcctgagaagatcgagtacgtttttaccgttatttacacgttcgaagccttgatcaagattctggccagaggcttctgcctcaatgagtttacctaccttagagacccctggaactggctcgacttctccgtcattacgctcgcctacgtaggaacagccattgacctgaggggcataagtggtttgcggaccttccgcgtgctccgggcgttaaagacagtcagtgtgatcccagggctaaaagtcattgtcggggcgcttatccactccgtgaagaagttagccgacgtcacgatcctcacaatcttttgcctgagcgtgttcgctcttgttggcctgcagctgtttaagggcaatctaaagaataagtgtgtaaagaatgatatggctgttaatgaaactacaaattattccagtcaccgcaagcccgatatatatattaacaagagaggcaccagcgatccactcctatgcggaaacggaagtgacagcggccactgcccagatggctacatctgtcttaagaccagcgacaatcctgattttaattatacttcgtttgattccttcgcttgggcctttctttctctgtttcgcctcatgacccaggattcttgggaacgtctttaccagcagactctgcgaacttccggaaagatctatatgatattctttgttctggtcatttttctcggatctttttacctggtgaacctgatcctggccgtcgtgacaatggcctatgaggagcaaaaccaggccacaacagacgaaattgaggctaaagaaaaaaagtttcaggaagcgctggagatgctccgcaaggagcaggaagtgctggccgcactgggcattgatacgaccagcctgcattctcacaacggttctccccttacgtccaagaacgctagtgaaaggcggcacaggatcaaaccaagggtcagtgaggggtccactgaggacaataagtctcctagatccgacccatacaaccagaggcgtatgagcttcctcggactggccagcgggaagcgaagagcttctcacgggtccgtctttcacttcagatctccgggcagggacataagtctgcctgagggcgtcactgacgacggagttttcccaggagaccacgaatcacacagggggtccctgctgctggggggaggagccgggcagcagggtccactgcccaggagccccctgccccagccatctaatcctgacagccggcacggagaagatgagcatcagcctccacccacatctgaactcgcgcccggtgctgtggacgtgtcagcgttcgacgccggccaaaaaaaaaccttcctgtcagcagaatacctggacgaaccttttagggctcaaagggcgatgtcggtggtcagcatcatcaccagcgtgctggaagaactcgaggaatccgagcagaagtgcccgccttgtttgacctctctgtcacagaagtatctgatatgggattgctgccccatgtgggtcaaattaaagaccatcctgttcgggctggtcacggaccctttcgcggagttaaccataacactctgtattgttgtcaataccatcttcatggcaatggagcatcacgggatgagccctacattcgaagccatgctgcagattggaaatattgtgtttacaatttttttcaccgcagaaatggtgtttaagattatcgcattcgacccatattactacttccaaaaaaagtggaatatatttgactgcataattgtgactgtgagtctgctggagcttggcgtcgctaaaaagggcagcttgtcagttcttaggtctttcagactgctacgagttttcaaactggccaaatcgtggcctacactgaacactctcataaagatcatcggtaacagtgttggagccctgggcaacctgaccattatcctcgctatcattgtatttgtgtttgcactcgtcggcaaacaattgctcggagagaactataggaacaatcggaaaaatatcagtgctcctcacgaagactggccccggtggcacatgcacgacttttttcactcttttctcatcgtctttcgaatcctctgtggcgaatggatcgagaatatgtgggcttgcatggaggttgggcaaaagtctatttgcttgattctgtttctcactgtgatggtgctcgggaatctggtggtgttaaacttgtttatcgctctgctgttgaactctttctcggctgataacctcaccgctccggaggatgatggtgaggtcaataatctgcaggtcgctcttgcaagaatccaggtgtttgggcaccggacaaaacaagctttatgttcttttttttcgcggtcctgtcctttccctcaacccaaagctgaacctgagcttgtggtgaagcttcccctgagcagctccaaggcagagaatcacatcgccgccaatactgctcgcggatcatccggaggattacaagcccctagagggccacgcgacgaacacagcgattttatcgccaatcctactgtgtgggtgtccgtgccgatcgcagaaggtgaatccgatcttgatgatctcgaagatgacgggggcgaggacgctcagtctttccagcaagaggtcatcccaaagggtcagcaggagcagcttcaacaagtggaacgttgcggtgaccatctcactccgaggtctccagggacaggcacttcctctgaagacctggctccatccctgggcgaaacttggaaggacgaaagcgtccctcaggtccctgccgagggagtcgacgatactagttccagtgaaggtagcacagttgactgtctggaccccgaagaaattctgagaaaaatcccagagctcgccgatgatctggaggagcctgatgattgcttcacagagggttgtatacgccattgtccttgttgcaaacttgacaccaccaagagtccttgggacgtcgggtggcaagtaagaaagacttgctaccggatcgtagaacattcctggttcgagtcttttatcatcttcatgatcctgttgtcatccggatccttggccttcgaggattactatctggaccagaagccaacagttaaggctctcttggagtacacagatcgagtgtttacattcatatttgtgttcgagatgctgctcaaatgggtcgcctatggcttcaaaaaatatttcacaaatgcctggtgctggctagattttctgatcgtgaacatctcgctcatcagtctgacagcaaaaatcctggaatactctgaggtggcccccatcaaagccttgcgcacacttagggcactaagaccacttcgggccctctcccgatttgaaggtatgcgtgtagtagtggacgccctggttggcgccatcccatccattatgaatgtgctgctagtatgcctgattttttggctcatattctcaatcatgggcgtgaatctgtttgcgggtaagttctggagatgcatcaattacacagacggagagtttagcctagtgccgctctccatcgttaacaacaagtccgattgcaaaatacagaactctactggctctttcttttgggtcaacgtgaaggtgaactttgacaacgtggctatggggtacttggctctgttgcaagtggcaactttcaagggctggatggacattatgtacgctgcggtagactctcgcgaggtgaatatgcagccaaagtgggaggacaatgtatacatgtacctctacttcgtcatcttcatcatttttggggggtttttcaccttaaacctttttgtcggggtgattatcgacaactttaatcagcagaaaaaaaagttaggcggacaggacattttcatgactgaagaacagaagaaatattataacgccatgaagaagctgggatcaaagaaacctcagaaacccattcctcgcccactgaacaagtttcaggggttcgtgtttgacattgtgacccggcaagctttcgatatcacaataatggtgcttatctgtttgaacatgatcacaatgatggtcgaaactgatgaccaatccgaggaaaaaacaaagatcctaggaaaaattaatcaattttttgtggccgtgtttacgggcgaatgtgtcatgaagatgtttgccctgcggcagtactatttcaccaacggctggaacgtgttcgactttatagtcgtagtcctgtcaatcgcctctcttattttttcggcaattttaaaaagtctgcagtcatacttctcaccgactctgtttcgtgtaattcggctggcacgtatcggcaggatattacgtctgatacgggctgccaaaggaatcaggaccctgctcttcgcactgatgatgtcgttaccagcgctatttaatatcggtttgctactgtttctcgttatgtttatatattccattttcggcatgtcaagctttccacacgtgaggtgggaagctgggattgacgatatgttcaattttcagacttttgcgaattccatgctgtgcctgttccagatcacaacgagcgccgggtgggacggcctcctgagccccatactcaatactggccccccttactgcgaccccaacctccctaactcaaacgggacgcgaggagattgcgggtcaccagccgtggggatcattttttttacaacatatattattatttcttttctgattatggtgaacatgtacatagccgtgatcctcgaaaacttcaatgtggccacggaagagtccactgagccattgagcgaagatgatttcgacatgttctacgaaacatgggagaaattcgatcctgaagccacacagtttataacgttcagcgccctcagcgactttgcagatacactgagtggcccacttaggattccgaaacccaaccgaaatattcttatccaaatggacctgccgctggtccctggagataaaatacactgcctggatatcctctttgctttcaccaagaatgtcctcggggaaagtggcgaactagattccttgaaagcaaatatggaagagaagttcatggcaaccaatctcagcaaaagctcctatgaacctatcgccaccaccctgagatggaaacaagaagatatttccgccacggtgattcagaaagcataccgaagctacgtgcttcatcggtctatggcccttagcaacacgccttgtgtgccacgggcagaagaagaggcagcttcactgccagatgaggggttcgttgcatttactgccaatgagaattgcgtactgcccgacaaaagcgaaacagccagtgctacgagctttcctccttcttatgaatctgtgaccaggggtcttagcgatagagtgaatatgcgcacctcgagtagcatacagaacgaagacgaagcgacgtctatggagcttattgccccaggcccttag

SEQ ID NO: 134726 - DNA, 5376 bp, synthetic construct
  misc_feature 1..5376: note = Description of Artificial Sequence: Synthetic coding sequence
  source 1..5376: mol_type = other DNA
atggacgatcggtgttatcctgtgatattccctgatgaaaggaattttcgaccattcacgtccgactcactggcagctatcgagaagcgtatcgctatccagaaggagaaaaagaagagcaaggatcagacaggtgaagttccgcagccacgtccccagcttgatctaaaggccagccgaaaattgcccaagctttacggggatatcccgagagaactcattgggaaaccactggaggatctcgatcccttctacaggaaccataagaccttcatggtcctcaaccggaagagaacaatctatcgcttcagcgccaaacatgctctgtttatctttggaccctttaacagtatccgaagtttggccatacgggtgtctgtgcactcgctattctctatgttcataatcggcacagtgatcattaattgtgtcttcatggctacagggcctgccaaaaattcaaactcgaataatactgacattgcagagtgtgtttttaccggcatctacatttttgaagctctgatcaagatcctggcgcgtggttttatacttgacgagttttcctttcttcgtgatccgtggaattggctggatagcatcgtgattggcatcgcaatcgtgtcctacattccaggaatcacaatcaaactactgcccctaagaactttccgcgtattccgtgcccttaaggccatctctgttgttagccgcctaaaagtgattgtgggagccctgctgcggagcgttaagaaattagtgaacgtgatcatacttaccttcttttgtctgagcatcttcgccctggtaggccagcagctcttcatggggtctctgaatctgaaatgtatcagtcgtgactgtaaaaacatttcaaacccggaggcatatgatcactgtttcgaaaagaaagagaacagcccagagtttaagatgtgcggtatatggatgggcaacagcgcttgctccattcaatatgagtgcaagcacacaaaaatcaacccggattacaactatacaaatttcgacaattttgggtggtcctttttggctatgttccgactcatgacccaagatagttgggaaaaactgtaccagcaaacactgagaactacaggtctgtattccgtattctttttcatagtagtcattttcctcggcagtttttacctgataaatctcactctcgccgtggtgaccatggcttatgaagaacagaataagaacgtcgcagccgagattgaagccaaagagaagatgttccaggaggcccagcaacttctaaaagaggagaaggaagcgctagtggcaatggggatagatcggagctctctcacttctttagaaactagttacttcactccaaaaaaacggaagttgtttggcaacaagaagcgaaagtcgttcttcttgcgggagtcagggaaggatcagcctccagggtccgacagtgacgaggactgtcagaagaagcctcaactcctggaacagaccaagcgcttatctcagaatctcagccttgatcatttcgacgaacatggcgatcccctgcaacgacagcgggccctgagtgcggtttccatactgacaataacaatgaaggagcaggaaaagtcgcaggagccatgtctgccttgtggagaaaacctcgcctccaaatacttagtctggaactgttgcccccagtggctgtgtgttaagaaggtcctgcggactgtgatgaccgatccattcacggagctggccatcacaatctgcattatcatcaacacagtcttcctcgcaatggagcaccataagatggaagcctcattcgagaagatgttgaatatcggcaatttggtgttcacctcaatcttcatagctgaaatgtgtctgaaaatcattgctctcgacccttaccactattttcgccgggggtggaatatctttgatagtatagtagccctgttgtcctttgctgacgtaatgaactgcgttctgcagaagagaagctggccttttttgagaagtttcagagtattacgagtattcaagctggccaaatcctggcctacacttaacaccctaattaagatcatcggaaacagtgtgggggccttgggatctttgacagtcgtcttagtgatcgttattttcatattctccgttgtaggaatgcaactcttcgggagatcatttaattcacagaagtcccctaagctgtgcaacccaacagggccgacggtttcatgccttaggcactggcacatgggggacttttggcacagttttcttgtggtcttccgaattctgtgcggggaatggatcgagaatatgtgggagtgcatgcaggaggccaacgcttcctcctcactatgcgtgatcgtgttcatcctcatcacagtgattggcaaactggtggtgcttaatctgttcatcgctctactgctcaactcgttttccaacgaggagaggaacggaaatcttgaaggagaagctcgcaaaacaaaggtgcagttagccctggatagattccgcagagccttctgttttgtcaggcacacactggagcatttttgccataagtggtgtagaaaacagaatctgccccaacagaaagaagtggcaggcggatgcgccgcacagtccaaggacatcatccctctggttatggaaatgaaacgaggcagtgagacgcaggaggagcttggcatactgacctcagtgccaaaaacattaggagtgaggcacgactggacgtggcttgcccctctagcagaagaggaggacgatgtcgaattttccggcgaagacaacgctcaacgtatcacccagcccgagccggaacagcaggcctatgagctgcaccaggaaaacaagaaacccaccagtcagagagtccagtctgtggagatcgatatgttctctgaggatgaacctcacctcacgattcaagatcctaggaaaaagtcagacgttacctcgattctttccgagtgcagtactatcgacctgcaggatggtttcggctggctgccagaaatggttcccaaaaaacagcctgagcgctgcttgcccaaaggatttgggtgctgcttcccgtgctgctccgtggataaacgtaaacccccatgggtcatttggtggaatctgcgtaaaacttgctatcaaatagtgaaacactcctggtttgagagttttattatcttcgtgatcttgctatcttctggtgcgctcatttttgaagatgtacacctggagaaccagcctaaaatccaggaactcctgaactgtaccgatattatattcacgcatatatttatcctcgagatggtcctcaagtgggtggccttcggttttgggaaatatttcacatctgcatggtgttgtttagacttcatcatcgtaatcgtctctgttacgacacttattaacctgatggaactcaaaagcttccggaccctgcgggccttgcggcctcttagagccctgagccaattcgaaggaatgaaagttgtggttaacgctctcatcggggcaattcctgccatactgaacgtgctgctcgtctgtctgatattttggttggtattctgcattcttggtgtctacttcttctcaggtaaatttgggaagtgtataaacggcacagattcagtaattaattacaccattattactaacaaaagtcagtgcgaatcaggaaacttttcgtggattaaccagaaagtgaatttcgataatgtgggaaacgcatacctggcacttctgcaggtcgcaacattcaagggttggatggacatcatctatgctgccgtcgactctaccgagaaagagcaacaacccgagtttgagtctaattctctgggttatatttactttgtggtgttcatcattttcggttcttttttcactctcaatctgttcattggggtgattatcgataacttcaaccagcagcagaagaagctgggggggcaagacattttcatgaccgaggagcagaaaaaatactataatgccatgaagaagctgggaagtaaaaaaccacagaaacctattcctcgacccttaaacaagtgccaaggtctggtcttcgacatcgtgacttctcagatatttgacatcataatcatatccctgattatactcaacatgattagcatgatggcagaaagttacaaccagcctaaggcgatgaaaagcatcctcgaccatctcaattgggttttcgtagtgattttcactctcgaatgtctcattaagatctttgcccttaggcaatactactttaccaacggctggaatctgtttgattgtgtcgttgtcctgcttagtatcgtcagcaccatgatatcgaccttggaaaaccaagagcacatcccctttccaccaaccttgtttcgtatagtgcgccttgcgaggatcggtagaatactgcgcctggtgcgagctgctagaggcatccggactctgctattcgccctgatgatgagcttgccttccttgtttaacatcgggctgctgcttttccttattatgttcatttacgcgattttgggcatgaattggttctccaaagtcaacccagagtctggtattgatgacatcttcaatttcaagacattcgcctcaagcatgctgtgcctgttccaaatttcgacttccgccggctgggacagtctcctgagccctatgttgcgctcaaaggaatcatgtaacagctcttctgaaaattgtcatttgcccgggatagcgacaagctacttcgtctcctatattattatctcctttttgatcgtagtgaacatgtacatcgctgtgatcctcgagaacttcaatactgccaccgaagagtcggaggacccccttggggaggacgacttcgacattttctacgaagtctgggaaaagttcgatcctgaagctacacaattcatcaaatacagtgcgctctcggatttcgccgacgctcttcctgagcccctaagagtggccaaacccaacaaataccagttcctcgtgatggaccttcctatggtctctgaagacaggttacattgtatggatatcctcttcgcctttactgccagggtcctcggcggaagcgacggcctagatagcatgaaggcaatgatggaggaaaagtttatggaggccaatccgctgaaaaaactgtacgagcctattgtgacgaccactaagagaaaagaagaggaacggggagccgccattatccagaaggccttccgcaagtacatgatgaaggttacaaaaggtgatcaaggcgaccagaatgatcttgaaaatgggccacactcgccgttgcagacgctatgcaacggagatctgtctagttttggagtggcgaaagggaaggttcattgcgactag

SEQ ID NO: 134727 - DNA, 4335 bp, synthetic construct
  misc_feature 1..4335: note = Description of Artificial Sequence: Synthetic coding sequence
  source 1..4335: mol_type = other DNA
atggacgatagatgctacccagtgatatttcctgacgagcgcaactttcggcccttcacgtccgattccctggcggctatcgaaaagcgcatcgctatccaaaaggagaaaaagaagtctaaggatcagacaggggaagtcccccaacctcgtcctcaacttgacttgaaagcaagccggaagctgcctaagctgtacggggacatacctcgtgagctgattggcaagcctctcgaggacttggatcctttctaccgtaaccacaagacctttatggtgctcaacaggaaaaggaccatttatcgcttcagtgctaagcacgcattattcatatttggacccttcaattcgatacgctcgcttgctatccgggtttcagttcactccctatttagtatgttcatcatagggacggttatcataaattgcgtgtttatggccactggacctgcaaagaatagtaattccaacaatacagatatcgccgaatgcgtgtttaccgggatctatatttttgaggcacttatcaagatcttagcgagggggtttatattggacgaatttagcttcctacgggacccctggaattggttagattctatagtgataggaattgcaattgtgtcctacatccctggtattaccataaagcttctgcctttgagaactttccgcgtgtttagagccctgaaagccatatcagtggtgagtaggctgaaagttatagtcggagccctgcttcgtagcgtcaaaaagctcgtcaatgtgattatcctcacctttttttgcctgtctatatttgccctggtaggtcagcagctgtttatgggtagcttgaatctgaaatgcatctccagggactgtaaaaacattagcaacccagaagcatacgaccattgcttcgagaagaaggagaattccccagagtttaaaatgtgtggcatctggatgggaaactccgcctgtagcattcagtatgaatgtaaacatacgaagattaatcccgactacaactataccaatttcgacaatttcgggtggtcctttttggctatgtttcggctgatgacccaagattcatgggagaagttataccaacagaccttgaggactacggggctgtacagtgtgttttttttcatagttgttatctttctgggatcattttatctcatcaatcttaccctggcggttgtgactatggcttatgaggagcagaataagaacgtggccgccgaaattgaggccaaagagaagatgttccaggaagcccagcagttgctgaaggaagaaaaggaagcccttgtggctatggggatcgacaggtcttcactgacctcactggagacttcgtatttcacacctaaaaagagaaaactgtttggaaataagaagaggaagtcatttttcctgcgcgagtccggtaaagatcagccaccaggatccgacagcgatgaggactgtcagaaaaagccccaactgctcgaacagactaaaagactgtcccaaaatttgtcactggatcattttgacgaacacggtgaccccctgcagaggcagagagctctcagtgctgtgtcaatcctgaccatcacaatgaaagaacaagaaaagagtcaggagccctgcctcccctgtggtgaaaacctggctagcaaatatttagtgtggaactgctgtccacaatggctgtgcgtaaagaaggtcttgcgcaccgtaatgacagaccctttcactgagctggccatcactatctgcatcattataaatacagtgttcctggccatggaacatcataaaatggaggcgagtttcgagaagatgctgaacatagggaatttagtgtttacctctatttttattgcagaaatgtgcctcaagatcatcgctctggatccataccactatttcagacgtgggtggaacattttcgactctatcgtagcactgctgtcctttgccgatgtaatgaactgcgttttgcagaagaggtcctggccctttctcagatccttcagggtactgcgggtattcaagctggcgaagagctggcccacccttaacactctcatcaaaatcatcggaaatagtgttggcgctctgggctcccttacggtggtacttgttatcgtgatttttatattcagtgtggtcggaatgcaattgttcgggagaagcttcaatagtcaaaagtccccaaagctatgtaatcccaccggtccaacagtatcctgtcttcggcactggcatatgggagatttctggcacagcttcctggtggtctttcgcatactgtgtggtgagtggattgagaatatgtgggaatgcatgcaggaggctaatgcatcgtcgagcctatgcgtgattgtgttcattttgatcacggttatcggcaagcttgtggtgctgaacctgtttattgcattattgctgaacagtttttctaacgaagaaaggaatggcaacctcgagggcgaagccaggaaaaccaaggtgcagctggcactcgacagattcagaagagccttctgctttgtcaggcataccctcgagcatttctgtcataagtggtgtaggaaacagaacctgcctcagcagaaagaagttgctggggggtgcgccgcccaaagcaaggatattatcccactggtgatggagatgaagcgaggttcagagacccaagaggaactgggcattctcactagtgtacctaagacattgggggtgagacatgattggacttggctggcgccactcgctgaagaagaggatgacgtcgagtttagcggcgaagataacgcccaacgtattactcagcctgaaccggaacagcaggcctacgaactgcatcaggagaacaaaaagccaactagccagagagtgcagtccgtggagatcgatatgttctcagaggacgaaccccacctgaccattcaagacccaaggaaaaaatcagacgtgacttcaattttgtctgagtgcagtactatagaccttcaggacgggtttggctggctgcctgagatggtccccaagaagcagcccgaacgttgcttgccaaagggcttcgggtgctgctttccttgctgcagcgttgataaacgcaagcccccatgggttatttggtggaacctcagaaagacctgctatcagattgtgaagcactcatggtttgaatctttcattatttttgtgattctgctatcctccggagctctgattttcgaggatgtgcacctggagaatcaacccaagatccaggagctcctgaactgtacagacattatctttacacacatctttattctcgagatggttcttaaatgggtggcttttggctttggaaagtacttcacatccgcctggtgctgcctggacttcattatcgtcattgtgagcgtgacaaccctgataaatctgatggagctgaagtctttcagaactcttcgtgccctgagaccccttcgtgcactctcccagttcgaaggcatgaaagtggtggttaatgccctgataggagcaatcccagccatactgaacgtgctgttagtgtgtctcatattctggttggtgttttgcatcctgggcgtgtattttttttccggcaaattcggcaaatgtattaacggaacagattcagttattaactacaccattattacgaacaagagtcagtgcgagagtggcaactttagctggatcaatcaaaaagttaactttgacaatgttgggaacgcgtatctggcactgttgcaggtagcgaccttcaaaggatggatggacataatttacgcagcggtcgacagcaccgagaaagagcaacagccagagttcgaatccaatagcctcggctatatctattttgtggtgtttattatcttcggctctttcttcaccttaaatctgtttattggtgtgatcattgataactttaatcagcagcagaaaaaattgggtggccaggatattttcatgacagaggaacagaaaaaatactataatgccatgaagaagctgggctcaaaaaagccgcagaagccgatccctagaccacttaacaaatgccaaggtctggtcttcgatattgtaacttctcaaatattcgacattatcatcattagcctgataatcttgaacatgatctctatgatggccgagtcttacaaccaaccaaaagctatgaagagcatcttggaccatctgaattgggtgttcgtggttatcttcaccttggagtgccttataaaaatcttcgccctcagacaatattactttacgaatgggtggaatttatttgactgtgtggtggtgttgttgtcaattgtcagcaagtag

SEQ ID NO: 134728 - DNA, 5376 bp, synthetic construct
  misc_feature 1..5376: note = Description of Artificial Sequence: Synthetic coding sequence
  source 1..5376: mol_type = other DNA
atggatgatcgctgctacccagtgatcttccctgacgagaggaattttcgacctttcacaagcgactcccttgccgcgatcgagaaacgcatcgccattcagaaggagaaaaagaagtcaaaagatcaaacgggcgaggtgccacagccccgcccccagctggatctcaaagcatcacgaaaacttcccaaactgtacggagacatacctcgcgagctgattggaaaacctttagaggacctggacccattttatagaaaccacaaaacctttatggttctaaacaggaaaagaaccatttatagattttcagccaagcacgctctttttatctttggacccttcaacagcattcggagcttggccatcagggtcagcgtgcacagtcttttctccatgtttattattgggactgtcataatcaactgtgtgtttatggccaccggcccggccaaaaatagcaatagcaacaataccgatatagctgagtgtgttttcaccggcatctacatttttgaagccctgatcaaaatcttggcccgggggtttattctggacgaattttcattcctgcgagacccttggaattggctggactctatcgtgatcggcatcgctatcgtgagctatattcctggaatcactatcaaactgctgcccttaaggacctttcgtgtgttcagggcgctgaaggcgatctccgttgtctcacgcctgaaagtgatagttggtgctctgctcagatctgttaagaaactggtcaacgtgatcattcttacctttttctgtttatccatattcgcgttggttgggcaacagcttttcatgggatctctgaacctgaaatgcatcagtcgggattgcaaaaatattagcaacccggaagcctacgatcattgctttgagaaaaaagaaaatagccctgagtttaaaatgtgcggaatttggatgggaaactcggcctgctctatccagtacgagtgcaagcatactaaaattaacccggactataactacaccaattttgacaattttggttggagtttcctggctatgtttcgactcatgactcaggactcttgggaaaagctgtatcagcagacactgagaaccacggggctgtacagcgtctttttcttcatcgtggtgatattcctgggcagtttctacctcattaacctgactcttgccgtggtgaccatggcgtacgaagagcagaataagaatgtcgccgctgaaatcgaggcaaaagaaaaaatgttccaggaggcccaacagctgttgaaagaggaaaaagaggccctcgtggctatgggaatcgatagaagctccctaacgtccctggagacctcttactttactcccaagaagaggaagctttttgggaacaaaaagcgaaaaagtttcttcttgcgtgaatcagggaaggaccagccaccgggatccgactctgatgaggactgtcagaagaagccacagctgttggagcagaccaaacgactaagtcagaacttgagcttagaccactttgatgagcatggtgatcctttacagcgccagcgggctctaagtgctgtgtcaattcttacaattactatgaaagaacaggagaagagccaagaaccctgcctcccatgcggagaaaacctcgcttctaaatatctggtctggaactgctgcccacagtggctctgtgttaagaaggttctgaggactgttatgacagacccctttaccgaacttgccatcacaatctgtatcatcatcaatacagtctttctggccatggaacatcataaaatggaagcttccttcgaaaaaatgctcaatatcggcaatttggtgttcacctccatttttatcgccgagatgtgtctgaaaatcatcgctctggatccctatcactattttaggcgcggttggaatatcttcgatagcattgtggctctgttatccttcgccgatgtcatgaattgtgtgctgcaaaagcgctcatggccctttttacgatcttttagagttctaagagtgttcaaactggcgaaaagctggcccacactgaacaccctgataaagattattggaaattctgtgggtgccctcggctctctaacggtggttcttgttatcgtgatttttattttttcagtcgtcggcatgcagctgttcggccgaagtttcaatagtcagaagagccccaaactctgtaacccaactggacctactgtgagctgtctgcgccactggcatatgggcgacttttggcactcatttttagtagtgttcaggattctgtgcggggagtggatcgagaatatgtgggagtgcatgcaggaagctaatgcttcaagtagcttgtgtgtgatagtgttcatccttattaccgtgatcggcaaacttgtagtcctgaacctgttcatcgctctgctgttgaatagctttagcaacgaggagaggaacgggaatctggagggcgaggcccggaagacaaaggtgcagctcgcgctcgaccgcttccgccgggctttctgctttgttcgacataccctggaacacttttgccacaagtggtgcagaaaacagaacctcccacagcaaaaagaggttgcaggtgggtgtgccgcccaaagtaaggacattattccactcgtaatggagatgaaacggggaagcgagacccaggaggagctgggaattctaacttccgtgcccaagaccctaggtgtgaggcatgattggacgtggctggcccctctggcggaagaagaagacgatgtcgagttttccggagaggacaacgctcagcgcataactcaaccggagcctgagcagcaggcctacgagctgcaccaggagaataagaagccaacctcacagagagtccaaagcgtggagattgatatgttctccgaagacgaaccccatctaacaatccaggatcccagaaagaaatccgacgtgaccagcatactgtcagagtgcagcaccatcgacttgcaggacgggtttggttggcttcccgaaatggttcctaaaaagcaacctgagcggtgtctgcctaaaggctttggctgttgctttccgtgctgcagcgtggacaagagaaagcccccctgggttatatggtggaaccttcgcaaaacatgttatcagatcgtcaagcactcatggttcgagtcttttattatattcgttatactgctgagcagtggagctctaatatttgaggacgttcacttagaaaaccagcccaagattcaagaattgctgaattgcaccgatataatctttacacatattttcattcttgagatggtgctgaaatgggttgcttttggtttcggtaagtattttacctctgcctggtgttgtctggattttattattgtcatcgtgtccgtaactacactgattaacttgatggaattgaaatcttttcgcactctgcgggcactccgccctcttcgcgctttatcccagttcgaaggaatgaaagttgtggtaaatgctctgatcggtgcaatccccgctattctcaatgttctgctggtctgtctgatattttggttagtcttctgtatcctcggcgtgtactttttctccgggaaatttggaaaatgcataaacggcacagactcagtgattaactacaccatcattactaacaaaagtcagtgtgaatcaggtaatttctcctggatcaaccaaaaggtgaatttcgacaatgtgggcaatgcctacttagctctgcttcaagtggcaacctttaaaggatggatggacatcatctatgctgcggtggattcgaccgagaaagagcagcagcctgagttcgaatctaactccctgggctacatctatttcgtggtatttatcatcttcgggagctttttcactttgaatctgtttataggcgtcattatcgacaattttaaccagcaacagaaaaagcttggggggcaagacatattcatgacagaggagcaaaagaaatattataacgctatgaagaagttaggatcaaagaagccccagaagccgatcccgcgcccccttaacaagtgtcagggtctagtgtttgacatcgtgacttctcagatattcgatatcatcattatttctctgataattctaaacatgatatccatgatggccgaaagctacaaccagcctaaagccatgaaatcaatcttagaccacctgaattgggtttttgtcgtaatattcactctcgagtgtctcatcaaaattttcgccctccgccagtactatttcacgaacggatggaatctgttcgactgcgtcgtggtgttactcagcatcgtcagcaccatgatctctaccctggagaaccaggagcatattccattcccgcccacactgttcagaatcgtccgactggccaggataggccgaatactgagactcgtgagggccgcgagaggcatcaggacgctgctcttcgcgctcatgatgagcttacccagcttgttcaacatcgggctccttctattccttatcatgtttatttacgcaatattagggatgaattggttctccaaggtgaaccctgagtcaggaattgacgacatatttaacttcaagacgttcgcctcgagcatgctgtgcctgttccagatttctacatccgctggctgggattccctcttgagccctatgctcagaagtaaggagtcatgcaattcatcgtccgaaaactgtcatctcccaggtatcgctacgagttacttcgtgtcatatataatcatttccttcctgatcgtggtcaacatgtatatcgcagtgattctcgaaaactttaataccgccaccgaagaaagcgaagacccattgggcgaggatgactttgacattttttatgaagtttgggaaaaattcgatccagaggcaacccaattcatcaagtacagtgccctctccgacttcgccgacgccctgcctgaaccactccgagtggctaaacctaacaaataccagttcctcgtgatggacctgccgatggtgagcgaggatcgacttcactgtatggacatcctattcgccttcacagcccgcgtgttgggaggttccgatggcctcgatagcatgaaagccatgatggaagagaagttcatggaggccaaccctctgaagaagctgtatgaaccaatcgtgaccaccaccaaacgtaaagaagaggagcggggggcagccattatccagaaggctttccgaaagtatatgatgaaagtgaccaagggcgaccagggcgatcaaaacgacctggagaacggtccccactcacctctccagaccctctgtaatggcgacctcagctcctttggagtggcaaagggcaaggttcattgcgactag

SEQ ID NO: 134729 - DNA, 5217 bp, synthetic construct
  misc_feature 1..5217: note = Description of Artificial Sequence: Synthetic coding sequence
  source 1..5217: mol_type = other DNA
atgctgaaacgcaaacagtcttcaagagtggaagctcagccagtgaccgattttggacctgatgaaagtctgtcagacaacgccgacatcctctggattaacaagccttgggtgcactctctcctgcgcatttgcgccatcatctctgtcatctccgtttgtatgaacacgccaatgaccttcgaacattatcctcccttacaatatgtgactttcactctcgataccctgctgatgttcttatacaccgctgagatgattgcgaagatgcacatccgtgggattgtcaaaggagattcatcctacgtgaaagatcggtggtgtgtgtttgatggctttatggtgttctgcctgtgggtcagtctcgtgcttcaggttttcgagattgccgacattgtggaccagatgagtccatggggcatgcttaggattcctagacctttgatcatgatccgcgcattcaggatttacttcagattcgaacttcccaggacaaggatcacgaacatcttgaagcgcagcggcgagcaaatttggtcagtgagtatctttctgctcttcttcctactgctatacgggattttaggcgttcaaatgtttggcactttcacctaccattgcgtagtaaacgataccaagccaggcaatgttacttggaactccctcgccatacctgacacacattgttctcctgagctggaggaagggtatcagtgtccccccggatttaagtgtatggatctggaagacctaggattatctcgccaggaactgggctatagcggattcaatgaaattgggactagcatctttacagtgtacgaagccgccagccaggagggctgggtttttctgatgtaccgagctatcgactctttcccgcgatggcggtcatacttctactttataaccctcattttctttctggcatggttggttaagaacgtcttcatcgcggtgattatcgagacttttgcggaaataagagttcagttccaacagatgtggggaagccgcagttctactacgagtaccgccactacgcagatgttccatgaagacgcagccgggggttggcagctcgtagccgttgacgtcaacaagccccagggccgggctccagcctgtctgcagaagatgatgcgctcatccgtgtttcacatgtttatccttagtatggtaaccgtggatgtgatcgtcgcggcctcaaattactacaagggtgaaaattttcggagacagtacgatgagttctacctcgcggaggtcgcttttacggtgttgtttgatctcgaggccctgctgaagatttggtgtctcggttttactggctatattagttctagcttacacaaattcgagctgcttcttgtcataggcaccaccttgcatgtctaccccgacctttatcattctcaatttacttatttccaagttcttcgagtcgtcaggctgattaagatttcccctgccctggaagattttgtctataagatcttcgggcctggaaagaaactcggaagtctggtggtgtttacagctagcttgctaattgtcatgagtgccatttcccttcaaatgttttgtttcgtcgaggaattagaccgatttacaaccttcccacgcgcattcatgtctatgttccaaatcctgacccaggaaggctgggttgatgtgatggatcaaacccttaatgccgtgggccatatgtgggctccggtggtcgctatatacttcatcctctatcacttgtttgccaccctgatcctgttatccctgtttgtggccgtgattttggataatctggaactggatgaagacctgaagaagctaaaacaattgaagcagtctgaagccaacgctgacacaaaagaaaaactgccgctgagactccgcattttcgagaaatttcctaaccggcctcagatggtgaaaataagcaagctgcccagtgatttcactgtaccgaagattcgggagtcatttatgaagcagttcatcgatagacagcagcaggacacttgctgtctgcttaggtctttgcccaccactagctcttcatcttgcgatcattccaaacgatccgccatcgaggataacaaatacatcgatcagaagcttcgcaaatcagttttttccatcagagctaggaatctgctagagaaggaaaccgctgtaacaaaaattcttagagcctgtactcgccaaagaatgctatctggcagttttgaaggtcagcctgccaaggagcgatccatcctaagtgttcagcatcatattcgtcaggaaaggcggtcattgaggcacggctcaaatagtcagagaattagtcgcgggaaaagccttgagactctgacccaggatcatagcaacacagtgcggtaccgaaacgcacagagagaagacagcgagatcaaaatgatacaggagaagaaagaacaagccgaaatgaaacggaaggtacaggaagaagaactacgggagaaccatccctactttgacaagcccctctttatagttggtagagaacaccggttcagaaacttttgtcgcgtggtggtgcgcgctcggttcaatgcatcaaagacagatccagtaaccggcgccgttaaaaataccaaataccaccagctgtacgacctgttgggtcttgtaacctatctcgactgggtgatgatcattgtgaccatttgctcctgcatctcaatgatgttcgagtccccgtttcgccgggtgatgcacgctcccactctacagattgcggaatacgtcttcgtgatctttatgtccatcgagctcaatctgaagatcatggccgacggacttttcttcacccccacggctgtgatcagggattttgggggggtgatggacatttttatttacctggtgagcctgatctttctgtgctggatgcctcagaacgtccccgcagagagcggagcacaactgctgatggtcctgaggtgtctccgacctttacggatttttaagcttgtgccacagatgcggaaagtggtacgcgaattgtttagtggctttaaggagatcttcctggtcagtatcctgctccttaccctaatgctggtgttcgcctccttcggggtgcagctgtttgccggcaagctggcaaaatgcaacgaccctaacattatccgcagggaggactgtaacggcatctttcgtatcaacgtgagcgtcagtaaaaacctgaatctcaagctccggcctggggaaaaaaagcccggcttttgggtgccacgagtttgggcaaacccccgcaactttaacttcgacaatgtcggcaacgctatgctcgcactttttgaggtcctgtccctgaaaggatgggtggaagtgagggacgtgatcatccaccgggtcggccccatccacggaatctacatacacgtctttgtatttctaggttgcatgatcggcctgactctctttgtgggcgtagtcattgcaaatttcaacgagaataagggaacagcccttctcacagtggatcagcggagatgggaggacctgaaatcgcgtctgaaaattgcccagcccctacacttgccacccagaccagacaacgacggattccgggccaaaatgtacgacattacacagcacccatttttcaagaggaccattgctctcctcgtgttggcccagagcgtgctgttgtcagttaagtgggacgtagaagacccagtgaccgtccctctcgccactatgagcgttgtattcacctttatattcgtcctcgaggtcaccatgaagattatcgccatgagccccgccggcttctggcaaagtcgtaggaatcggtacgacctgctggttacctctttaggggtggtatgggtggtcctgcatttcgctttgctgaatgcctacacatacatgatgggcgcctgtgtgatagtgttccgcttctttagcatctgcggcaaacacgtcactctcaaaatgctcctcctcacggtcgtagtgagcatgtataagtccttctttatcatcgtggggatgttcctgctcttactgtgctacgcattcgcgggcgtcgtcctattcggtacagttaaatacggtgaaaatataaacagacatgccaacttcagctctgccggcaaagctattaccgtgctgtttcgcatcgttacgggagaagactggaataagatcatgcatgattgcatggtgcaaccccccttctgcacccccgacgagtttacatattgggctacagattgtggcaactacgccggggcccttatgtacttttgttcattctatgtgataattgcctacatcatgctgaatttacttgtcgccattattgtggagaacttttccctcttctattcaaccgaggaggatcagctgctgtcatacaacgatctccggcacttccagatcatttggaacatggtggacgacaaaagggaaggagtcatcccaacatttcgggtcaaatttctgttacggttgcttcgcggccgcctggaggtggatctggataaggataagttactgtttaagcacatgtgttatgaaatggagagattacacaatggaggcgacgtcacattccacgacgtgctatcaatgctgtcgtacagaagcgtggacatcaggaagagtctccagctggaggagctgttagctagagagcagctggagtacaccatagaggaagaagtggctaaacagaccattcgcatgtggcttaagaaatgtttgaaacgtatacgagccaaacagcaacaatcatgcagcattatccacagtctgcgggagagccagcagcaagagttgtcccgattcctgaacccaccctcgatcgagacaactcagccttcagaggacacgaatgctaacagccaggataactctatgcagcctgaaacaagttcccagcagcagttgctaagcccaactctgagcgaccgaggcggcagccggcaggatgccgctgatgcgggcaagccccaaagaaagtttggtcaatggcgcctgccttccgcacccaaacccatttctcattcagtaagttctgttaatctccggtttgggggtagaaccacgatgaagtctgtggtgtgcaagatgaaccctatgacagatgcagcatcctgcggcagcgaagtcaagaagtggtggacgcgtcagctaacggtcgagtccgacgaatctggcgatgatttactcgacatatag

SEQ ID NO: 134730 - DNA, 2007 bp, synthetic construct
  misc_feature 1..2007: note = Description of Artificial Sequence: Synthetic coding sequence
  source 1..2007: mol_type = other DNA
atgttgaagcggaagcagtcatctcgtgtggaagcacaaccggttaccgacttcggtcctgacgagagcctttcggacaacgctgatattctctggattaataagccttgggtgcatagcctgttgaggatctgcgccataatttccgtgatctccgtgtgcatgaatacacccatgacgtttgagcattatccacctctgcagtacgtcactttcactctagacaccttattgatgttcctctatactgcggagatgatcgctaagatgcacatccgcggaatcgtaaaaggggactccagctacgtgaaagaccgatggtgcgttttcgacgggttcatggtcttctgcctgtgggtgagcctggtcctccaggtcttcgaaattgctgacattgtggatcaaatgtccccttggggtatgctccggatccctaggcctctgatcatgatcagagcctttagaatctattttcggttcgagctaccccggacaaggataactaatattttgaaacggagcggtgagcagatctggtccgtgtcaatctttctgttgttctttcttttgctctacgggatcctgggagtgcagatgttcggcacatttacatatcattgcgtggtgaacgacactaaaccaggaaatgtcacatggaactccctcgcaattcctgatacacactgttccccagagcttgaggaaggttaccagtgtccacccggctttaagtgcatggacctcgaagatcttggacttagccgccaggagcttggttacagtggatttaacgagatagggactagcatctttacagtctacgaggctgcaagccaggaaggatgggttttcctgatgtatagggccattgactctttcccccgatggaggtcgtacttctatttcatcacccttatcttcttcctggcttggcttgtaaaaaatgtgttcatagctgtaatcattgagacctttgcagagatccgggtccagtttcagcaaatgtgggggagccgctcctctaccacatcgactgctaccacccagatgtttcacgaagatgccgccggggggtggcagcttgtagcagtagatgttaataagcctcagggacgcgcccccgcttgcctacagaagatgatgcggtcctcagtgttccatatgttcattttgtctatggttacggtcgatgtgatagtggctgcttctaattattacaagggcgaaaactttaggaggcaatatgatgaattttacctagcagaggtggcattcaccgtgctgttcgacttggaggccctcctgaagatctggtgtcttggatttactggatacattagtagtagtctacacaaattcgaactgttgctggttatcggcacgaccctgcatgtgtaccccgatctataccactctcagttcacgtatttccaggtcctgcgggtggtgcggttgataaagatatcacctgcactggaggacttcgtatataagatcttcgggcctgggaagaagttgggatctctggtggtattcaccgcatcactactcattgtcatgtcggctattagtctccaaatgttttgcttcgtagaggaactggataggtttacaacttttcctagagccttcatgtccatgtttcagattctgacccaggagggatgggtggacgtaatggaccaaactcttaatgctgttggtcacatgtgggcccccgttgtggcaatttacttcatcttataccacctgttcgcaactctcccaccttccctaattcgtgatttatgtggcacgcaggacgcgtgtcccagctgcctgcctctgcagccaccaaacccacttcccggatcccagaccctggctagactaacgcaccaggcactcacaacacccccaggcatgcggtccagtcagctctttagtaagatatcactactactcggtatctgtgttgcgtgggaatcaattttgggatccctttcactgagccacaacttgagatag

SEQ ID NO: 134731 - DNA, 657 bp, synthetic construct
  misc_feature 1..657: note = Description of Artificial Sequence: Synthetic coding sequence
  source 1..657: mol_type = other DNA
atgctgaagcgtaaacagtctagtagggtcgaagcacagcctgtaacagatttcgggcccgacgaatccctcagcgataatgccgatatcttgtggatcaacaaaccgtgggttcactccctgctgcgaatttgcgccatcatatctgtcatctccgtgtgcatgaacacccctatgacattcgagcactatcctccattgcagtacgtgacctttacactcgacacactgctgatgtttctttatacggccgagatgattgccaagatgcatatacgcggcattgtgaagggcgacagcagctatgtcaaagataggtggtgcgtttttgatggcttcatggtcttttgtttgtgggtcagcctcgtactgcaagtgtttgagattgccgatatcgtcgatcagatgtcaccatgggggatgttgcgaatccccaggccccttattatgattagagctttccggatctactttcggttcgaactgccgcgaaccaggataactaatatactgaaaaggagcggagagcagatctggtctgtgagcatcttcctgctctttttcttgctgctgtacggaattctcggtgtacagatgttcggtacatttacttaccattgcgtggtgaacgataccaagccaggcttatcgctttag

SEQ ID NO: 134732 - DNA, 657 bp, synthetic construct
  misc_feature 1..657: note = Description of Artificial Sequence: Synthetic coding sequence
  source 1..657: mol_type = other DNA
atgctaaagcgaaaacagtcctctcgggtggaggcgcaacctgttaccgattttggcccggacgagagcctttcagacaatgctgatattctgtggataaacaagccctgggtgcacagcctgcttcgtatttgtgccatcatcagcgtgatctccgtgtgtatgaatacacccatgacctttgaacattacccacctctgcagtacgttaccttcacactggatacgttgcttatgttcctctataccgccgaaatgattgccaaaatgcatatccgcggcattgtgaagggtgactcttcgtacgtgaaggatcgatggtgcgtgttcgacggcttcatggtgttctgcctgtgggttagcctcgtgctgcaggttttcgagattgctgatattgtcgatcagatgtccccctggggcatgctacgcataccacgccccctaataatgattagagccttccgcatttattttaggttcgaactcccaaggacgaggataacaaatatactcaaacggtcgggggaacagatatggtccgtcagtatctttctgctcttctttctgctgctttatgggattttaggggtacagatgttcggcactttcacataccattgcgtggtcaatgatacgaaacccgggctcagcatctag

SEQ ID NO: 134733 - DNA, 1725 bp, synthetic construct
  misc_feature 1..1725: note = Description of Artificial Sequence: Synthetic coding sequence
  source 1..1725: mol_type = other DNA
atggcttctaccgaaggagctaataacatgcccaagcaagtggaagtcaggatgcacgattctcacctaggaagtgaggaacccaaacaccgacaccttggactgcgtctctgcgacaaactagggaaaaacttgctgctgacactgacggtttttggcgtaatactgggcgctgtgtgtgggggtctgttgcgtctcgcttcacctatccacccggatgtggtcatgttgatcgcattccctggtgacatcttgatgcgcatgctcaagatgttaatcctgccccttatcatcagtagtcttatcacgggacttagcggtctcgacgcaaaagccagcgggcggttggggacacgtgccatggtgtattatatgtctactaccataatcgccgccgtcctgggagtgattttggtgctggccattcatcctggcaacccaaagcttaaaaaacagctgggtccaggtaagaagaatgatgaggtgtctagcctcgatgcctttctggatctaatcagaaacctattcccagaaaatcttgtgcaggcttgcttccaacagatccagaccgtaactaaaaaggtcctcgtggccccgccccccgacgaagaagccaatgccacttccgcagtggttagcctgctcaatgagactgttacagaggtgcctgaggagacaaagatggtaatcaagaaagggctcgaatttaaggacggaatgaacgtcctgggtctcatcggcttctttatcgcttttgggattgcaatggggaagatgggtgaccaggcgaagttgatggtcgacttctttaacattctcaatgagatcgtcatgaagctggttattatgatcatgtggtattcccccctcggcattgcctgcctgatttgcgggaaaataatcgccattaaggatctggaagtggtggctcgccagctggggatgtacatggtgactgttattattgggttgataatacatggtgggatctttctccccctcatctatttcgtggttacccgcaaaaatccattttccttcttcgcaggaatattccaggcatggattaccgccctcggaaccgccagctcggccgggaccttaccagtgacgttcaggtgcctagaggagaacctcggtatagataaacgcgtaactcgctttgtcctgccagtcggggcaacaataaacatggatggcaccgctctatacgaggccgtagctgctattttcatcgcccagatgaatggcgtggtccttgacgggggtcaaattgtcactgtgagtctgacggccactctcgcttctgtaggggcagcatcgatccccagtgcagggctcgttactatgctgcttatcctcaccgccgtgggtctgcccacggaggacatctctctgttagtggcggtagactggctgctggatcgaatgagaacctccgttaatgtcgtgggtgatagctttggcgccggcattgtgtatcacctgagcaaaagcgagctcgataccattgacagtcagcatagggtgcatgaagacattgagatgacgaaaacccaatctatatacgatgatatgaaaaatcatagagagtccaactcaaatcaatgtgtgtacgccgcccacaacagcgtcatcgttgatgaatgcaaggtcacgctggctgccaacgggaagagtgccgactgcagcgtagaagaggaaccctggaaaagagagaagtag

SEQ ID NO: 134734 - DNA, 1698 bp, synthetic construct
  misc_feature 1..1698: note = Description of Artificial Sequence: Synthetic coding sequence
  source 1..1698: mol_type = other DNA
atgcccaaacaagttgaagttagaatgcatgatagccatttagggagtgaagagccaaagcatcgccatctgggccttcggctctgtgacaagcttgggaaaaacttgttactaactctgaccgtgtttggggtgatcctcggcgccgtttgtggaggactgctgaggctcgccagtcctattcaccctgacgtcgtcatgctgattgctttccccggggacatccttatgcggatgctgaagatgcttattctccctctgattatctcctcacttattacaggcctgagtggactggatgctaaagctagtggaagactcgggacccgtgccatggtctactacatgtctactaccatcattgcagccgtcctcggcgtgattctggttctggcaattcacccagggaaccccaaactgaagaagcagcttgggccaggcaaaaaaaatgacgaagtaagctctctggacgcctttctggacctcattcggaacctgtttccagagaacctggtgcaggcgtgtttccaacaaattcagacagtcaccaagaaagtgcttgtcgccccaccacccgacgaagaggcaaacgccacttccgcggttgtttctctgcttaatgaaaccgtaacagaagtgccagaagagaccaaaatggtcattaaaaaagggctagagttcaaggatggaatgaacgtgctgggactcatcggtttctttatagcgttcggcatagccatgggcaagatgggcgaccaggcaaagctgatggtcgacttcttcaacatcctcaatgagatcgttatgaaactggtgattatgattatgtggtacagccccttgggtattgcgtgtttgatctgcggtaagataatcgctattaaggatctcgaggttgtggcgaggcagttaggcatgtacatggtaacagttatcatcgggttgataatacacggtggaatctttcttccgttgatctatttcgtagtgacacggaagaaccctttctcatttttcgctggaattttccaggcttggatcaccgctctcggcactgctagctcagcaggtactctacccgtgacctttcgctgtctagaagaaaacctgggcatcgataagcgagtcaccaggttcgtcctcccagtgggcgcaactatcaatatggacggtaccgctctgtacgaggcagtagccgctatttttatcgcgcaaatgaatggagttgtcctagatggaggccagatcgttaccgtgtccttaacagccacattggcttccgttggcgcagcttcaatcccctcggccggcctagtcacaatgctcctaatcttgactgcggttggactgccaacggaggatattagtctgctcgttgcagtggactggctgctggacaggatgcggactagcgttaatgttgtcggcgactcttttggcgcaggcatagtctaccacctgagtaaatccgagctagatacaatcgattctcaacaccgggtccacgaagacattgagatgacaaaaactcagtccatctacgacgacatgaaaaatcatcgggaatccaatagcaaccaatgcgtgtacgcagcccacaactctgtgattgtcgacgaatgtaaagtgaccctagctgcaaacggcaagagcgccgattgctccgttgaggaggagccctggaagagagagaaatag

SEQ ID NO: 134735 - DNA, 1698 bp, synthetic construct
  misc_feature 1..1698: note = Description of Artificial Sequence: Synthetic coding sequence
  source 1..1698: mol_type = other DNA
atgcccaaacaggtggaagttcggatgcatgacagtcacctcggctctgaagaaccgaagcatagacacctcggcctacgcctgtgcgataaactcggaaaaaatctactacttactttaacagtgttcggggttatccttggcgctgtttgcggcgggctgctcaggctcgcttctcctatccatccggacgttgtcatgctgattgctttccctggcgatatcctaatgcggatgctgaaaatgttaatcttgcccctgatcattagcagtttgattacagggttgagcggccttgacgctaaggcaagtggccggctcggtacgagagccatggtttactacatgtccactaccatcattgccgcagtgctgggcgtcattcttgtgttagccattcatcccggaaaccctaagctcaaaaaacagctaggacctgggaaaaaaaatgacgaagtcagttcactggatgcatttctggacctgattcggaatcttttccccgaaaaccttgtacaggcatgcttccagcaaatccagactgttactaagaaggtgttggtggcaccgcccccggatgaggaggctaacgccacttcggcagttgtgtcactcttaaatgagaccgttaccgaagtgccggaggaaaccaagatggtgattaagaagggcttagaatttaaggacggcatgaacgttctgggtctgatagggtttttcattgcctttggaatagcgatgggcaaaatgggggaccaagcaaagcttatggttgacttttttaatatcctgaatgaaatcgtcatgaaactggtgatcatgattatgtggtattcgcccctggggatcgcatgccttatctgtggtaaaataatcgctataaaggatctggaggtcgttgctaggcagctgggtatgtatatggttactgtcatcataggtttgattatccatggcggcatatttctgcctctgatttactttgttgtcacccggaaaaatccgttcagtttctttgccggaatattccaggcctggataacagctctgggcaccgccagtagtgctggtacccttccggtgacattccggtgcctcgaagagaaccttggcatcgacaagcgtgttacccgttttgttttgcccgtcggggcaactatcaatatggacggaaccgccctgtatgaggcggtggccgccatattcatagcacagatgaatggagtggtccttgatggcggacaaatcgttacagtttccctgactgcgaccttggccagtgtcggtgcagcaagtattccatcagctggcctggtgactatgttgcttattctgactgccgtgggcctgccaactgaagatatctcattgctggtggccgtcgactggctgctggatcgtatgcggacctcagttaatgtcgtgggagactctttcggagccggtatagtgtatcatctgtctaagtcagagctggacacaatcgacagccagcacagggtgcacgaagatatcgagatgactaaaacgcagtctatctacgacgacatgaaaaaccaccgggagagcaactccaaccagtgcgtgtacgctgcccacaattctgtgattgttgacgaatgcaaggttacacttgccgcgaacgggaagagcgcagattgttctgtggaagaggaaccttggaaacgagaaaagtag

SEQ ID NO: 134736 - DNA, 1629 bp, synthetic construct
  misc_feature 1..1629: note = Description of Artificial Sequence: Synthetic coding sequence
  source 1..1629: mol_type = other DNA
atgacgaaatctaacggcgaggagcctaaaatggggggccggatggaaagattccaacaaggcgtacgcaaacgcacactcttggctaagaagaaggtgcagaacatcactaaggaggatgtgaaaagctatctgtttagaaacgcatttgtgctgctgaccgtaacagcagtgatcgtggggaccattttaggctttacactgagaccatacaggatgagctaccgggaggtcaagtatttcagctttccgggagagctgctgatgcggatgctccagatgctggtgcttccactcattatctccagtttagtgactggaatggccgccctggactcaaaggcaagcgggaaaatgggtatgcgtgcagtggtttattatatgacaacaacaatcattgcagttgtcattggaattataatcgtgattataatccatcctgggaaggggacaaaggagaatatgcacagggaaggcaaaatcgtgagagtaacagctgcggacgcttttttggatcttattcggaacatgtttccacccaatctggtggaagcctgcttcaagcaattcaaaactaactacgagaagcgcagtttcaaggtcccgattcaggccaatgaaacattagtgggcgctgtgatcaataacgtgagcgaggcgatggaaaccctcaccagaattaccgaggaactagtgccggtgcctgggtcggtgaacggtgtcaatgcactgggcttggttgttttttctatgtgcttcggcttcgtaatcgggaacatgaaagagcagggtcaagcgctcagagaatttttcgactccctgaacgaggcaattatgcgtctggtcgccgtgataatgtggtatgcccctgtgggtattttatttctcatcgccggaaagatcgtggaaatggaggatatgggcgtgatcggggggcagctggccatgtacaccgtaacagtcattgtgggcctgctgatacacgcagtcattgtcttgcccctgctttacttccttgtgacaaggaagaacccatgggtctttatcggtggtctgttgcaggccttgatcaccgctttagggaccagtagcagctctgccaccctacccattacctttaagtgcctggaggagaacaacggagtagacaagcgcgtgacgcgattcgtgctgccagtgggggctactataaacatggacggtactgcactgtacgaagcattggctgcaatctttatcgcccaggtaaacaacttcgaactgaactttggccagataataactataagcataaccgccaccgcagctagcataggggccgccggtatcccccaggcagggctcgttacaatggttatcgtgctgacatccgtcggtctcccaaccgacgacataacactaataatcgccgttgattggtttttggataggctacgcaccacgacaaacgtgttgggcgacagtctgggtgcaggtattgtggaacacctctcacgccacgagctcaaaaatcgggacgttgagatgggaaatagcgtcattgaggagaatgagatgaagaaaccttatcagctgatcgctcaggataatgagaccgagaaacctattgattccgagacgaaaatgtag

SEQ ID NO: 134737 - DNA, 1494 bp, synthetic construct
  misc_feature 1..1494: note = Description of Artificial Sequence: Synthetic coding sequence
  source 1..1494: mol_type = other DNA
atgaccaagtcaaatggggaggagccaaagatgggtgggcggatggagagattccagcagggcgtccgaaaacgcacactgctggccaagaagaaagtacagaacatcaccaaagaggatgtcaaaagctatcttttcaggaacgccttcgttttgctgactgtgaccgctgtgatagtgggaaccattctcggtttcactctgaggccttatcggatgagctatcgcgaagttaagtatttttccttccctggagaactgctcatgcgcatgctccagatgttagtgttgcccttgatcatctcttccttggtcacaggcatggcagcactggacagcaaggcctccggaaagatgggaatgagggctgtcgtgtactatatgacgaccaccatcattgcagttgtgatcggaatcattattgtgattattattcacccagggaagggcacaaaggaaaatatgcatagggaaggtaagatcgttcgagtaacggctgccgacgccttcctggacctcatccgcaacatgtttccccccaatctcgtcgaggcctgcttcaaacagttcaaaacaaactacgaaaaacggtctttcaaagtccccatccaggctaatgaaaccctggtgggggccgtcattaacaatgtaagcgaggctatggagaccctgacgaggatcactgaagaactggtcccggttcccgggtccgttaatggcgtgaacgcgctcggcctcgtcgtgttctccatgtgctttgggtttgtgatcgggaacatgaaggagcagggacaggctctgagagaattctttgacagcttgaatgaggcaattatgcgtcttgtggccgtcataatgtggtatgcccctgtggggatcctgtttttgattgcagggaagattgttgaaatggaggacatgggtgtcatcggtgggcagctcgctatgtatactgtcacggtgatagtaggccttctgatccacgcagtgatcgtcctgccgctcttgtacttcctggtcacacggaagaacccctgggtattcatcgggggtttactgcaggcattaatcactgccctaggtacgtcatcctcttctgccacactgccaatcacgtttaagtgtctcgaggaaaacaatggggttgacaagcgggtcactcgctttgttctgcccgtaggcgctacaattaacatggacggaacggccctgtacgaggcgctggccgctattttcatagcacaggtaaataatttcgagcttaacttcggtcagatcatcactatcagagatagactgcgcaccacaactaatgtcctgggggactcccttggagcgggtattgtagaacatctatcacgacacgagctgaagaatagagatgtggaaatgggtaactctgtaatagaggagaacgagatgaaaaagccgtatcagctgattgcgcaagataacgagactgagaagccaatcgacagcgagaccaaaatgtag

SEQ ID NO: 134738 - DNA, 348 bp, synthetic construct
  misc_feature 1..348: note = Description of Artificial Sequence: Synthetic coding sequence
  source 1..348: mol_type = other DNA
atgaccaagtcgaatggagaagaacccaaaatgggtggccgcatggagcggtttcagcagggggttcggaagcgcacccttctggccaagaaaaaagtccaaaacataacaaaagaagatgtcaagagttatctctttagaaatgcctttgtgctgctgactgtgaccgcagtgattgtggacgaaaagaccgaggcacagatcctgaccactcagttgatgaacaccgagtgggactctaaccccccattccggctgcaagtactgatccaccacaccgtgctgggagcaataacaccgatccttgccctgctgcagcagtttgctgagggtctgcctgaggtgtag

SEQ ID NO: 134739 - DNA, 1473 bp, synthetic construct
  misc_feature 1..1473: note = Description of Artificial Sequence: Synthetic coding sequence
  source 1..1473: mol_type = other DNA
atgactaagagtaatggcgaggagcctaagatgggcgggcgcatggaacgattccaacagggtgtccggaaacgcaccttgctagcaaagaagaaggttcagaatataactaaagaagacgtgaagtcttatttgtttaggaacgcgttcgttctgctcacgggaatggctgctctggacagcaaggctagtggaaagatgggcatgagagctgtcgtctattatatgaccaccacgataatagctgtggtgatcggcatcattatagtgattatcattcaccccggaaaggggaccaaagaaaatatgcacagggaggggaagatagtcagggtgactgccgcagatgcgtttctggacctgatacgcaacatgtttccacccaacttggtcgaggcctgtttcaagcagttcaaaacaaactacgaaaaacgatcgttcaaagtgcccattcaggctaacgaaacgctggttggagcagtgatcaacaacgtttctgaggcaatggagaccctgaccagaatcacagaagagctggtgcccgtgccagggagtgtgaacggagtcaatgccctgggcctcgtcgtatttagcatgtgctttggcttcgtaattgggaatatgaaggaacagggacaggcacttcgcgaatttttcgatagtcttaatgaagctatcatgcggcttgtggccgtcattatgtggtacgcacccgtgggaatcctgtttctgatcgcagggaaaatcgtggaaatggaggacatgggcgtgatcggaggccagctcgccatgtacactgttaccgtgatcgttggacttttaatccatgcagtgatcgtgctcccccttctttacttcctcgtgactcggaaaaatccatgggtattcattggagggttgctgcaggccctcattactgcgcttggaaccagcagctcgagtgctacgctccccattacattcaagtgtcttgaggagaataacggcgtggacaagcgcgttaccagatttgttctgcccgttggcgctaccataaatatggatgggactgccctgtatgaagccctggcggccatatttatcgctcaggtcaataacttcgagctgaactttggccagatcatcacaatttctataaccgcaactgccgcctcaataggtgctgctggcatccctcaggccggcctggttactatggtcattgtgcttacctccgtcggcctccccacagacgatataactctcatcatcgctgtggactggttcctggatcggctgcgcactacaacaaatgtgctgggtgacagtcttggagcggggatcgtagagcacctgtctcgacacgagttgaagaacagagacgtagagatgggaaattcagtaatcgaggaaaatgagatgaagaagccttatcagctaattgcacaggataatgaaacggagaagccaattgattccgaaactaaaatgtag

SEQ ID NO: 134740 - DNA, 324 bp, synthetic construct
  misc_feature 1..324: note = Description of Artificial Sequence: Synthetic coding sequence
  source 1..324: mol_type = other DNA
atgacaaaatcgaacggagaagagccaaaaatgggtggcagaatggaaaggtttcagcagggggttagaaagagaaccctgctggctaaaaagaaagtgcagaacataactaaggaggacgtaaagtcctacctgttcagaaacgcctttgtactgctgaccgtcactgcagtcattgtaggaaccatcctgggattcaccttacgaccctaccggatgtcttacagggaagtgaagtacttcagctttccaggcgaacttctgatgagaatgctgcagatgcttgtcttacctttgatcatctctagtctagtcactgggtag

SEQ ID NO: 134741 - DNA, 324 bp, synthetic construct
  misc_feature 1..324: note = Description of Artificial Sequence: Synthetic coding sequence
  source 1..324: mol_type = other DNA
atgacaaagagcaacggcgaggaacccaagatgggagggaggatggaacggtttcagcagggggtaagaaagcgcactctactggccaagaaaaaagtccagaacattaccaaggaggacgtaaaaagttatctgtttcggaatgcattcgtgctattgaccgtgaccgctgtgatcgtcggtacaatcctcggcttcaccctgcgtccttacagaatgtcctaccgcgaggtaaaatacttctcttttccaggtgagctgctgatgagaatgctccagatgctcgtactgcccctgatcattagcagccttgtaaccgggtag

SEQ ID NO: 134742 - DNA, 306 bp, synthetic construct
  misc_feature 1..306: note = Description of Artificial Sequence: Synthetic coding sequence
  source 1..306: mol_type = other DNA
atgactaagagtaacggtgaggaaccaaagatgggggggagaatggaacggtttcagcagggcgtgcggaagcgtacacttcttgcaaaaaaaaaagtgcagaatattacgaaggaagatgtgaaatcttatttgtttaggaacgctttcgttctgctgactgtgaccgcggttatcgtggggacgattctgggattcactcttcggccctatagaatgtcttatagggaagtaaagtatttctcgttcccaggcgaactactgatgcgcatgctgcagatgctggttctgccgcttattatttag

SEQ ID NO: 134743 - DNA, 987 bp, synthetic construct
  misc_feature 1..987: note = Description of Artificial Sequence: Synthetic coding sequence
  source 1..987: mol_type = other DNA
atgaccggtgtgttcgactcattggtggcggatatgcatagtactcagatcgccgcgtcctccacatatcaccaacatcagcaaccccctagtggcggcggcgccggcccaggaggaaactcatcctcctcctccagcttacataaaccgcaggaatccccaaccctaccagtgagcaccgcgacagacagctcctactatactaatcagcaacaccccgctggcggaggcgggggtggtggatcgccatacgctcacatggggtcataccaataccaagcctctggactgaacaatgttccttattctgccaaatcctcctatgatctgggctatacagccgcttataccagctacgctccttatggaacatcttcatcccccgccaacaacgaaccagaaaaagaggatcttgagccagagatacggatcgtgaacggcaagccaaaaaaggtgaggaagcctcgtacaatttactctagcttccaactcgccgctcttcagcgtcgttttcagaagacccagtatcttgccttgccagagagggcggaactcgcagcctctctgggacttactcagacccaggtcaaaatttggttccagaaccggcgatccaaatttaaaaagatgtggaagtccggcgagatcccatctgaacaacatcccggcgcatccgcatccccaccatgcgcttccccccccgtttccgcccccgcctcctgggactttggtgtgccacagaggatggccggcggcgggggacctggctccggagggagtggcgcaggctcttctgggtctagcccttcctctgccgctagcgcattcctgggcaactatccatggtaccatcagacatcaggctcagcgtcacatctgcaagctacagcgcctcttctccacccaacccaaactcctcaaccgcaccaccatcatcatcaccacggcggcgggggcgcacccgtctcagctgggacaatattctag

SEQ ID NO: 134744 - DNA, 1359 bp, synthetic construct
  misc_feature 1..1359: note = Description of Artificial Sequence: Synthetic coding sequence
  source 1..1359: mol_type = other DNA
atgctgcttaggatgctcagaatgataatcctcccactagttgtgtgttcattggtgtctggtgcggctagccttgatgcctcttgtcttggacgattgggaggaatcgctgtggcctatttcgggctcacaacgttatcagccagcgcgctggctgtcgccctggcctttataataaagccagggtccggcgcacagaccctccagagcagcgacctggggttggaagatagtgggccgccgccggtgcccaaggagaccgtcgacagcttcctggacttggctaggaatctgtttccctccaatttagtggttgctgcattcagaacatacgccaccgattacaaggtcgtgacgcagaactcgtcctcaggaaatgttacgcatgaaaagatcccaatagggactgaaatcgagggcatgaacattctgggactggttctgttcgccctggtgctgggtgtggcattaaagaaacttggttccgaaggcgaagacttaatcaggttttttaactctttaaatgaagccaccatggtgttagtgagttggattatgtggtatgtgcctgtgggaattatgttcctggttggatcgaaaattgtcgagatgaaagacatcatcgtgctggtgacatcgctgggaaaatacattttcgcgagtatccttgggcatgtcattcatggagggattgtgcttccgcttatttactttgtgttcactagaaagaacccttttcgcttcctcctggggctgctggccccatttgcaaccgcgttcgctacctgcagtagtagcgcaacccttccctccatgatgaagtgtattgaggagaacaacggcgtggataaacgcatcagcaggttcattctgcccatcggcgccacagtcaacatggacggagcagcaatattccaatgcgttgcagctgtattcattgcacagcttaataacgtagagctaaatgcgggccagatcttcaccatcctcgtcactgccaccgctagctccgtgggcgcagcaggagtccccgctggcggcgtgttaacaatcgccatcatcctagaagccatcgggctgcccacccacgacttgccactgatattggccgtggactggatcgtagatagaaccacaaccgtcgtgaacgtcgagggagacgctctgggggctggtatactgcaccatctgaaccaaaaggctacaaagaaaggcgaacaggaactggccgaagtaaaggttgaggctatccccaactgtaaaagcgaagaagaaaccagtcccttggttacacaccagaatcctgctggcccagtggcttccgcccccgaattggagagcaaagaatcggtcctttag

SEQ ID NO: 134745 - DNA, 705 bp, synthetic construct
  misc_feature 1..705: note = Description of Artificial Sequence: Synthetic coding sequence
  source 1..705: mol_type = other DNA
atgaacattctgggattggtcttgttcgccttagtcctgggggtcgctctcaagaagctcggtagcgagggtgaggatttaattcggttttttaatagtctgaacgaagcaacgatggttttggtgagctggataatgtgttctgccaccctgccaagcatgatgaaatgtatcgaagagaacaatggggtcgacaagcggattagcaggttcattctgccaatcggggccaccgttaatatggatggggctgccatttttcagtgtgttgccgctgtattcatcgctcagctcaataatgtggaacttaatgccggacagatcttcacaattctggttactgccacagcttccagcgtgggcgcggccggtgtccccgcggggggtgtgctaacaatagcaatcattctcgaggctatcggtctaccaacccacgacctccctttgatccttgctgttgattggattgtggacagaactacaactgtcgtgaacgtggaaggggatgcattaggagctggaatattgcaccacctcaaccagaaagccaccaaaaagggggaacaggaactagccgaggtgaaagttgaggccatccccaactgtaaatcggaagaggaaacgtcacccctggtgacccaccaaaatccggcaggacccgtagcctccgcacccgagctagaaagcaaggagtcagtgttgtag

SEQ ID NO: 134746 - DNA, 1575 bp, synthetic construct
  misc_feature 1..1575: note = Description of Artificial Sequence: Synthetic coding sequence
  source 1..1575: mol_type = other DNA
atgggaaagcctgccaggaaagggtgtgaatggaagaggttcctgaagaataactgggtgctactctctacggtcgctgcagtagtgctcgggattactactggagtgcttgtcagggaacactcgaacctgtccaccctggaaaaattttactttgcctttccaggtgaaattctcatgcgaatgcttaaacttatcatactccccctgattattagttccatgatcaccggagtggccgccctagactctaacgtgtccgggaagattggcctgagagcagtcgtttattacttttgcactacgcttattgccgtgatcctaggaatcgttctggtggtgagtatcaaacccggcgttacccaaaaggtgggagagattgcgagaactggttctactccagaggtgtccaccgtagacgccatgctggatctgatccgcaacatgttcccggaaaacctcgtgcaagcttgctttcaacaatacaagacaaaacgtgaggaggtcaagccacctagcgatcctgagatgaacatgaccgaggagtcctttacagccgtaatgaccactgctatctcaaaaaataagacaaaggaatacaagatcgtgggaatgtactccgacgggatcaacgtgctaggtttaatcgttttttgcctggtgttcgggctggttatagggaaaatgggggagaagggccagatcctggttgactttttcaacgccttgtctgatgctacaatgaagattgtccagatcatcatgtgttacatgcctctggggatactgttccttattgccgggaaaatcatcgaagtggaagattgggagatattccgcaaactaggcctgtatatggcaactgttctgactggtttggccatccactccatagtcattttgccgcttatttactttatcgtggtcaggaaaaatcccttccggttcgccatgggcatggcccaggccctgctgacagcattgatgatttcttccagtagtgcgacgctacctgtgacttttcggtgcgcagaagaaaacaaccaagtggacaagcggattactagatttgtgttacctgtcggcgccacaatcaacatggatggcaccgcactgtacgaggccgtggccgccgttttcatcgcccaacttaacgacctcgatctgggtataggacagatcattaccatctccattactgccacaagtgcgagtataggggcagcaggcgtgccacaggccgggctggtgacaatggtgattgttttatcagctgttggtctcccagcagaggacgtgaccctgatcatcgcggtggattggcttctagacaggttccgaacaatggtcaatgttctcggtgatgcttttggaaccgggattgtggagaagctgagcaaaaaggagctggagcagatggacgtgagttccgaggtaaatatagtgaacccttttgccttagagtctaccattctggacaatgaagacagcgacaccaagaagtcctatgttaacggaggattcgcggtggacaaaagcgacaccatctcatttacccagaccagccagttttag

SEQ ID NO: 134747 - DNA, 729 bp, synthetic construct
  misc_feature 1..729: note = Description of Artificial Sequence: Synthetic coding sequence
  source 1..729: mol_type = other DNA
tgatttttcaacgcactgagcgacgccactatgaagatcgtccagattattatgtgctacatgccgctgggtatcttatttctgatagccggcaaaattatcgaggtcgaagactgggagatctttcgtaagttgggcctatatatggctactgtgttgacaggtctggcaatacattccattgttatcctgcctctgatttacttcatcgttgtccggaagaacccgtttcgtttcgccatggggatggctcaggctcttctaacagctctgatgatctcgagcagcagtgcaacattgcctgtgacatttaggtgtgctgaggagaacaaccaggtggataagaggataacaagatttgtgcttcccgtgggagccaccatcaacatggatggcaccgccctctatgaggctgtcgcagccgttttcattgcccagttgaatgacctggacctggggattggacagataatcaccatccgggatcgttttaggacaatggttaatgtcctaggagacgccttcggaacgggtatcgtagagaagttgtctaagaaggagctggagcagatggacgtttcctctgaggtgaacatcgtcaacccgttcgccctggaaagcactatcctagacaacgaggactcagacaccaagaagtcttacgtgaatggagggttcgcggtggacaaatccgatactatatcatttacccagacctcccagttctag

SEQ ID NO: 134748 - DNA, 1647 bp, synthetic construct
  misc_feature 1..1647: note = Description of Artificial Sequence: Synthetic coding sequence
  source 1..1647: mol_type = other DNA
gagactccagtgcttccaattatggttgccgatcctcccagggattccaaggggcttgctgccgctgagccaaccgcgaacggcggcctcgccctggcgagcatcgaggatcagggagctgcagccggagggtactgtggcagtcgagatcaggttaggcgatgcctgagggcgaacctcctggtgctactcactgtggtggcagtcgtggctggagtcgccctcggccttggggtatcgggcgctggcggggccctcgctctggggcctgagcgtctgagtgcttttgtgtttccaggagaactgctgctgcggctgctccggatgattattttaccactggtggtttgtagcttaattggcggcgccgctagcctcgatcccggcgctctggggcggttgggggcttgggccttattgttctttctggtcacaacgcttctggctagcgcactgggcgtaggcctggcacttgctctacagcctggcgctgcttccgctgcaattaacgcctcagtgggggccgctgggtccgccgaaaacgcaccctctaaagaagtgctggatagcttcctcgatctcgcacgaaatatcttcccgagtaatctggtcagcgccgcctttcgaagctactcaactacatacgaggagcggaacatcacaggtaccagagtgaaggtccctgtcggacaggaagtggaaggaatgaatatcttagggctggtagtgttcgccattgtatttggagtggctcttagaaaactgggcccggagggcgaattgctcatccgcttctttaactcatttaatgaagccactatggtattggtttcttggataatgtggtatgcccctgtgggaatcatgttcttggtggcgggaaaaatagtggagatggaggatgttggcctcctcttcgcaagattaggtaaatacatcctttgttgcctcctggggcatgcgatccatggacttctcgtgctacctctaatctactttctattcactcgcaaaaatccctaccgatttctgtggggtattgtaacacccctggccacagcattcggtacctcaagttcgagtgcgaccctgcctcttatgatgaagtgcgtcgaagaaaacaatggcgtggctaaacacatttctcgatttatactgcccattggggcgacagtaaatatggacggtgctgccctgttccagtgtgtcgccgccgtgttcatagcccagttatctcaacaatctcttgattttgtgaagataatcaccatacttgtgacggccacggctagcagcgtaggagccgccggcattcctgccggcggcgtgcttaccctcgctatcattctggaggcagtgaatttgcccgtggaccatatcagtctgattcttgctgtagattggctggtcgatcgcagctgtactgtgctgaatgtggagggcgacgccctgggcgccggcctactgcagaattacgttgaccgcaccgaatcacgtagcactgaaccagagctgattcaggtaaagtcagaattaccccttgaccctctaccagtgccaaccgaagagggaaatcctctgttaaagcactacagagggccagccggggacgcaacggttgctagcgaaaaggaatcagtgatgtag

SEQ ID NO: 134749 - DNA, 942 bp, synthetic construct
  misc_feature 1..942: note = Description of Artificial Sequence: Synthetic coding sequence
  source 1..942: mol_type = other DNA
atgaacatactggggttagtggtgtttgctatcgtgtttggagttgctcttaggaagctgggacccgaaggtgagctgctcattcgcttctttaacagcttcaacgaggctaccatggtgcttgtgtcttggatcatgtggtatgcccctgttggcattatgtttctagtagctggcaaaattgtggagatggaggacgtgggcttgctctttgcccgactagggaaatacattctgtgctgtcttctcgggcacgcaatccatggtctgctggtgctccctctcatatatttcctgttcactcggaaaaacccgtacagattcctgtggggcattgtgactcccctggctaccgcctttggaacatcatcctcttccgccaccctgccactgatgatgaaatgtgtggaggaaaataatggggtcgccaagcacataagccgcttcatcctcccaataggggcgacggtaaacatggatggggcagcactgttccaatgcgtggccgctgtgtttattgcccagctctcccagcagtctctggattttgtaaagattattaccatcctcgtgaccgcaacggccagcagcgttggcgcagccggaatcccagccggcggagtcctcactttggctataattctggaagcggttaatttgccagtggaccatatctcacttatattggctgtagattggttggtagatcggtcctgtaccgtgctgaacgtggagggcgacgctctcggggcaggtctgcttcagaattatgtggatcgcacggagagtcgatccactgaacctgagcttattcaggtaaaaagtgagctgcccctcgatcctctgccagttccaactgaggaggggaaccccctgctcaagcattatagagggcccgccggcgacgccacggtcgcttctgaaaaggagagcgtgatgtag

SEQ ID NO: 134750 - DNA, 1020 bp, synthetic construct
  misc_feature 1..1020: note = Description of Artificial Sequence: Synthetic coding sequence
  source 1..1020: mol_type = other DNA
atgtattccaccacctatgaggaacgaaatattacaggaacccgcgtgaaggtgcccgtgggtcaggaagtagaaggtatgaacattttggggttggtcgtcttcgccatcgtcttcggggttgcacttaggaagctcgggcctgaaggggaattgctgattagattcttcaactctttcaacgaggctacaatggtgctcgtgtcctggatcatgtggtatgctcctgtgggtatcatgtttctcgtggccggcaaaatcgtggaaatggaggacgtgggtctgttgtttgcacgtttgggtaaatatatcctgtgttgccttctcggtcatgccatccacggccttctagtgctaccccttatttacttcctttttacccgcaagaatccttacagattcctttggggtatcgttacacctttggcaactgccttcggtacatcgtcgagttcagccactttgccgttgatgatgaagtgcgtggaagagaataacggagtggccaagcacatttcgcggtttattttaccaataggcgcaacagtgaatatggatggagccgccctcttccagtgcgtggccgcggtctttatcgcccaactgtcccagcagagtctggacttcgtgaagataatcaccattttagttactgctaccgcctccagtgttggtgccgccggcattcctgcaggaggcgtcctaacacttgctatcatcctggaggcagtgaatcttcccgtggaccacatctccctgatcctggccgttgactggctggtcgatcggtcttgtacggtccttaatgtggagggtgacgcactgggagccggcctcttgcagaattacgtggacaggacagaatctaggagtactgagcctgaattgatccaggtcaagtccgagctacccttggatcccctgcccgtaccaacagaggaaggaaatccactgctaaaacattacagaggaccagcgggagatgcaacagttgcgtcagagaaagagtcagtgatgtag

SEQ ID NO: 134751 - DNA, 1626 bp, synthetic construct
  misc_feature 1..1626: note = Description of Artificial Sequence: Synthetic coding sequence
  source 1..1626: mol_type = other DNA
atggtggcagatcctcctagagacagcaaaggtctagccgccgctgagccaactgccaatggcggtctggcactcgcaagcatcgaagaccagggagcagccgcaggtgggtattgtggctctagagatcaggtacggaggtgtttgagagctaacctgcttgtgctgttgaccgtagtggcggtggtggccggcgtggcactcgggcttggggtgtcaggcgccgggggggccctggcactggggccagagaggctatccgcatttgtatttcccggagaacttctcctgcgcctcctgcgaatgattatattgcctctggtcgtctgttccctgattggaggagcggccagtcttgacccaggggccctgggtcgactgggagcatgggcccttctttttttcttggtaaccactctgttagcaagtgctctcggggtgggcttggctctggcccttcagccgggtgcggcctcagctgccatcaacgcctctgtaggggccgcgggcagcgccgaaaacgccccgagcaaggaagtgctggactccttcctggatctagccaggaacatatttccaagcaacctcgtctccgccgctttcaggtcttactctacaacatacgaggaacgcaacattaccggcacacgggtcaaagtgccagtagggcaagaggtggagggcatgaatattctgggcctggttgtctttgccattgtgttcggtgtggcccttaggaagctaggccccgaaggggagctcctcatccggttctttaacagctttaacgaggctaccatggtcctagtctcctggatcatgtggtatgcaccagtcggaattatgttcctggtcgctgggaaaatagttgaaatggaggatgtcggattgttatttgcccgcttgggaaagtacattctctgttgtctgctgggtcacgccattcatgggctgctggtactgccactgatttattttctgttcacacgcaagaacccatatagattcctgtggggaattgtgacacccctggcaactgcctttggcacaagctcctcctcagccacgctccctcttatgatgaagtgtgttgaagaaaataatggggtcgctaagcatatcagtaggtttattctcccaatcggggcaaccgtcaatatggacggtgccgcactgtttcagtgtgtggcggctgtgtttatcgcgcagctcagccagcagtccctggactttgttaaaatcatcactattcttgtcactgcgaccgcaagctctgtgggtgctgcaggcatcccggccgggggagtgttaactctggcaattatactggaagccgttaatcttcccgtcgatcatatcagcctgatcctcgccgtcgactggcttgtggatcggtcttgcactgtcctgaacgttgagggcgacgcccttggcgctggcctcctccagaactacgtggacaggaccgagagccggagtaccgagcctgaactgattcaagtgaagtcagaactgccgctcgaccctcttcctgtgccaaccgaagaaggcaatccactgttgaagcactatagagggcccgccggtgacgctacagtggcttcagagaaagaaagcgtgatgtag

SEQ ID NO: 134752 - DNA, 1308 bp, synthetic construct
  misc_feature 1..1308: note = Description of Artificial Sequence: Synthetic coding sequence
  source 1..1308: mol_type = other DNA
atggccgagtcttctagcgagagcgaccattttcgttgtagagatagacttagtccatgggcagcccgctctacacatcgcggcacaagaagtctacccaccgtggaagtgactgagaaagtgaacaccataacctccactctccaggatacgtcgcggaacctgaggcaggtggaccagatgctggggcggtatagagaatattcgaatggacaagccggggccatcgaacacctgaaagagtccctggaacaatctatcgatcaactgagatctcagcgtctcctgcgcaatagcggcggccgaagcattagtgtaacgagcttgagcgccagcgacctggatggggggactggatctgaattgcaccacttccctcctacttccccgttgaaggactacggagacccacaaggcataaagcgcatgagaagccggactggtgtaagattcgtccaagagacagacgatatgacccaactccatggctttcaccagagcctgagagacttgtcctctgagcaaatacggctgggcgatgacttcaatcgggagttgagtagacgctcacgctcagatgcagaaacaaagagagctctcgaagagctgacagaaaaactgaatgaggcacagaagcaggaagtggttagcgatcgtgttgaacgacgcctacaggagcttgagcgagaaatgagaacagagcgagagctggtggagaggaggcaagatcagctgggactcatgtccctgcagctccaggaagcattgaagaagcaggaggccaaagctgatgagcacgagggagctatcaagaataaactaagacagactgagacagagaaaaatcagctcgaacaggagttagagctgagccggagattgctaaatcagagtgaaggatcccgtgaaactctgcttcaccaggtagaggagctgaggacacagcttaccaaagccgaaggcgacagaaaaggattgcagcaccaggtatctcaaatatctaagcagcagtcaaactatcaggatgagcagggggaggattggcgattccgtcggggtgtggagcgcgaaaaacaggacttggaaaagcagatgagtgacttacgggtgcaactgaacttctccgctatggctagcgagcttgaagaggtaaagagatgcatggaacggaaggacaaggagaaggcccatttggcgtcccaggtagaacacatcaatagaaagtgtctgctgaacctggttcaggatctcgactgtaaagataacgagattctcacatatagcttgcagagcccactgcatgtctag

SEQ ID NO: 134753 - DNA, 1047 bp, synthetic construct
  misc_feature 1..1047: note = Description of Artificial Sequence: Synthetic coding sequence
  source 1..1047: mol_type = other DNA
atgaatgaccccaattcttgcgttgacaatgccactgtgtgctccggagcttcatgtgtggtgcctgaatccaattttaataacattttaagtgtggtcctcagtactgtgctaaccatactcctagcactcgtgatgttttccatgggatgcaatgttgagattaagaagttcctcggtcacatcaaacgaccatgggggatctgtgtggggtttctgtgtcagttcggcattatgcccctaactgggttcatccttagtgtcgcctttgatatcttgcctctccaggctgtagtcgtgctaattatcggctgctgccctggggggacagcctctaacattctggcttactgggtcgacggagatatggatctgagcgtgtctatgacaacctgtagcaccctgctggctctgggaatgatgccgctctgtctgttgatatacaccaagatgtgggtggactcgggaagcatagtgatcccatacgataatattggaactagcctggttagccttgtggtccccgtcagtattggcatgttcgtcaatcacaaatggcctcagaaagccaagataatcctgaaaataggttctatcgccggtgccatcttgatcgttcttatagctgttgtgggcggaatactgtatcaaagcgcctggattatcgcacctaagttatggatcatcggtaccatcttccccgtcgcggggtactcactagggttcttactcgcacggattgcaggactgccatggtaccgctgtcggacagtggccttcgagactggtatgcaaaacactcagctgtgctccacaatcgtgcagctgtcattcactcctgaagagctgaatgttgtcttcacctttcccttgatttacagtatcttccagcttgccttcgccgcaatctttctcggtttttatgtcgcttacaagaagtgccacggtaagaataaggctgaaatccccgagtcaaaggaaaatgggaccgagcccgagagttccttctacaaagccaatggcggattccagcctgatgaaaagtag

SEQ ID NO: 134754 - DNA, 1434 bp, synthetic construct
  misc_feature 1..1434: note = Description of Artificial Sequence: Synthetic coding sequence
  source 1..1434: mol_type = other DNA
atggtgttaatgcaggacaagggcagctcgcagcagtggcctggactcggcggagaaggaggcggtacaggacctctgagtatgctgagagccgctctcttgttaatcagcctcccttggggagcacagggaaccgccagcacctcgttgagtacggctgggggccacactgtcccccctaccggcggccggtacctgtcaattggggacggctcagtcatggaatttgagttccccgaagacagcgagggcatcatcgtgatatccagccagtatcccggccaggcaaacaggactgcaccaggaccaatgctgagggtcaccagcctggatacagaggtcctgacgatcaagaacgtgtccgctatcacttgggggggtgggggtggtttcgttgtgtctatccatagtggtctcgccggactggcgcccctacacattcagctcgtggatgcgcacgaggccccccctacacttatcgaagagagacgagatttttgtatcaaagttagtcccgccgaggatactcctgcaaccctgtcagcagacttagcccacttctctgagaatcccattctgtacttactgctacctctgatttttgtcaacaaatgttctttcggttgcaaggtggaactagaagttctgaaaggattgatgcagagcccacaacctatgctcttaggcctccttgggcagtttctggtgatgcccctgtatgcttttttgatggcaaaagtcttcatgctccctaaggcattggccctgggcctgatcattacgtgcagctcacctggggggggtggtagttacttattttccctgttgctggggggagacgtaaccttagcaatctctatgacttttctgtctaccgtggccgctacgggcttcttgccactgtcaagcgctatctactcccggctgctgtccattcacgaaaccctgcatgtgcccatcagtaaaatcctgggaaccctcttgtttatcgccatccctattgcggtgggcgtgctcatcaagtccaaactgccgaagttttcccagttgctcttacaagtggtcaaacccttctcctttgtgttactccttggcgggctctttttagcatatcgcatgggagtgttcatcttagctggaattaggctgcccatcgtgctcgtagggattacggtacctctcgtgggactactggtcggatactgcctggccacctgtctcaagctgcctgttgcccagcgtagaaccgtgagcatcgaggtgggagtacagaattcgttattggcgctagccatgctgcagctaagcctccggaggctccaggcggattacgctagtcaggcaccattcatcgttgctctaagcggcacatccgagatgctcgcgctggtgattggccacttcatttatagtagtctttttccagtcccatag

SEQ ID NO: 134755 - DNA, 1347 bp, synthetic construct
  misc_feature 1..1347: note = Description of Artificial Sequence: Synthetic coding sequence
  source 1..1347: mol_type = other DNA
atggtgttaatgcaggacaaagggtctagccaacagtggccaggcctcggaggggagggcggggggaccggacccctcagtatgctgcgtgccgccttactgctgatctcgctcccgtggggggcacagggcactgcgtccacctctttgagtacggccggcggacacacggtcccgcccactggcggcagataccttagcatcggagatgggtcggtcatggagttcgagtttcccgaagactctgaggggattatcgtgatctcctcacagtatcccggacaagctaatagaacagctcctggaccaatgttaagagtgacatccctggacacagaggtgctgaccattaaaaacttagtcgacgctcacgaggctcctcctactctgatagaggagcgcagggacttctgcatcaaggtaagcccggcggaagatactcccgccacactgtccgctgatttggcccatttttccgagaacccaatcctgtatcttctattgcccctcatctttgttaacaagtgttcttttgggtgcaaggtagagctggaggtgttgaaaggcctgatgcagtccccccagcccatgttactgggtctccttggtcagttcctggtcatgccactgtacgcatttctcatggccaaggtttttatgttgcccaaagccctggctctcgggctaatcataacttgtagctctccaggtggcggtgggagctatctattttcattactgttagggggcgatgtgaccctcgccattagtatgacgtttttgagcacagtggccgccactggtttcctgccgctgtcttcagcaatttattcgcggctcctgtctatccacgagaccctgcatgtgccaatcagtaaaatactcggaactctcttgttcatcgccataccaattgccgtgggcgtcctcatcaaaagcaagctgccaaagttctcccagttgttattgcaggtggtgaagcccttcagttttgtgctgctcctgggcgggctgttcttggcgtaccggatgggcgttttcattctcgcaggcatccgcttgccaatagtactggtggggataaccgtgcctctggttggtctgctggtcggctactgcctcgccacctgtctgaaactccccgtggctcagcggcggacagtgtctatcgaggtcggcgttcaaaattccctgctggcccttgccatgctccagttgtcactcaggcgacttcaggctgattacgcctcccaggccccattcattgtggctttgtctggaacttccgagatgctggccttagtgattggtcacttcatttatagtagcctctttccagtaccttag

SEQ ID NO: 134756 - DNA, 1599 bp, synthetic construct
  misc_feature 1..1599: note = Description of Artificial Sequence: Synthetic coding sequence
  source 1..1599: mol_type = other DNA
atggcaggacctagaccacctggagactctccagcaataaaagaagacagtaccgggctgggtcccacccacgaacctttcagtgggcagcctaactccacttcaggagacgtactgctatcgcggcgggggccggggcacgcaatccgccctccaggccgggccatggtattgatgcaggacaagggctcttctcagcagtggccaggattggggggtgagggtgggggaacgggccccctgagcatgctgcgagccgccctcctgctcatctctcttccctggggcgctcaaggcactgcctccacgagtctttccaccgcaggggggcacacggtgcccccaactggaggaaggtatctgtccattggagacggctccgtgatggaattcgagttccctgaggattccgaaggcatcatcgtgatctctagccagtaccccggacaagctaatcgtacagcgccaggccctatgttaagagtcaccagcctggatacagaggtcctgacaatcaagaacgtgtcagctatcacatggggaggcggaggaggttttgtggtgagtattcatagtggccttgccgggctggctccccttcacatacagttggtggatgcccacgaggccccccccactctgatcgaggagagacgggacttctgtattaaagtgtctcctgccgaagataccccggctacactgtcagccgatctggctcacttctccgaaaacccaatcctgtatctgctcctgcctctgatcttcgttaataaatgctcatttggttgtaaggtggagctggaggtgctgaaggggcttatgcagtcccctcagcctatgctgctgggcttattagggcagtttctggtgatgcccctgtacgcctttctgatggcaaaggtcttcatgttgccgaaagccctggccctgggcctgattatcacctgcagcagcccgggcggtggcggctcttacttgttcagtctgctgttaggtggcgatgtcacgttggccataagcatgactttcctttcaacggtggccgcgacaggcttcctgcccctgtcctccgcgatctatagtcgattactgtcaatacatgaaacgctgcacgtcccgattagcaagatactgggcacactgttgtttatcgctatacccatcgcagttggcgtgctgatcaaaagcaagttgcctaagttctcacagctccttctgcaggtggtgaaacctttttcctttgttcttctcttgggaggcctatttttggcgtaccgaatgggggtgtttatacttgccgggatacggttgcccatagtgctggtcggtatcacggtccctctggtcggattgctcgtagggtattgccttgcaacctgcctcaaactaccagtcgcacaacgccgaaccgtatcaattgaagtgggcgtgcagaactcattgttggctctggcgatgctgcagctgtccctccgaagattgcaagcggattacgcatcccaggctccttttattgtcgctttaagcggaacctctgaaatgctggcccttgtgattggacatttcatttactctagcttattccccgtcccatag

SEQ ID NO: 134757 - DNA, 1434 bp, synthetic construct
  misc_feature 1..1434: note = Description of Artificial Sequence: Synthetic coding sequence
  source 1..1434: mol_type = other DNA
atggtgcttatgcaggacaagggctccagccaacaatggcctgggttgggtggcgaagggggaggcaccggtccgctctctatgctcagagccgcactgctacttatctccttgccatggggggcccaaggcactgcgagcactagtctgtccacagccggaggtcacacagtgccacccaccggagggagatacctctcaataggcgatggatccgtcatggagttcgagtttcccgaggattctgaaggaataatcgtaatctcctcccagtatccaggccaagcaaaccgcacggccccaggacccatgctgcgcgtcactagccttgatactgaggtgctgaccattaagaatgtgtctgcaatcacatgggggggagggggtggctttgttgtcagcatccactctggattagctggcctggcacccctgcacatccagttggtggacgcccacgaggcacccccgactctgatcgaagagaggcgggatttctgcattaaagtgtcccctgccgaagatacccccgccacacttagtgcagatctggcccatttttctgagaaccccattctttatctgctgctcccattaattttcgtgaacaagtgtagcttcgggtgcaaagttgagttagaagttttgaaaggactgatgcaatctccacaaccaatgctgcttgggctgttgggacagttcctcgtgatgccattatatgcttttctaatggcgaaagtctttatgctgcccaaggcactcgccctagggctgattatcacatgctcgtctcctggaggcggaggaagctacttgtttagcttgttactaggcggcgatgtgacgcttgcaataagcatgaccttcctctccacagtcgccgccaccggatttttgcccctcagctctgctatatatagtagactgctgtctatccatgaaacattacatgttcctatatccaagattttaggaaccctcctgttcattgccattccgatcgcagtgggggtgttgatcaagagcaaactgcccaaattcagtcagctgttattacaagtcgtaaagccgttttcatttgtgcttcttctgggagggctctttttggcttatagaatgggggtgtttatcctagcgggtattcgactgcctattgtactagttggaattaccgttccattggtgggactgctggtggggtattgtctggctacatgcctgaaactccccgttgctcagaggagaaccgtgtccattgaagtgggcgtccagaactccctgcttgctttggctatgttgcagctgagtttgaggaggctgcaggcagattacgcttcacaggctccctttattgtagcgctctccggcaccagcgaaatgctggccttggttattggccatttcatttacagtagtctgtttccggtaccatag

SEQ ID NO: 134758 - DNA, 657 bp, synthetic construct
  misc_feature 1..657: note = Description of Artificial Sequence: Synthetic coding sequence
  source 1..657: mol_type = other DNA
atggtgttgatgcaggacaaggggtccagccaacaatggcccgggctcggcggggaagggggtggcaccgggcctctgtccatgctgagggcagccttgctactgatctctctgccatggggcgcccagggcaccgctagcacatcgctttccacagccggtggccacacggtgccgcccaccggtgggcgctacttgtctatcggagatggtagcgtaatggaattcgaatttcccgaagatagtgaaggaataatcgttatcagctcccagtaccccggacaggccaataggacggctcctggcccaatgttacgggtgacatccctcgatactgaagtgctaactattaagaatgtttctgccatcacctggggggggggggggggctttgttgtgtccattcattcagggctcgctggactggcacctctccacatccagctggtggacgcacatgaggccccgccgaccctgatagaagaacgaagggacttctgtataaaagtctctcccgcagaagatacgcccgctaccctctctgctgacttagctcatttcagcgaaaatccgattctgtacctgctcctgcccctgatttttgtgaataaatgtagcttcgggtgcaaggtggagttggaggtcctgaaagggtag

SEQ ID NO: 134759 - DNA, 1314 bp, synthetic construct
  misc_feature 1..1314: note = Description of Artificial Sequence: Synthetic coding sequence
  source 1..1314: mol_type = other DNA
atggacggtaacgataatgtgaccctgctgttcgctcccctcctcagagacaattatacattagctccgaacgccagctccctgggaccgggaactgatctggctctggcacccgcatcttctgccgggcctggaccaggcctgtcacttggccctggaccctcattcgggttctctcctggccccacaccgactccagaaccaactacatcaggtctggcaggaggggctgcatcacatggaccgagtccgttcccgcggccgtgggcaccgcacgcgctgccattttgggacacaccccttaatcatggcctcaacgttttcgtgggagcggcactgtgcataactatgcttggactaggatgcacagtcgacgtgaaccatttcggtgcccatgttcgccgtccagttggcgctttgctggccgctctttgccagtttgggttactcccattactcgcgttcttgctggcactggcatttaaactggatgaggtggctgccgtggccgtcctgctctgtggttgctgccccgggggcaatttgagtaacctcatgagtctcctggttgacggagacatgaatctctccatcataatgacaatctcgagcaccttactcgcactggtattaatgcctttgtgcctgtggatttactcctgggcttggatcaatacccccatcgtccaactcttacccctgggaaccgtcactctgaccctctgtagcacattgattcctatcggtctgggtgtgttcataagatacaaatactctcgcgttgcagactatatcgttaaagttagcctctggtccctgcttgtgaccctggtggtgctcttcatcatgactggaactatgctcggtcccgagctcctggcgagtattcctgctgctgtttacgtgattgcgattttcatgccgctcgccggctacgcatctggctatggtcttgccacgctgttccatctgcccccaaactgtaagcgcactgtttgtctagagaccgggtcccagaatgtgcagctttgcacagccattttaaaactggctttcccgccacagttcataggatcaatgtacatgttcccactcttatacgcactctttcagtctgcagaagcaggtatcttcgtactcatctataagatgtatgggagcgagatgctgcataaacgtgatcccttagatgaggacgaagatacagatatttcttataaaaaacttaaggaagaggagatggctgatacctcatatggcactgtgaaagccgagaatattatcatgatggagaccgcccagacatccctgtag

SEQ ID NO: 134760 - DNA, 1134 bp, synthetic construct
  misc_feature 1..1134: note = Description of Artificial Sequence: Synthetic coding sequence
  source 1..1134: mol_type = other DNA
atgagggctaattgctcaagttcctccgcatgccccgctaacagctcggaggaagaattacccgtcggactggaggtccacggtaacctggaactcgttttcacagtcgtgtcaacagtaatgatgggcctgctgatgttcagtttgggttgcagcgtcgagatcagaaagttatggtctcatattcggagaccctgggggatcgccgtagggctgctgtgtcagttcggcttgatgccatttacagcttatctgttagccatctctttcagccttaagcctgtgcaggccatcgcagttctgatcatgggatgttgtccaggcgggacaatcagtaatatctttaccttctgggtcgacggagacatggacctgtcgatcagcatgaccacctgcagcaccgtagcagcacttggaatgatgcccctgtgcatatatttgtacacctggagctggagcctgcaacagaatcttacaatcccataccaaaacataggcatcacacttgtttgcctgacgattcctgttgcatttggagtatatgtaaattaccggtggccgaaacagtccaaaataatattgaaaatcggcgcagttgtggggggggtactcctcctggttgttgcagtggccggcgtggtcttggcaaaagggagctggaatagtgatattaccctgttgaccatttcatttatcttcccactgatcggtcatgtgacggggtttctgctcgcacttttcacccaccagagctggcagagatgccgaactatttccctggaaacgggagcccaaaatattcagatgtgcatcaccatgctccagctgtcattcactgccgaacacctggtccaaatgttgtcctttcccttggcatacgggcttttccaacttattgacgggtttctgatcgtggccgcataccaaacttacaaacgccgtctcaagaataaacacgggaagaagaactctggttgcaccgaggtttgccatacccgtaaaagcaccagctcaagagagactaacgctttccttgaagtgaacgaagagggagccatcactccaggacccccgggccccatggattgtcaccgcgctttggaacctgtcggacatatcacatcgtgtgaatag

SEQ ID NO: 134761 - DNA, 2184 bp, synthetic construct
  misc_feature 1..2184: note = Description of Artificial Sequence: Synthetic coding sequence
  source 1..2184: mol_type = other DNA
atgctgcgcatccctgtgcgaaaagctctggtcggtctcagtaaatctccaaagggttgcgtgaggaccaccgctaccgctgcttcgaatcttattgaagttttcgtggacggacagagcgtaatggtggagcccggcacaacagtgcttcaggcttgtgagaaggtcggtatgcagattcctaggttttgctaccacgaaaggctgagcgttgctgggaactgtcgtatgtgtttagtagaaatcgaaaaagcacctaaggtagtcgctgcctgcgccatgccagttatgaaaggatggaacatcctgacaaactcagaaaagtcgaaaaaggctcgtgaaggggtgatggaattccttctggctaaccacccattagactgccctatctgtgaccagggcggagagtgtgatctacaggatcaatccatgatgtttgggaacgatagatcacggttcctggagggtaagagagctgtggaagacaagaacataggtccactggtgaagactatcatgacccgctgtatccagtgtacgagatgtattcggtttgcctccgagatcgccggagtggatgacctcggtacaaccggacgcggaaatgacatgcaggtcggaacctacatcgagaagatgttcatgtcggaactgtcaggcaacatcattgatatttgtccagtgggcgcactaaccagcaagccctacgcatttactgcccgaccttgggagacacggaagaccgagagcatcgatgtcatggacgctgttggctctaacattgtcgtttcaaccagaactggagaagttatgagaattctcccacgcatgcacgaggacattaacgaggagtggatcagtgacaaaacccgcttcgcctacgacgggttgaagagacagagactgaccgaaccgatggtaagaaatgagaaaggactgctgacgtataccagctgggaagatgccctgtctcgggttgccggtatgctgcagtcctttcaaggcaaagacgtggcagctatcgctggaggcctggtcgatgcagaagcactcgtggctctgaaggatctattgaacagagtagacagcgatactctgtgcaccgaggaggtgttccctacagccggcgctggaacagatctccgctccaactacctgctcaacacaaccatcgctggcgtcgaggaggccgatgttgtcctgctggtcggaacgaatccgagattcgaggcacctctgttcaacgcgcgtatacggaagtcttggctgcataacgatctgaaagtggcactgattggcagtccagtggacctaacatacacgtatgaccacctaggcgacagcccaaaaatcctccaggatattgcgtccggctcccacccattcagccaagtgctcaaagaggcaaaaaaaccaatggtcgtcttgggctcatctgcgctgcaacggaacgacggcgccgctatattggctgcagtctcttctattgcccagaagatccggatgacctccggcgtgaccggcgactggaaagtcatgaatatcctccatcggatcgcctcccaggtcgccgccctcgaccttggatacaaaccaggcgttgaggccatcagaaaaaatcctcctaaagttctgttcctgttaggtgccgacgggggttgtataaccaggcaggatctacccaaagactgcttcatcatataccaaggccatcacggcgacgtgggcgcccccattgctgatgtgattttgcccggtgcagcttatacagagaagagtgccacatatgtaaatacggagggacgcgcccagcagactaaagtggctgtgactcctccaggactagctagggaagattggaagatcattcgggcactctctgaaattgctggtatgactcttccctatgacaccctggaccaagtaaggaacaggttggaagaagtgagccctaatctcgtccggtacgacgatatagaaggagccaactattttcagcaagcaaatgagctctccaaattagtaaaccagcagctcctggctgaccccctggtgccaccacagctgacgatcaaggatttctatatgactgactctatctccagagcctctcaaacgatggccaagtgtgtgaaagcagtcaccgagggtgcgcaggccgtggaggagccttccatctgctag

SEQ ID NO: 134762 - DNA, 492 bp, synthetic construct
  misc_feature 1..492: note = Description of Artificial Sequence: Synthetic coding sequence
  source 1..492: mol_type = other DNA
atgaccggcgacaaaggaccacagcgtctctccgggtctagctatgggagtatatcttcccccaccagtcctacatcccctgggccccagcaagcgcccccaagagaaacatacctgtcggagaaaatccccatccccgacaccaaaccaggtacattctccctgaggaaactgtgggccttcacaggtccaggatttctgatgtcaatcgcatttctggaccccgggaacatcgaatcagatctccaggccggagcggtggcgggtttcaaactcctatgggtgttgctgtgggcaactgtgctcggtttgctgtgccagcggctagcggcacgcttgggagtcgttacaggcaaggatttgggcgaggtgtgccatctctattatcccaagagcgagtcacgttctgtcgcacagtccggggtacaatggtgtgacgtctccagcttacagcctttaccaccgcggtgtcctgccccctcgtcaggctag

SEQ ID NO: 134763 - DNA, 1299 bp, synthetic construct
  misc_feature 1..1299: note = Description of Artificial Sequence: Synthetic coding sequence
  source 1..1299: mol_type = other DNA
atggtgcggtgtcagctgacagcaacatccacttcacaagtcccccggactgtcctgtggctgacaatagaattggctatagtgggaagtgacatgcaggaagtaatcggcacagccatagcattcaatctgctctctgctggacggattcctctttggggaggcgtactgataactattgtcgatacttttttcttcctgtttctggataactacggactgagaaagttggaggctttctttggactgttgattacgatcatggcgttgacgtttgggtacgaatacgtggtggcacgtccagaacagggcgccctgttacggggacttttcctgccatcctgcccgggctgcggacacccagagcttttacaggccgtaggtatcgtgggcgcaatcattatgcctcacaatatctatctgcatagcgcactggtaaaatccagagaaatagatagagcgagacgagctgacattcgtgaggccaacatgtatttcctcatcgaggctaccatcgcactgtcagtttccttcattatcaacctgtttgtcatggcagtgttcggtcaggccttctatcagaaaaccaatcaggcagcctttaacatatgcgccaatagttctctgcacgactatgcaaaaatcttccctatgaataatgcaacagtagcagtggatatctaccagggtggcgtcatcctgggttgtctgtttggacccgcagctctgtatatctgggccatcgggctgttggccgccggtcagtctagcacaatgactggcacgtacgcgggccagttcgtcatggagggatttttgcggctgagatggagtaggtttgctcgagtactgttgacaaggagctgcgcgatactgcctaccgtcctcgtcgccgttttccgtgatttgagagacttgagcggcttaaacgacttgctgaacgtgctgcagtcactgctgctcccttttgcagtgctccccatcctgacttttacaagcatgccgacgttaatgcaggagttcgcaaatgggctacttaacaaagtagtaacatcgtccatcatggttctcgtttgcgccatcaatctctattttgtggtgtcctaccttccttctttgccacaccccgcatacttcgggctggcggctctgctggcggctgcttacctaggcttaagcacatatttggtgtggacttgctgcctggctcacggggcgacttttttagcacattcctctcaccaccactttctgtacggcctccttgaagaggaccagaagggtgaaacatccggttag

SEQ ID NO: 134764 - DNA, 3351 bp, synthetic construct
  misc_feature 1..3351: note = Description of Artificial Sequence: Synthetic coding sequence
  source 1..3351: mol_type = other DNA
atgctgaataatctgaccgactgcgaagacggagatgggggtgcaaatccaggagatgggaaccccaaggaatctagtcctttcatcaactctaccgatactgaaaaggggaaagaatacgatggcaaaaatatggcactattcgaggaagagatggacacatcccctatggtgagctccctgcttagcggactcgccaactacaccaatttgccccagggaagccgggagcacgaagaggctgaaaataatgagggcggcaaaaagaagccagttcaggcccctagaatgggcacctttatgggggtgtatctgccttgtcttcagaatatcttcggcgtaatcctgtttctcagactgacttgggttgtagggatcgctggaatcatggaatccttttgtatggtgttcatttgctgtagctgcacaatgctgactgccatctctatgtccgcgatagccacgaatggcgtcgtgccggctgggggctcctattatatgatctctaggtcactcggtcctgagtttggcggagcggttgggctgtgcttctacttgggcaccactttcgccggagccatgtatatccttggcaccatcgagattctgctggcttatcttttcccagctatggccattttcaaagcagaggatgctagcggagaagcggccgccatgcttaataatatgcgcgtgtacggcacttgcgttcttacgtgcatggctaccgtcgtattcgtgggcgtgaaatacgtgaacaagttcgccttagtgttcctggggtgcgtcatcctttcgatccttgctatctatgctggagtcattaaaagcgccttcgacccacccaacttcccgatttgcctccttgggaatcggaccctgtctcgccacggcttcgatgtctgcgctaagctggcctgggaagggaacgaaaccgtgacaactcgcctgtgggggcttttctgctcctcaagatttttgaacgcgacttgtgacgagtattttactcgcaataacgtgacagagatccaggggatccccggtgccgcctcaggactgattaaagagaacctgtggtcatcttacttgaccaaaggagtgattgtcgagagaagcggtatgacatcagtgggactggccgatggcacccccattgacatggaccacccatatgtgtttagcgacatgaccagctactttaccctcctcgtcggcatatactttccttctgtgaccgggattatggctggcagtaacagatctggagacttacgggacgcccagaagtctatcccaaccggaacaatcttggcgatcgcgaccaccagcgctgtctatatttcttctgtcgttctgttcggtgcctgtattgagggcgtggtgctcagagacaaattcggagaggctgtgaacgggaaccttgtggttggaacattggcgtggccatccccctgggtgatcgtaatagggagcttcttctctacatgcggtgcgggtctacagagccttacaggggccccgcgactgctccaagctatcagtagggacgggattgttcccttcctgcaggtgtttgggcacggcaaggccaatggtgagcccacatgggccctgctcctgacagcctgtatctgcgagataggaatattgattgcctcgctggatgaagtcgcaccaatactgagtatgttcttcctaatgtgctacatgtttgtgaacctggcctgtgccgtgcaaactttgttacggacaccgaattggcgtccccggtttcggtattatcactggaccttgtctttcttgggtatgagcctctgtttagcactcatgtttatttgctcctggtactatgctctggtggctatgctgattgctggcctgatatacaaatatatcgagtacagaggagctgaaaaggagtggggtgatgggatccgaggcctgagcctgtctgccgctagatacgccctgctacggcttgaggagggacctcctcatacaaagaattggcgcccgcaactccttgtattggtgagagtggatcaggatcagaacgtagttcatccacagttgctgagtctaaccagccagttaaaggccggcaagggactcacaattgtaggaagtgtcttggaaggcacttttctcgaaaaccacccacaagcccagcgggccgaagagagcattagaagacttatggaagcagagaaggtgaaggggttctgtcaagtggtgatctccagcaacttgagggacggcgtgtctcaccttatacagtccggggggttggggggcttacaacataacaccgtgctcgtgggatggccaagaaactggaggcaaaaggaggatcatcagacttggaggaatttcatcgaactcgtcagggaaacaaccgcgggtcatctcgcgctgctggtcaccaagaatgtgagtatgttccctggaaacccggaacggtttagcgaaggttcaattgacgtgtggtggattgtccatgacggggggatgctcatgctgttgccattcttattgcgccatcataaagtatggcgtaaatgtaaaatgaggatatttaccgtcgcccaaatggacgataattccatccagatgaagaaagatctgacgacattcctctatcatcttcgcattacggcggaggtggaagtcgtcgagatgcacgagtcagatattagcgcttacacatacgagaaaacactggtcatggagcagaggagccagattctgaaacagatgcacttgactaaaaatgaacgcgagcgtgaaatccagtcaattactgacgagtcccgagggtccatcaggcgcaaaaatccagccaacaccaggttaaggctaaatgtccccgaggagactgctggggactccgaagagaaaccagaggaggaagttcaactcatccatgatcagtctgccccttcctgcccatctagcagccccagccccggggaggaaccggaaggagaaggagagacagaccctgaaaaagttcatttaacttggacgaaggacaaatcagttgcggagaaaaacaaagggccatctcccgtatcttccgaaggaatcaaagatttcttctccatgaagccagaatgggagaacctcaaccaatctaatgtgagacggatgcacacagctgttcgcctgaacgaggtcattgtgaagaaaagccgagatgcaaagttggttctgctgaacatgccaggacctcctcgaaataggaatggcgacgaaaactatatggaattcttagaggtcctgaccgagcatctggatagggtgatgctagttaggggaggggggcgcgaggttattaccatatatagctag

SEQ ID NO: 134765 - DNA, 858 bp, synthetic construct
  misc_feature 1..858: note = Description of Artificial Sequence: Synthetic coding sequence
  source 1..858: mol_type = other DNA
atgctcaataacctgactgactgcgaggatggcgatggaggggccaaccccggcgacgggaaccccaaggagagctcgcccttcatcaatagcactgatacagaaaagggaaaggaatacgatgggaaaaatatggccctgttcgaggaagagatggacactagccccatggtcagcagcttactctcagggttggccaactacactaacctcccgcaaggatctagggagcatgaagaagcagaaaacaacgaagggggcaaaaaaaagccagtgcaggctcctcgcatgggaacattcatgggggtctatctcccctgcctgcagaacatcttcggcgtgatcctttttctcaggcttacttgggtggtcggcatcgccgggattatggaatccttctgtatggtttttatctgctgcagctgcaccatgctcactgcgatttcaatgtccgcgattgcgaccaatggagtggtcccggcaggagggtcctactatatgatatcgcgatcacttggcccagagttcggcggcgcggtgggcctgtgtttttacttggggacgaccttcgcaggtgctatgtacatactggggacaatcgagattcttttggcgtaccttttcccagctatggcgatctttaaagccgaagatgccagcggtgaggcagccgccatgcttaacaacatgagagtgtacggaacatgtgttttgacatgcatggccactgttgtgttcgtcggggtgaaatacgtcaacaaatttgccctggtatttttaggatgtgtgatccttagcattctggcgatttacgccggcgtaataaagagcgcatttgatcctcccaattttccctag

SEQ ID NO: 134766 - DNA, 3420 bp, synthetic construct
  misc_feature 1..3420: note = Description of Artificial Sequence: Synthetic coding sequence
  source 1..3420: mol_type = other DNA
atgagccgccgttttacggtgacctcattaccccccgcaggcccggcgcgctcacccgatccagagagccgccggcactccgtggcggatccaagacacctgccgggcgaagacgtaaaaggcgacgggaacccaaaagaatccagtccctttattaacagcacggatactgaaaaaggaaaggaatatgacgggaagaacatggccctgtttgaagaagagatggatacttcaccaatggtgtcttctctgctttcaggactggcgaactataccaatctgccacagggttctcgcgagcacgaggaagccgagaacaatgagggcgggaagaagaaacccgtgcaggcaccaagaatgggcacttttatgggagtgtaccttccatgcctgcaaaatatattcggtgtcatcttattcctgagattgacttgggtggtaggtatcgcagggataatggaaagcttctgcatggtgttcatttgctgcagctgtaccatgctgactgccatttccatgagtgctatcgccacaaacggcgttgtgcccgccggtggttcctactatatgattagccggtccctgggtccagagtttgggggggctgtgggcctgtgtttctacctaggaaccacctttgctggcgcaatgtacatactgggaaccattgaaattcttctggcttatttatttcctgctatggccatctttaaagctgaagatgcctccggggaagccgctgctatgctgaataacatgcgagtctacggaacctgtgtgttgacttgcatggctactgtggtgtttgtgggcgtaaaatatgtaaacaaattcgcgctggtcttccttggctgtgtcatactctccattttagccatctacgccggggtgatcaagtccgccttcgatcctcccaactttccaatctgtctgctgggtaataggacattatctagacacggatttgatgtctgcgcgaagctggcgtgggaaggcaatgagaccgtcaccacgcgtctgtgggggttgttctgcagtagtcggtttttgaacgctacatgcgacgagtattttacacgcaacaacgtcacagaaatacaaggaatacctggagctgcgtcgggactaataaaggagaacctctggagcagttacttgacaaaaggggtgatcgtggagcgatccggaatgacgtccgtgggtctcgcagatgggacgcccatcgacatggatcatccgtacgttttctcagacatgacctcttactttacactgctggtcggcatctatttcccttcagttaccggaatcatggccggatccaatagaagcggagacctgagggacgcccaaaaaagtatccccacgggaacgatcctggccatcgcgactacatctgctgtgtatatttcaagcgtggtgctctttggcgcatgcatcgagggggtggtattgcgagacaaatttggcgaagctgtgaacggtaatctggtcgtgggcacattggcctggccatctccttgggttattgttatcgggtcttttttttctacctgtggggccggactccagtctctgacaggcgcacctcggctcctccaggccatctcccgggacggcattgtcccattcctgcaggtgtttgggcatgggaaagctaacggcgagccaacctgggcccttctgctgaccgcctgcatttgtgagattggtattctaatagctagtttggatgaagttgccccaatcctttctatgttttttttgatgtgttatatgtttgtaaatttggcctgcgccgtgcagaccttgctccgaacgccgaattggcggcctcgctttagatattatcactggactctgagcttccttggcatgtcgctgtgtctagcattgatgtttatttgttcctggtattacgcattggtcgccatgctgatcgcggggttgatatacaaatatatcgaatatcgtggtgccgagaaagaatggggtgacgggatacgggggctatccctgtcagccgcccgctatgccttgctccgccttgaagagggaccccctcacactaagaattggcgtccacagctgttggtccttgtaagagtcgaccaggaccagaacgtagtgcacccccagctgctcagtctgacctcccagctcaaggccggaaagggtcttacaatagttggaagcgtcctggagggaacatttttagagaaccaccctcaagcacagcgcgctgaggagtcaattcgtcgcttgatggaggctgagaaagtaaagggtttttgccaagttgtcatttctagtaatctacgggatggcgtctcacatctgatacagagtggcggtctggggggactacagcacaacacagtgctggtgggctggcccagaaactggcggcagaaagaagaccatcaaacttggcggaacttcattgaacttgtgcgggagaccaccgccggtcacctggccctacttgtcactaaaaatgtttcaatgtttccaggcaatcccgagagattcagtgaaggcagcattgacgtctggtggatcgttcacgacggcggcatgctgatgttgctgccctttctcttgcgccatcacaaagtttggaggaagtgtaaaatgagaatctttaccgtggcgcaaatggacgacaactctattcagatgaagaaggatctgaccacttttctctatcatttgagaatcacagcagaagtcgaggttgttgaaatgcacgaatctgacattagcgcttatacttatgagaagacactggtgatggaacagagatcccagatattgaaacagatgcatctgacaaagaacgaacgcgagagggagatccaaagcataacagacgagtctaggggatctatcaggcggaaaaaccctgctaatactaggctgagattgaatgtcccagaggagactgctggagactctgaagagaagcctgaagaagaggttcaactcattcatgatcagtcagcccctagttgcccttctagctccccatcaccaggtgaggagccagaaggggagggggaaacagatcctgagaaagtccacttgacctggacgaaggacaagtccgtggctgagaaaaacaagggaccatcacccgtgagtagcgaaggaataaaagactttttttcgatgaaacctgagtgggagaatctgaatcagtcaaacgttagaaggatgcataccgccgtgagactgaacgaggttatcgtgaagaagtcccgcgatgctaagctagtcctcctgaatatgcccggccctccaaggaacagaaatggtgatgagaattacatggagtttctagaggtgctcaccgagcacttggaccgagtgatgttggtacgtgggggtggacgggaagtgatcaccatttactcatag

SEQ ID NO: 134767 - DNA, 561 bp, synthetic construct
  misc_feature 1..561: note = Description of Artificial Sequence: Synthetic coding sequence
  source 1..561: mol_type = other DNA
atgctcaacaatctgaccgattgcgaggatggagacgggggcgctaatccaggtgacggtaacccaaaggagagttctccctttataaactccactgacaccgaaaagggaaaagaatacgatggaaagaacatggcattgttcgaggaagagatggatacatcacccatggtgtcctccctgctgtcggggctcgcaaactacaccaacctgccacaggggtcgcgtgaacacgaggaagcggaaaacaatgagggcggaaagaagaaacccgtccaggctccccggatgggaacattcatgggggtctaccttccgtgccttcagaatatcttcggcgttatcctgttcctgaggctaacctgggtggtgggaattgcaggaataatggaaagcttctgcatggtattcatttgttgcagctgtaccatgctgactgcaatctcaatgtccgctatcgccactaacggggtagtgcccgccggcggaagctactacatgatttcgcgtagtctggccatggcaagacctatggagagtaggccaggtccctgttcctag

SEQ ID NO: 134768 - DNA, 3258 bp, synthetic construct
  misc_feature 1..3258: note = Description of Artificial Sequence: Synthetic coding sequence
  source 1..3258: mol_type = other DNA
atgcctcacttcactgtggtgccggtggacggtccaaggcgcggagattacgacaaccttgaaggactctcctgggtggattacggagagagagccgagctggatgattctgatggccatggaaaccaccgcgaaagctccccattcctctcccccttagaggcatcacgtgggattgactattatgatagaaacctggcccttttcgaggaagaactggacattaggccaaaggtgtctagcctgctgggaaagctggtgtcatataccaacctaacacaaggcgctaaggagcacgaggaagcagagagtggtgagggtactcggcgcagggccgcggaggccccgagcatgggaaccctcatgggcgtctacctcccctgcttgcagaatatatttggcgtaatcctgttcttgcggctgacatggatggtgggcaccgccggagtgctccaggcgttgttgatagtactcatttgctgctgttgtactttgctcacggccatcagcatgtccgctattgccacaaatggagtggtgccagccggaggatcctatttcatgattagccgctctctcggtcctgagttcggcggagctgttggattgtgcttctacctgggaaccacattcgccgccgcaatgtatatcctaggcgcaatcgagatactacttacctatattgcgcccccggctgcaatcttctatccctccggggctcacgatacatctaatgccactctcaataacatgcgggtgtatggaacaatattcctgaccttcatgacgctagtagtgtttgtaggcgttaagtacgtaaacaaattcgcttcattattcctggcatgtgtaatcatttctatcttgagcatttacgccggggggattaaaagcatctttgacccacctgtgttccccgtctgcatgttgggaaacagaactctgtctcgcgaccagttcgatatttgtgctaagactgccgtcgtcgataatgaaacagtagccacacagctgtggtctttcttctgccacagtcctaatttaactacagactcttgcgacccttatttcatgctcaacaacgtaaccgaaattccaggaatccccggagccgcagcaggagtgctgcaggagaatttatggtcagcatatctggaaaaaggcgacattgttgagaagcacgggctcccatctgctgatgcaccctctctaaaggaatccctgccgctgtatgtggttgccgatatagccacctccttcaccgtgctggttgggatcttctttccaagcgtgacaggcatcatggccggctccaataggtccggggacctgagagatgctcagaaatctattcctgttggaacaatcctcgcaataattactacatcattggtctatttctcatccgtggtcttgttcggcgcctgcatcgagggcgtcgtgctacgggataaatatggcgacggcgttagtcggaacctggtcgtgggcacactggcttggccctcgccctgggtcatagttattggctctttttttagtacttgcggtgccgggttgcaatctctgaccggcgcgccccggctgctacaagcaattgccaaggataacattatcccctttctcagggtgtttgggcacgggaaggttaacggtgagcccacctgggcccttctcttaacagccctcatagcggagctggggatcttaattgccagcctcgacatggtcgctccaatactgtctatgttctttctgatgtgttatctgtttgttaacttagcttgtgctgtccagacgcttctccgcacaccaaattggcggccacggttcaaatactaccattgggcactgagcttcttaggcatgtctctttgcctcgcacttatgttcgtctcttcatggtactacgccttagttgcaatgctgatcgctggcatgatatataagtatatcgagtatcaaggagctgaaaaagagtggggagacggaatcaggggactgagcctttcagccgcaagatacgcactgctgagactagaggagggccctccccacacaaaaaactggaggccacagctcctggttctgctgaagctggacgaggacctccatgtcaagtaccccaggctgctgacattcgcctcacagctcaaagcagggaaagggctcactatcgtgggatcagtgatccagggttccttcctggagtcttacggcgaggcccaggcggcagaacaaactatcaaaaacatgatggaaatcgagaaggtcaaaggattctgtcaggtcgtggtcgcctctaaagtcagagaaggactggctcaccttatacagagctgtggcctgggtggaatgcgccataacagcgtggttctgggctggccgtacggttggaggcaaagcgaggatccacgggcatggaagacttttatagacaccgtcaggtgcacgaccgcagctcatctggcactcctcgtcccaaagaacatcgcattttatcccagtaatcacgagcgctatttagaaggccacattgacgtctggtggatagtgcacgacggcggcatgcttatgctccttcccttcctgctgaggcagcacaaggtctggaggaagtgccgcatgcgtattttcacagttgcccagatggatgataactctatacaaatgaagaaagacctggccgtgtttctgtaccacttacgcctggaagctgaagtggaagtggtcgaaatgcataactccgacatatcagcctatacatacgaaaggaccctcatgatggagcaacgtagccaaatgctgcgacagatgaggctgactaagaccgagcgggagcgggaggctcagctggtgaaggataggcatagcgctctgaggctggagagcctctattccgatgaagaggatgaaagtgcagtgggggcagacaagatccagatgacatggaccagggataagtacatgacagagacttgggacccaagccacgccccagacaactttcgagagctggtccacatcaagcctgatcagagtaatgtccggagaatgcacacagcagttaaactgaacgaagtgattgtaactcggagccacgatgcccggttggtgttacttaacatgccaggcccgcctcgcaacagtgagggcgacgagaattacatggaattcctggaggtgctgacagagggacttgaacgggtgcttctggtacgcggcggcgggcgcgaggtgatcactatttactcttag

SEQ ID NO: 134769 - DNA, 2343 bp, synthetic construct
  misc_feature 1..2343: note = Description of Artificial Sequence: Synthetic coding sequence
  source 1..2343: mol_type = other DNA
atgccacattttacagtggttcctgtcgatggacctcgtagaggggattatgataatctagaaggtctcagttgggtggattacggggagagggctgaacttgatgacagcgatgggcatggcaatcacagagagtcttcccccttcctgtcccctcttgaagcttctagagggatagattattacgacagaaacctcgccctcttcgaagaggagctagacataagacctaaagtcagttccctcttgggcaaacttgtctcctacacaaatctgacccaaggggccaaggagcatgaggaggctgaaagcggggagggcacaagacggcgcgccgccgaagccccctccatgggcaccctaatgggggtgtaccttccatgccttcagaacatatttggtgtgattttatttctacgcttaacctggatggtcgggaccgctggcgttctccaggccctactgatcgtcctcatttgttgttgttgtaccctgcttaccgccatctccatgtcagcaatcgcaaccaatggggtggtccccgcgggcggctcctacttcatgatatcgagatctctgggccccgagttcggtggggcagtcgggctgtgcttttatctcggaaccacatttgccgccgccatgtatatcctcggagcaattgagatcctgctaacttatatcgcaccccctgctgcaatcttctacccatccggggcacacgacacctctaacgcgaccctgaacaatatgcgggtgtacgggacaatcttcctcacctttatgaccttggtcgtcttcgtcggcgtgaagtacgtgaataagtttgcttcgcttttcttggcatgtgttatcattagcattctgagtatatacgccggcggaattaagagtatctttgatcctcctgtgttccctgtttgtatgctgggaaacagaaccctgagtagagaccagtttgacatttgcgccaagacggctgtcgtggataatgaaaccgtcgccacccagctgtggagctttttctgtcactcaccaaacctgacaacagactcttgcgatccgtacttcatgctgaacaacgtgacagaaattccgggcatcccaggagcagccgccggggtgcttcaagaaaatctctggagtgcttatttggagaaaggagacattgtcgagaagcatggactgcccagtgcagatgccccatcactgaaggaaagtctgcctttgtacgtggtggctgacatcgccacttcctttacagtcttagtgggtattttttttccaagcgttaccggcatcatggcaggttctaaccgctccggagatttgcgggacgcccagaaatccattcccgttggcaccatcctcgccatcataactacgagcctggtgtatttttcctcagtggtcctgtttggtgcctgtattgagggagttgttttgcgggataaatacggcgacggcgtcagccgcaatctggtcgtagggactctggcctggccttcgccttgggtgatagttatcgggtcctttttttctacctgtggcgccggcctacagagcttaacaggcgcccccaggcttctacaagccattgcaaaagataatattattccctttctcagagtgttcggacacggcaaagtcaatggtgaacccacatgggccctcctgcttacagccctgatcgcggaactgggaatccttatagcctcgctggacatggtggctcctatcttgtccatgttctttttaatgtgctatcttttcgtcaacctggcgtgtgccgtacagacccttctaaggactccgaattggcggcctcggttcaagtattaccattgggcactttccttcctcggaatgtctctctgcctcgctcttatgtttgtttcaagttggtattacgctctggttgcaatgctcatcgcgggtatgatctataagtatatcgagtaccaaggtgctgaaaaggagtggggagacgggatacggggcctttctctgtcggccgcgcgatacgctctactgcgtttggaggaaggccccccccacacaaaaaattggcggccgcaactgctcgtcctgttgaagctggatgaggatctgcacgttaaatatcccaggttgctgacctttgcctctcagctgaaagccggaaaggggttaaccattgtcggctctgttatccagggcagttttctcgagtcttatggagaagctcaagctgctgaacagaccccatgtgctgcattgcgattgcccacctggccttgctcttgtcctcgaacaagtccaagcaccccggccactacaagtgccacttggcgcgccacctag

SEQ ID NO: 134770 - DNA, 3264 bp, synthetic construct
  misc_feature 1..3264: note = Description of Artificial Sequence: Synthetic coding sequence
  source 1..3264: mol_type = other DNA
atgcgtgccgggggcgcctgccggccgggtgctgcgggcactgctgccgggaccgcagctggaggttgggacgggggctgtgggggtgcagagcctgcaaggtgtttgaccagcccttggtgccagtggacaggccgtggtgcggccacaatgacaaccagcaggggatcggttggttggactacaggaagcgcaccgagttggatgacacgaactgaggagctggacattcggcctaaagtgagtagcctgctggggaaactggtctcgtataccaatcttacccaaggagcgaaagagcatgaggaggccgaaagtggggaagggacaaggaggagggccgccgaggctccgagcatgggcactctgatgggggtctacctcccatgtctgcagaatatctttggagttattctctttctacgcttaacctggatggtcgggacagccggagttctgcaggcattgttaatagtgctgatatgctgttgttgtaccttgctgactgccattagtatgagtgctatcgctacaaatggcgtggtgccggccggaggctcatattttatgattagcagaagtctgggacccgaatttggaggcgcggttgggctttgcttttacctcgggactacgttcgccgccgccatgtacatacttggagctatagagatcctgttaacttacattgcgccccccgccgctattttctacccctcaggagcccatgacaccagtaacgccaccttgaataacatgcgggtgtacgggaccatcttcctgaccttcatgactctcgttgtctttgtgggagttaagtacgtgaataagttcgcttcactgtttctggcgtgcgtgatcataagcatcctgtccatttatgccggaggcatcaaaagcatcttcgatcctccagtctttccggtctgcatgttggggaaccgtaccctgagtcgagaccagtttgacatatgcgcgaagaccgcagttgtggacaacgagactgtggcaacacagctctggtctttcttctgccactcaccgaacctaacgacagatagctgcgacccatatttcatgcttaataatgtgaccgaaattcccggcatccccggagccgctgccggggtgctgcaggaaaacctgtggtcagcgtatctcgagaaaggtgacattgtggaaaagcatgggcttcctagcgccgatgcaccgagtttgaaagagagcttaccactttacgtggtggccgacatcgctacatcatttactgttcttgtcggcatttttttcccttcggtaaccggtatcatggctgggagcaatagatctggagatctgagggacgctcaaaagtcaattccagtcggcacaatcctggcaatcataacgacttccctggtgtatttctcttccgtggtgctcttcggtgcatgtatcgaaggcgtggtgttacgagataagtatggcgacggggtatcgcgaaacctggtggttgggacactcgcgtggccctctccctgggtcattgtgatcggtagttttttttcaacctgcggcgcaggcctgcagtcattgacaggggctccaagattactccaggccattgctaaggacaatataattccttttcttagagtattcggccacggaaaggtgaacggcgaacctacatgggccttactcctgactgcactaatcgcagaactcggaatcctcattgcatctctagacatggtggctccaattctgagcatgttctttctgatgtgttatctattcgtgaacctggcttgtgccgtccagaccctgctaaggactccaaactggcgaccgcggtttaaatactaccactgggccctgtcctttttaggtatgtccctctgcctggcactgatgtttgtttcttcatggtactatgcacttgtggctatgctaattgccgggatgatctacaagtacattgagtaccagggcgcagaaaaggagtggggggacggaatcaggggcctgagcctttccgctgctcgctacgcactgctacggctggaagagggtcccccacacacaaaaaactggaggccccagctgttagtgctgctgaaactggatgaggatctgcacgttaagtatcccagactgctgacgttcgcttctcagcttaaggccggcaagggattaacaatcgtcggctccgtgattcaggggtcatttcttgaaagctatggggaagctcaagccgcagagcagaccatcaagaacatgatggaaatcgagaaagtcaaggggttctgtcaggtggtcgttgcttccaaggtcagggaaggactcgcccacctgatccaaagttgtggcttgggcggtatgcggcacaactccgtggtactcggctggccatacggatggagacaaagcgaagaccctagagcttggaagacgtttattgacacggttcggtgcactaccgccgcccacctggctctcctagtacctaaaaacattgccttctacccgtctaaccacgaaagatacctggaaggtcatatcgatgtctggtggatagtccatgacggaggaatgctgatgctgctgcctttcctgttacggcagcacaaagtgtggcgcaaatgtcgcatgcggatattcactgtggcccagatggacgacaatagtattcagatgaagaaggacctcgctgtgtttctttaccacctgagactggaagctgaggtggaagtagttgagatgcacaacagcgacatttccgcctacacatatgaaagaacactgatgatggaacaacgctcacagatgctccgccagatgagacttacaaaaaccgaacgtgaacgggaagcccaattggtaaaagacagacactctgctctgcgtctggagtcactctattctgacgaggaggatgagagcgcagtgggggccgacaaaatccaaatgacctggacccgcgacaaatacatgactgagacgtgggatcccagtcacgcacccgacaatttccgagaactagtgcatattaagcccgatcagagcaacgtgcgacgcatgcacaccgcagtgaagctgaacgaggtgatcgtgacccgctcccacgatgctcgcttagtgctgctcaacatgcctgggccgccacgcaattccgagggtgatgaaaactacatggaatttctggaggtgcttacagagggcctggaacgagtgttactggtccggggaggcgggcgagaagtcattacaatctatagttag

SEQ ID NO: 134771 - DNA, 3240 bp, synthetic construct
  misc_feature 1..3240: note = Description of Artificial Sequence: Synthetic coding sequence
  source 1..3240: mol_type = other DNA
atggccgccgaaggggctgtgtgcggcttcgtgtatttagaaggcactgcttgggccgtccctgaagatacggagcctcttgcttcctgcaccttagggcatgggaatcaccgcgagtctagcccattcctatcccctctggaagcctcccgaggaattgactattacgatcgcaatctggctctcttcgaggaggagctcgacatacgccccaaggtgtcctcccttcttggcaaactagttagctacacaaatcttactcagggtgctaaggaacacgaagaggccgagtcaggagagggcacacgccgcagggcagctgaggccccgtcaatggggacactcatgggcgtatatctcccttgtctgcagaatatcttcggagttatcttgtttctgcgcctaacttggatggtaggcactgctggcgtcctccaggccctcctaatcgttctaatttgctgctgctgcactctgttgaccgcgatctcaatgtccgctattgccactaacggagtggtacccgctggaggcagctactttatgatcagccgctccctgggcccagagttcgggggcgcggttggactgtgcttttatctgggcacgacattcgccgctgcgatgtatattttgggcgccatagagatcctgctgacatacatcgcaccccccgctgcaattttttacccctcgggagcgcacgacacttctaacgccaccctgaataacatgcgggtctacggaactatctttttgacttttatgactctggtagtgttcgtgggagtcaaatatgttaataaattcgcctccctctttcttgcctgtgtcatcatatcaatactctctatatatgcaggtgggataaaatcaatattcgacccgcccgtttttccagtttgtatgcttggcaacaggacattgtcccgggatcagtttgacatttgtgccaagactgccgtcgtcgacaatgaaaccgtcgccacccagctgtggagcttcttttgtcactctcccaacctcactaccgattcatgtgacccctactttatgcttaataacgtgaccgagattccgggcattcctggggccgctgccggagtgctccaggagaacctctggagcgcatatctggagaagggtgatatcgtcgagaaacacggtcttccttctgcagatgcccctagtctgaaggaaagtctcccgctttacgttgtggccgatatcgccacgagcttcacagtattggtcggaatcttctttccatctgtcacaggaataatggcagggagtaataggtccggcgatttgagggatgcccaaaagtctatacccgtgggcactattctggcaattattaccacgagccttgtctacttcagctcggtggtgctatttggcgcctgtatcgagggcgtggtattaagagacaagtatggggacggtgtaagcagaaaccttgtggttggaaccctggcatggccttcaccttgggtgatcgtgatcggatccttttttagtacctgcggtgctggtctgcagtctctcacaggtgctccgcggctactgcaagctatcgctaaagacaatatcattcctttcttaagagtgttcggtcacggcaaagtgaatggcgagcccacatgggcactgctgctcactgccttgatcgcagagctcggaattttaatcgcttcacttgacatggttgcgccaatcctgagtatgttctttcttatgtgttatctgttcgtcaacttagcctgtgcagtgcaaacactgttgaggacccccaactggaggccccggttcaaatactatcactgggcccttagcttcttaggcatgtctttgtgcctggccctgatgtttgtttcaagctggtattacgcccttgtggcgatgctcatcgccggcatgatttataaatatatcgagtaccaaggggcagaaaaagaatggggagatggcatacgtggcctgagcctgtccgcagctaggtatgcgctgttaagactggaggagggccctccacacaccaagaattggcgcccccagctgctcgtactcctgaaactggacgaagatctgcatgtgaagtaccctagactgctgaccttcgcgtcccaactaaaggccgggaagggcctgactatcgtggggtccgtcattcaaggcagctttcttgaatcttacggcgaggcacaggccgccgaacagaccattaagaacatgatggaaatagaaaaagtcaaggggttctgtcaagttgtggtggcaagtaaggtacgggaggggttggcccatctcatacagtcttgtggccttggtggaatgcgtcataacagcgtagttctgggctggccttatggctggcggcagtcggaggatccgcgcgcctggaaaacatttattgatactgtacgttgtaccacagcagcacacttagcccttctagtccctaaaaatatcgctttttaccccagcaaccatgaaagatacctggagggccatatcgatgtgtggtggattgtgcacgacggaggaatgctgatgctgctgcccttcctgctaagacagcataaggtgtggagaaaatgtagaatgcgcattttcactgttgcacagatggacgataattcaattcagatgaagaaggatctggctgtattcctgtatcacctgcggctcgaagctgaggtagaggtcgtagaaatgcacaactctgacatcagtgcatatacttacgagagaacattgatgatggagcagcggagtcagatgcttcgacagatgcggctgaccaaaacagagcgcgagcgggaagcacaacttgtcaaggaccggcactcagccctaaggctggaatcactctactctgacgaagaagacgaatctgccgtgggagccgataagatccagatgacctggactagggataagtacatgactgaaacttgggatccttcccatgctccggacaactttagagaactggttcacattaaaccagaccagagcaacgtgcgacggatgcatacggcagtgaagctgaatgaagttatagtgaccagatcccacgatgcccggctggtattgctgaatatgcctggtccccccaggaattccgaaggtgacgagaattacatggaattcttagaggttctcaccgagggcctggaaagagtcctacttgtgcggggcgggggccgtgaagtaataactatctattcttag

SEQ ID NO: 134772 - DNA, 3165 bp, synthetic construct
  misc_feature 1..3165: note = Description of Artificial Sequence: Synthetic coding sequence
  source 1..3165: mol_type = other DNA
atgggagacactctctcaccaggacacggtaaccaccgagagtcctctcctttcttgagccctctggaagctagtcggggcattgattattacgatagaaatctggcactttttgaggaggagctcgatattcggcctaaggtgtcgtctctcctcggtaagttagtgtcctatacaaatttaactcaaggagcaaaggaacacgaagaggcggagtctggcgaaggcactcgacgcagagctgcagaggcaccgtcaatgggcaccctcatgggggtatatctgccctgtcttcagaacatattcggggtcatactgtttctgaggctcacctggatggtggggaccgccggggtgctgcaggcgcttcttatcgttctaatatgttgctgctgcacactcctgaccgctatttcaatgtcagccatcgccacgaatggagtcgtaccagctggcggctcctacttcatgatttcgcgaagcttgggccctgagttcggaggtgcagtgggtctttgcttctatttagggactacgttcgcggccgcaatgtacattctgggggccatcgaaatactgctgacatacattgctcccccggccgccatcttttacccatctggagctcacgataccagcaacgccaccttgaataatatgagagtgtacggcacaattttcctgactttcatgactttggttgtgttcgtaggggtgaagtacgtcaataagttcgcttctcttttcctagcctgtgttataatttcgatcctgtctatttatgcaggagggatcaagagcatcttcgacccacctgtgttcccagtatgcatgctggggaacagaacgctgtctagagaccagttcgacatctgcgctaagaccgctgtagtggacaatgaaactgtggctacccagctttggtcgtttttttgtcacagccccaatctgacgaccgacagctgtgatccgtactttatgttaaataacgtgacagaaatccccggaatccccggggctgctgcgggagtcctgcaggaaaacttgtggagtgcttacctggaaaagggtgacatcgttgagaaacatggacttccaagcgctgacgccccatctctaaaggaaagccttccgctgtatgtggtggctgatattgctacgtccttcacggtgttggttgggatcttctttcccagtgtgactggcataatggctggctccaacagatcaggcgacttaagagatgcgcaaaaatcaattccagttggcaccatactggccatcattacaacaagcttggtgtatttctcatctgtggtactgttcggggcctgtatcgagggagttgtcttgcgcgataagtatggagatggcgtgtcgagaaacttggtggttggtacgcttgcttggccgtcaccttgggtgatcgtcattgggtcctttttcagtacttgcggtgccggtctgcagtcattgactggcgccccacgcttgctgcaagctatcgccaaagacaatatcattccgtttctccgggtgttcggccatggaaaggtcaatggggagcccacctgggccttgttactgaccgccctcattgctgaactcggcatactcatcgccagccttgatatggtagccccaatactatctatgtttttcctgatgtgctatctttttgttaacctcgcctgcgccgtccagaccctcctgaggacacctaactggaggccgcgcttcaaatactaccactgggctctgagctttctgggcatgtccttgtgcctcgccctaatgttcgtttcgagctggtactacgctctggtggcaatgctgattgctggaatgatctacaagtatattgagtaccagggcgcggaaaaggagtggggcgatgggatacgcggactctctctctcagccgccaggtatgcattgctgagactggaggaaggccctccacataccaaaaattggagaccacagctgctggtgctcctcaaactggacgaggacttacatgttaagtatccccgcttgctcaccttcgcctcccaactaaaggcaggtaagggcttgacaattgtaggatctgtgatacaaggttcatttctcgagagttatggcgaggctcaggcagcagaacagaccattaagaacatgatggagatcgagaaagtgaaaggcttctgtcaggtcgtcgtagcgagcaaggtccgcgaggggctggctcatctgatccagtcgtgtggacttggcggaatgagacacaatagcgtcgtactcggctggccctatggttggcgccaatccgaggacccacgtgcctggaagaccttcatcgacaccgttcggtgcaccaccgcggcccaccttgctctgctagtgcccaaaaatatcgctttctatccatcaaaccacgagcggtaccttgagggccatatagacgtgtggtggattgtgcatgacggggggatgctgatgttactgcctttcctcctgcgccagcataaggtgtggaggaagtgcaggatgcgcatttttaccgtggctcagatggacgataactcaattcaaatgaaaaaggacttagctgtatttttgtatcacctgaggctggaagccgaagtcgaggtggtggagatgcataacagcgacatctctgcttatacttatgagcggactctgatgatggagcagcgcagccagatgcttagacaaatgaggctgaccaaaacagaaagagaacgggaggcgcagttggtcaaggataggcattctgctctgcggcttgaatctctttattccgatgaggaagacgagagcgctgtgggcgctgacaaaatacaaatgacttggacccgggataagtatatgaccgagacttgggatccctctcatgcacccgacaacttccgggagttagttcacattaagcctgaccaaagcaatgtgaggcgtatgcacaccgcagttaagctcaacgaagtgatcgtcacccggagtcatgatgccaggctcgttttgctgaatatgcctggccctcctaggaattctgagggagacgagaactacatggaatttcttgaggttctgacagaaggacttgagcgggtcctgctggtgaggggcggtggtagagaggttatcaccatctatagctag

SEQ ID NO: 134773 - DNA, 3300 bp, synthetic construct
  misc_feature 1..3300: note = Description of Artificial Sequence: Synthetic coding sequence
  source 1..3300: mol_type = other DNA
atgcctcacttcacagtgaccaaagtggaagaccctgaagagggcgctgctgcctcaatttctcaggaaccctcattagcagacataaaagcccgaatccaggatagcgacgagcctgacttaagtcagaactctattactggggaacattcccagctgctggatgatggtcataagaaagcgaggaatgcgtacctaaacaattcaaactatgaggaaggcgatgaatacttcgataaaaacctggccctgttcgaagaagaaatggacacacgtcccaaggtcagcagcctgctcaatagaatggccaactacaccaacctgacccagggagccaaagaacacgaagaggcagaaaacatcaccgaaggcaaaaagaagccgacaaaaaccccccagatgggcactttcatgggagtttatctgccctgccttcagaacatattcggtgtgattctctttcttagacttacttgggtagtcgggaccgcaggcgtcctgcaggcattcgccatagtgcttatctgttgctgctgcacgatgcttactgccatttccatgtccgcgatcgccactaatggcgtggtgccggcaggtggcagctatttcatgatcagcagggctctgggacccgagttcggcggcgctgtggggctgtgcttctatttggggactacgttcgctgccgctatgtatatcttaggagctatcgagatatttttggtctacatagtacccagggccgcgatttttcattctgacgatgctctgaaggagtccgctgctatgcttaacaatatgcgcgtgtacggaaccgcctttctagtgttgatggtgttggtggtcttcatcggagtccgctacgtaaacaagttcgcttccctctttttggcctgcgtcattgtatccatccttgcgatatatgccggcgccattaaatcctcctttgctccaccccactttccggtctgtatgctgggcaacaggaccctgagcagtcgccacattgacgtctgttcaaaaacgaaggaaattaacaacatgaccgtgccatcgaaactgtggggtttcttctgtaactcttcacagttttttaatgcgacctgcgatgagtattttgtgcataacaacgtcacgagcattcagggcattcccggcctggcttctggtatcataacagagaacctgtggtctaactaccttcctaagggtgagattatagaaaagccgtcggcaaagtccagcgatgtgctcggctcacttaatcatgagtatgtgcttgtggatatcactacatccttcacgctgctcgttggaatcttcttcccctctgttaccggtatcatggccggatccaaccgctctggagatttaaaagatgcacagaagtccataccgatcgggacaatactcgcaatcttaactactagcttcgtgtatttgtctaacgtcgtgctgttcggtgcctgtatcgaaggagtcgtgctgagagacaagtttggcgacgcagtcaagggcaatcttgtcgtgggaactctgtcatggccctcgccttgggtgatcgttatcggcagcttttttagcacatgcggagccgggcttcagtccctcactggagcccctcggctgttgcaggcaatcgcgaaagataatattattccattcctgcgtgtcttcggacattccaaagcgaatggggagcctacctgggcactactgttaacagccgccattgcagagctggggatcctgatcgcgtcccttgaccttgttgcccccatacttagcatgtttttcctcatgtgttacctcttcgtcaatctggcttgcgccctgcagacactgcttcgtacccccaattggcgacctaggttccggtactatcactgggctctgtcatttatgggcatgagcatctgccttgccttgatgttcatatcaagctggtactacgccatcgtcgccatggtcatcgcaggcatgatatacaaatacattgaataccaaggagcagagaaagaatggggggatgggatcagaggcctgtctctctccgctgctcggttcgccctcctgagattggaggagggtccacctcacacgaaaaactggcgtcctcagttgctagtccttctgaaactcgacgaggacctgcacgtgaaacacccaagacttcttaccttcgcatctcagctcaaggctgggaaagggttgaccatcgtcggatccgttattgtcggaaactttttggagaattacggcgaagctttggccgccgagcagactattaaacatttaatggaggctgagaaggttaaaggcttctgtcaactggttgtggctgccaagctgagagaagggataagccatctgattcagtcctgtggcctgggcggaatgaaacataataccgtagtgatgggttggcctaacgggtggcgtcagtccgaggatgctagggcctggaagaccttcattggcacggtgcgagtgaccaccgccgcacacctcgcgctccttgtggcaaaaaacatttctttcttcccatcaaatgtagaacagttcagcgaagggaatatagacgtgtggtggatcgtccacgacggggggatgttgatgctcctccccttcttgctaaagcagcataaggtgtggagaaagtgttccatacgcatttttaccgtggcccagctcgaagacaattccatccagatgaaaaaagatctcgccacattcctctaccatctgcgcattgaagccgaggtggaggtggtagagatgcacgactccgacatcagtgcctacacctatgagcggaccctaatgatggaacaacgttcacagatgcttcgtcatatgagacttagcaagactgagagggaccgagaagcacaactggtgaaagacagaaatagtatgctgcggctcacaagtattggctccgacgaggacgaggagaccgaaacttatcaggaaaaggtgcacatgacgtggacaaaggataagtacatggcatcacgagggcagaaggccaagagtatggaggggtttcaggatttgcttaatatgcggcccgaccagagcaacgttcgtaggatgcatactgccgttaaattgaacgaggtcatcgtaaacaagtcacacgaggccaaattggttttactcaacatgccgggcccacccagaaacccagaaggtgatgagaactacatggagtttctagaagtcctcacagagggactggaaagggttctgctcgtccgaggtggcggcagcgaagtgatcacaatctactcatag

SEQ ID NO: 134774 - DNA, 3453 bp, synthetic construct
  misc_feature 1..3453: note = Description of Artificial Sequence: Synthetic coding sequence
  source 1..3453: mol_type = other DNA
atgcacccacccgaaactaccaccaaaatggctagtgtgcgcttcatggtcacacccactaagatcgacgatatccccggcttgagcgacacatcgcccgacctgtcttcgcggtcatcctcacgcgtacgattctcaagtcgagaatctgtaccagaaactagccgaagcgaaccaatgtccgagatgagcggggccaccacatctctggccaccgtggcattagaccctccttcagatagaaccagccatcctcaagatgtcattgaggacctctcgcagaatagtattacaggtgagcactctcagctgctggacgacggtcacaaaaaagcccgcaatgcctatctcaacaactcaaactatgaggagggggacgagtattttgacaaaaacttggctttattcgaagaagaaatggacactcgtcccaaggtgagtagcctgcttaatcggatggctaattacacaaatctgactcaaggtgcaaaagaacacgaagaggcagagaacattaccgagggtaagaagaagcccaccaagacccctcagatgggtacttttatgggtgtgtacctgccatgcctgcagaacatatttggagtgattctcttcctgcggttaacttgggtcgtgggtactgccggcgtcctgcaggcctttgctatcgttcttatctgctgctgctgtacaatgctgaccgcaatttcgatgtcggccatcgccaccaatggggtggtccccgccgggggatcctatttcatgatctcaagagcactgggtccagagttcggaggggccgttggactctgtttttacctaggcaccacctttgcagcagctatgtacatcctcggagccatcgagatttttctggtgtacatcgtgcccagagcagcaatttttcactcggatgatgccctcaaggaatccgccgccatgttgaacaatatgcgagtctacgggacagcgtttctggttttgatggtgcttgttgtgttcattggcgttcggtacgtgaacaaatttgcttcgctcttcctggcatgtgtcatcgtgtccatcctcgcaatctacgccggtgcaataaaatcctcatttgccccccctcatttccccgtgtgcatgctaggcaaccgcacgctgagttcgcggcatatcgatgtttgcagcaaaactaaggagataaataatatgacagtgcctagcaagctgtggggcttcttctgtaatagttcccagttttttaacgcgacatgcgatgagtattttgtgcacaataatgtgacttccatccagggcatcccagggttggcctcaggaatcattacagagaatctctggagcaactatctaccaaaaggcgagataattgagaaaccatcagctaaatcctccgacgtgctgggatcattaaatcacgaatatgtcctggttgacattaccacctccttcaccttactggtcggcatcttttttccatccgtgactggtatcatggcgggctctaaccggtcaggcgacctcaaagacgcccagaagagcattcccattggcactatcctcgcaatactgactacatccttcgtgtacctgtccaatgttgtgctcttcggtgcatgcattgaaggcgttgtgttacgagataagtttggcgatgcggtcaaaggcaacttggtagttgggacactgagctggccttcaccatgggtgattgtcatcggcagctttttttcaacatgcggagccggcctgcagtctctgacgggcgcccctcgcctgctccaggcaattgccaaagacaatataatcccattcttacgggtctttggtcatagtaaggcaaatggggagcccacttgggccctgcttctcaccgccgccatagccgagttggggatcttgatagcgagccttgatctagtagcaccgatcttgagtatgtttttcctgatgtgctacctcttcgtcaaccttgcatgtgctctacagaccctgctccgcacccctaattggagacccaggttccgctactatcactgggcactgtctttcatggggatgagtatctgtctggctttgatgtttatcagttcctggtactatgccattgtcgctatggtgatcgcgggtatgatttataagtatatagagtaccaaggcgcggagaaggagtggggcgacgggattagggggctttcgctctctgcagccagatttgctttgctgaggctcgaggagggacccccccacacaaaaaactggagaccacagttgctagtcttgttgaaactggacgaagatctgcacgttaaacacccacgattgctgacatttgccagtcagctcaaagcaggcaagggcttgacgattgtcggctccgtaatcgtgggtaattttctggagaattacggagaggccctcgccgctgaacagactataaagcacctcatggaagctgagaaagttaaaggtttttgtcagctagtggtggccgccaagctgcgcgagggtattagtcacctcattcagtcatgtggtctaggagggatgaagcataatactgtggtgatgggatggcccaacgggtggcggcaaagcgaggacgctcgggcttggaagacatttatcggcacagtgagggtaaccacagcagcccacctcgctctcctggtcgcaaaaaatatctcttttttccctagtaatgtagagcagttcagtgaggggaacatcgacgtgtggtggattgtccacgatggaggcatgctgatgcttctcccctttctccttaaacagcataaggtgtggaggaaatgctctatcaggatttttaccgtagcccagctggaggataattccatccagatgaaaaaggacctggccaccttcttgtatcatctcagaattgaggcagaagtggaggtcgtggagatgcatgacagcgacatctctgcttatacatacgagcgcaccctgatgatggaacagcgcagtcagatgttgcgacatatgcgcctgtcgaaaacagaaagagaccgggaggcacagctcgtgaaagaccgaaacagcatgctgcgcctgacatccatcggttccgacgaggacgaggagacagaaacttatcaggagaaggtacacatgacatggaccaaagataagtacatggcttcccgaggacagaaggccaaaagcatggaggggttccaagacttgctcaatatgcgccccgaccaatcaaatgtccgccgcatgcataccgccgtaaagctcaacgaggttatcgtgaacaagtcacatgaagccaagctcgttttgcttaacatgcctggcccgcctagaaatcccgagggagatgaaaactacatggaattcctcgaagtcctgacagaagggttggagcgcgtgctgcttgttaggggcgggggcagcgaggttatcacaatttattcgtag

SEQ ID NO: 134775 - DNA, 3276 bp, synthetic construct
  misc_feature 1..3276: note = Description of Artificial Sequence: Synthetic coding sequence
  source 1..3276: mol_type = other DNA
atgagcgagatgagcggcgccaccacttccctcgccaccgtcgcactggaccccccttcagataggaccagccaccctcaggacgtgattgaggacctttctcagaatagtatcactggcgagcatagccagctcctggatgatgggcacaaaaaggcacggaacgcctacctcaataacagtaattatgaagagggtgacgagtattttgacaaaaacctggctttatttgaagaggaaatggatacgagaccgaaggtgtcatccctgttaaatcgcatggccaactacaccaacctaacacagggcgctaaggagcacgaggaagcagagaacatcactgaagggaaaaaaaaaccgaccaagaccccccaaatgggcacgtttatgggggtgtatctgccctgtctgcagaatatttttggagtaattttattcctgcgcctgacatgggtggttggtacagcaggtgttctgcaggcctttgctatagttctcatatgttgctgttgtaccatgctgaccgccatttcaatgagcgccatcgctacaaatggcgtggtgcctgccggaggaagttattttatgatctcccgagcactgggccccgaatttggtggtgccgtcggcctgtgcttttaccttggcacgaccttcgcagccgccatgtatatcctgggtgctatcgagatcttcctggtttatattgtgcctagggccgccatcttccattccgatgatgcactgaaggaatccgccgccatgctcaataacatgagggtctatggcaccgccttcctggtactgatggtcctcgtggtattcattggcgtccgctacgtgaacaaatttgcatctcttttcctggcctgcgttattgtaagcatccttgctatctacgctggtgctattaagtccagttttgcacccccgcatttccctgtctgcatgttggggaataggaccctgtccagccgccatatcgacgtatgttccaaaactaaggagattaacaatatgaccgttcccagtaagctgtggggatttttctgtaatagctcccagttctttaacgccacctgtgatgaatatttcgttcataataacgtgacaagtatccaaggaattcctggcttggcttctggaatcatcaccgagaacctgtggtccaattacctgccaaaaggcgaaataatagagaaacccagtgccaaaagcagcgacgtgctcggatctctcaatcatgagtacgtcctggttgacataaccacatcttttactctgctggtgggaattttctttccttcagttaccggtatcatggccggaagtaaccgatctggtgatcttaaagacgcacagaaaagcattccaatcggcactatactcgcaatccttactacaagcttcgtttacctttccaatgtagttctgttcggcgcttgcattgagggggtcgtgctgagagacaaattcggcgatgcagtgaaggggaatttagtggtcggcacactgagctggcccagcccctgggtgattgttataggatctttcttctccacctgcggagccggtctacagtccctgaccggtgcacccaggcttcttcaggctatcgcgaaggataacataatcccatttctccgcgtcttcggccattcaaaagccaacggggagcctacatgggcacttttgcttactgctgcgattgctgagctcgggattctaatcgcctccctggatctggtggctcctatcctctctatgttcttccttatgtgttatttgttcgttaacctagcgtgcgccctgcagacccttttgagaacacctaactggagaccccggtttagatattaccattgggctttatccttcatgggtatgtccatttgcctcgctcttatgttcatttccagctggtattatgccattgtcgcgatggtgatcgcagggatgatctataagtatattgaatatcagggcgccgagaaagagtggggtgatggaatcaggggcttaagcctcagcgcggcccggtttgcactcctccgactggaggaaggacctccccataccaagaattggcgaccccagctacttgtgctgttaaagcttgatgaagatctgcacgttaaacacccccggttactgaccttcgccagtcagttaaaggctggcaagggcctgaccattgtgggaagcgtaatcgtgggcaactttctcgagaactacggcgaagcgcttgcagccgagcaaacgattaagcacttgatggaagcagagaaggtaaaaggcttctgccagttagtggtcgctgcaaagctgagggaaggaatatcccatcttatccagtcttgtggactgggaggcatgaagcataacacagttgttatggggtggcccaatggatggcgccagagcgaagacgctcgagcatggaagaccttcatcgggaccgtgcgcgtcaccacagctgcccacttggccctgctggtcgctaagaacatttcgttctttcctagcaatgtggaacagttcagcgaagggaacattgatgtgtggtggattgtacatgacggcggcatgctaatgctcctcccttttctacttaaacaacacaaagtctggagaaaatgtagtatccggatttttacagtggcgcagttggaggacaacagcattcagatgaagaaagatttagccaccttcctgtatcatctgaggattgaggccgaagtcgaggtggtggaaatgcacgatagcgacatcagtgcctacacctatgaacgcaccctcatgatggagcaaagaagccagatgttacgccacatgagactgtcaaaaacggagcgagatcgggaggctcagctcgttaaagatcgcaattccatgctcagactgaccagtatcggatcagatgaggacgaggaaactgagacatatcaggagaaggtgcacatgacgtggaccaaagacaaatacatggcttctagagggcagaaggcaaagagtatggaaggattccaggatcttcttaacatgaggcctgaccagtctaacgtccgaagaatgcacacagctgtgaaactgaacgaagtgatagtcaataagtcccatgaagccaagctcgtgctgctcaatatgcctggaccaccacgcaatcccgaaggcgacgagaactatatggagttcttggaagtgctgaccgagggcctcgagagagtgcttctggttcgaggaggggggtctgaggtgattactatttactcatag

SEQ ID NO: 134776 - DNA, 3408 bp, synthetic construct
  misc_feature 1..3408: note = Description of Artificial Sequence: Synthetic coding sequence
  source 1..3408: mol_type = other DNA
atgcatcccccagaaaccacaaccaaaatggcgtcagttcgcttcatggttacaccaactaaaattgatgacattcccgggctctcagacacaagccctgacctgtcctctcgcagttcttcccgggttagatttagttcccgtgagtcagtccctgagacaagtcggtcagaacccatgagtgaaatgagcggcgctaccacgtcacttgccacggttgcactcgatcccccttcagataggacgtcacacccccaagacgttatcgaggacgacggtcataaaaaggcgagaaatgcatatctgaataattcaaactatgaggaaggcgacgaatatttcgacaaaaatctggcgttattcgaggaagaaatggatactcggcctaaagtctctagcctgctgaaccgtatggcaaattacaccaatttaacacaaggagctaaagagcacgaggaagctgaaaacatcacagaaggcaagaaaaagccaacgaagacaccccagatggggactttcatgggcgtttatctcccctgtcttcaaaatattttcggggtgatccttttcctcaggctaacctgggtggtgggtacggccggggtcctgcaagcctttgctatcgttctcatatgctgttgctgcaccatgttaacggcaattagcatgtcagcaatagccaccaatggggtggttcccgctggtggctcatattttatgattagcagagcgttgggtcctgagtttggaggcgctgtcggactttgcttctatttgggtaccaccttcgccgcagcgatgtacatcctcggagccatcgagatctttcttgtgtacatagtgccgcgcgctgccatcttccattccgacgatgcgctcaaggagagtgctgcgatgctcaataacatgcgggtctacggaactgcttttcttgtgctcatggttttagtggtcttcattggcgttagatacgtgaataagtttgcatcactcttcctggcttgtgtcatcgtctccatattggccatctatgccggagcaattaagagcagctttgcccccccccactttcctgtatgcatgctggggaaccggaccctgagctccagacacattgacgtgtgcagcaagacgaaggagattaacaacatgacagtgccttctaaattatgggggttcttctgtaatagttcacaattttttaacgcaacctgtgacgaatactttgtacacaataatgtaacctcaattcagggtatcccaggcctcgcttcaggaataattacagaaaacctctggagtaattacctgcctaagggtgagatcatcgaaaaaccttcagcaaagagcagtgatgtcttgggttccctgaaccacgagtatgttcttgtcgacatcacaacttcttttacactgcttgtggggatattcttccctagcgtgaccgggatcatggccgggagcaacaggagtggtgacctgaaagacgcccagaagagcattccaattggtaccattttggccatactgacaacaagttttgtttacttgagcaacgttgtgttatttggggcctgcatcgagggtgtggtgctcagggataagttcggcgacgccgtcaaaggcaacctggtggttggaaccctttcatggccctccccatgggtcatcgtaatcggcagctttttctctacatgtggtgcaggtctgcagtcattaaccggcgcacccagacttttacaggccattgccaaggacaacatcattccatttcttagggtgttcgggcactctaaggcaaacggagaaccaacctgggccctgctgctcacagcagctatcgctgagctggggatcctcatcgcaagcctggacctcgtcgctcctatcctttctatgtttttcctaatgtgctacctcttcgtcaaccttgcctgcgctctgcagaccctacttaggacccccaactggcgaccaagattcaggtactatcactgggctctgagcttcatgggtatgtccatatgtctagctctgatgttcatttcatcctggtactatgccatcgtcgccatggtgattgctggaatgatttacaaatacatcgagtatcagggagccgagaaggaatggggggacggaatccgcggattgtccctgtcagcagcccgctttgccctgctcaggctggaggaagggcctccgcacacaaagaattggagaccacagctgctcgtgctgcttaagttagatgaggacctccatgtgaagcacccgcgcctgcttacgttcgcttcccagctgaaagctgggaaggggttaacgattgttggctctgtgatagtcggtaatttcttggagaactacggcgaggctctggctgcagagcaaactattaagcacttgatggaggcagaaaaggtcaaaggcttttgtcagctcgtggtggcagcaaagctccgtgaggggatcagccacttaatacagagctgtggtttagggggtatgaaacacaatacagtggttatgggctggccaaatggttggcggcaatctgaggatgcacgcgcctggaagacatttattggaactgtacgggtcactacagccgcccacttagctttgctcgttgccaagaacatttcattcttcccctcgaacgtcgagcagttttcggaggggaacatcgacgtgtggtggatcgttcatgacggcggcatgctcatgttacttccttttttacttaaacagcataaagtctggcggaaatgtagcatccgtatcttcactgtggcacaattggaagacaactcaatccagatgaaaaaagatctggcgacatttctgtaccatctgcgtatagaggctgaagtcgaggtggtggagatgcatgattccgatatttccgcttatacatacgagagaactttgatgatggagcagagatcacagatgcttagacacatgcgcctgagtaagacggaaagggaccgagaagcccagcttgtgaaggatcgaaattcaatgctgcgactcacgtccatcggatctgatgaggatgaggagaccgagacttatcaggaaaaggtacacatgacctggacaaaagacaaatacatggccagccggggccaaaaggccaaatcaatggaaggcttccaagacctgctgaacatgagaccagatcagtcaaatgtgcgcagaatgcacacagcggttaaactgaatgaggtgatcgtgaacaaaagccatgaagcaaagcttgtgctgctgaacatgcccgggcctcctaggaacccggagggcgacgagaattacatggagtttttggaagtcctgaccgagggactggagagagtgctgctggtacgcggaggtgggagtgaggtcatcacaatctatagctag

SEQ ID NO: 134777 - DNA, 2889 bp, synthetic construct
  misc_feature 1..2889: note = Description of Artificial Sequence: Synthetic coding sequence
  source 1..2889: mol_type = other DNA
atggatacgcggccgaaagtgtcgtcgctcctaaatcgtatggctaactacaccaacctcacacagggggccaaagaacacgaggaggcggaaaatattaccgaaggaaagaaaaagccaaccaaaacaatgctcacagctatttccatgtccgccatagccaccaacggtgttgtgccagccggaggcagctactttatgatttcgcgtgcactcggcccagagttcggcggcgccgtggggctgtgcttctacctcgggactacattcgcagctgccatgtacatcctgggcgcaatcgagattttccttgtttacattgtgccccgcgccgccattttccatagtgatgacgcccttaaagagagcgcggcgatgctaaacaatatgagagtgtacgggacggccttcttagtgctgatggttctggttgtcttcatcggcgttaggtatgtaaacaaattcgcaagtctgtttttagcatgtgttattgtgtccatcctggctatctatgccggagccatcaagtcatccttcgcccctccccattttcctgtgtgcatgctcggaaatcggactctctcgagtcgacatattgacgtgtgctctaagactaaggagattaacaacatgacggttcccagcaaactatggggattcttctgtaattctagtcagtttttcaatgcaacctgtgatgaatacttcgtgcacaataatgtgacttcaattcaaggcatcccaggcctggccagtggcatcataacagaaaacctctggtcaaactacctccccaagggagagattattgagaagccaagcgccaaatcttcggacgtgctgggaagcctaaaccatgaatatgtgctggttgatattaccaccagtttcacactgctcgtggggatcttcttcccttctgtaacgggtataatggcagggtccaatcggtccggcgatttaaaggatgcccaaaagtctattcccatcgggaccatattggctatccttacaaccagctttgtttacctgtccaatgtggttttgtttggtgcctgcattgaaggcgttgtactgagagataagttcggagatgctgttaaagggaacttggtggtgggaaccctttcttggcccagtccatgggtgattgtgatcggctcctttttcagtacctgcggcgctggtctgcagagcctgactggggcccctaggttgctgcaagctatcgccaaagacaatatcattccattccttcgagtgttcggtcatagtaaggccaatggtgaacccacctgggctctcctgcttaccgcagctatagccgaactgggcatcctgattgcgagcctcgacctagtggcacctatcttgtctatgttcttcctgatgtgttatctattcgtgaacctggcgtgcgccctccaaacactcctccggacaccaaattggagaccccggttccggtattaccactgggccctaagttttatgggtatgagcatctgcctggccctcatgttcataagttcctggtactacgcaatcgtagcgatggtgattgctgggatgatctacaaatatattgaataccagggggccgagaaagagtggggcgatggtatcagagggctgtcgctgtcggccgctcgcttcgccttacttcggctcgaggaaggcccccctcatactaagaactggaggccacagctgctggtcctgctgaaactagatgaagacctccatgtgaaacacccgaggctcctcacattcgccagccagctgaaggctggcaaaggcctgactattgtgggatccgttattgtgggcaatttccttgaaaattacggggaagcattggcagcagaacagaccatcaagcacctgatggaagctgagaaggtgaaaggattttgtcaactggtggtggcggctaagctgagagagggcatctcacacctgatccagagctgcgggctaggcggcatgaaacataacaccgttgtcatgggctggcccaatggctggagacagagcgaagacgcaagggcctggaagaccttcatcggcacggtgcgcgtgacaaccgccgcccacttggccctcctagtggcgaaaaatatctctttcttcccctctaacgtggagcagttctccgaggggaacattgacgtgtggtggatagtgcacgacggggggatgctcatgctgcttccattcctgctgaaacagcacaaggtctggagaaagtgcagcattagaatttttaccgttgcacagcttgaggataacagtattcagatgaagaaggatctcgcgacatttttgtaccaccttcggatcgaagccgaagtcgaggtcgttgagatgcacgacagcgatatatccgcatacacatacgagaggaccctcatgatggaacagaggtcccagatgctgcgccacatgcgtctgtctaagaccgagcgagatagagaggcacaactggtgaaagatcggaacagcatgctgagacttacgtcaatcggctctgatgaagatgaggagacagaaacctaccaggagaaggtacacatgacttggaccaaggataagtatatggcaagccgaggccaaaaggcaaaatctatggagggattccaggacctgcttaatatgcggcctgaccaatcgaatgttaggcggatgcatacagcagtgaaactgaatgaggtgatcgtgaataaaagtcatgaagccaagttggttttgctcaatatgccaggccctccccggaatcctgagggcgacgaaaattatatggagtttctggaagtcctgaccgaaggtctggagagggtattgctggtgaggggcggaggatcggaggtgattacgatatacagttag

SEQ ID NO: 134778 - DNA, 3276 bp, synthetic construct
  misc_feature 1..3276: note = Description of Artificial Sequence: Synthetic coding sequence
  source 1..3276: mol_type = other DNA
atgtcggagatgtcaggcgccacgaccagcctggcaaccgttgcactcgaccccccatcagatagaaccagccaccctcaagacgttattgaagatttatcccaaaattccattactggagaacacagccagcttctggacgatggacacaaaaaagctcgcaacgcctacctcaataatagtaactacgaagaaggagacgaatacttcgataagaatttagccctcttcgaagaggaaatggatactagacccaaggtgtcatcgcttttgaataggatggcaaactacacaaatctgacccaaggcgccaaggagcacgaggaggctgagaatattacagaagggaaaaagaaaccaacaaagacaccgcagatgggaacttttatgggcgtgtatctgccctgtttgcaaaatatttttggcgttatcctatttctgcggctgacttgggtcgtgggtacggccggcgttcttcaagcctttgccattgtcctcatttgctgctgttgtacaatgctcaccgccatttcaatgtcagcaatagcaacgaatggagtagtacccgctggcggttcctattttatgatttcccgggcacttggtcctgagtttggaggcgctgtggggctgtgtttctatctgggaactacttttgccgccgctatgtatatcttaggagctattgagatattcctggtgtatatcgtgcctagagccgccatctttcactcagacgacgccctcaaggagtcagcagcaatgcttaataacatgagagtatatgggaccgcatttcttgtccttatggtgctggtggtatttatcggtgtccggtatgttaataagtttgcctcactgttcttggcctgtgtcatcgtcagcatactcgccatctacgccggagcgatcaagagctcctttgccccacctcacttccccgtctgcatgctgggcaacagaacacttagctctcgacacattgacgtgtgttccaaaacaaaggagattaacaatatgaccgtaccgagcaagctgtggggattcttctgtaacagctcccaatttttcaatgctacatgtgatgagtatttcgtccacaataatgttacatcaatccagggaatccccgggcttgccagcggaataatcaccgaaaatttgtggagcaactatctccctaaaggcgagatcattgaaaagccgtcagccaaaagctccgacgttttgggaagtctgaatcacgagtacgtgctggtcgatatcactacatctttcacactgctcgtcggcatcttctttccatctgtgacaggaatcatggccgggagcaatcgaagcggggacttaaaggacgcccagaaaagcatccccatcggaaccattctcgctattcttaccactagttttgtgtacctgagcaatgtcgtgctcttcggtgcctgtattgaaggggtggtcttgagggacaagttcggcgacgccgtgaaaggaaatttggtggtggggactctctcttggccatctccgtgggtgattgttattggctccttctttagcacttgcggcgctggacttcaaagtctgacaggggccccccgattgctgcaggcgatcgcgaaggacaacattattcctttcctgagagtctttggccactccaaagctaacggcgagcccacttgggcattgcttctgacggcagccattgccgagttaggaatcttaatcgcttcactggacttagtcgctcccatcctgtccatgtttttcctaatgtgttacctcttcgttaacctggcctgtgccttgcagaccctgctacgaactccaaactggcggcctaggttccggtactaccactgggccctgtcatttatgggtatgtcaatatgcctggccttgatgttcatctccagttggtattacgcaatcgtggctatggttattgccgggatgatttacaagtatatcgaataccagggagctgagaaggagtggggtgatggcatccgtgggctctcactctcagcagccaggttcgcgctgctgcgcctggaagaagggcccccacacaccaaaaactggcgtccacagctcctggtgttgctcaagttggacgaagacctgcacgtcaaacacccacggcttcttacatttgcttctcagcttaaagcaggcaaaggactcaccattgtgggctcagtgattgtgggcaattttctggaaaactacggcgaagctctggctgctgagcagactatcaagcatctaatggaagcagagaaggtgaaggggttctgtcagctggtggtggctgccaaactgcgtgagggaatatcacatttgatacagtcctgcggcttgggcggaatgaagcataataccgtggtgatgggctggcccaacgggtggcgtcaaagcgaggacgcccgcgcctggaaaaccttcatcggaacggtaagagtgaccaccgcagcacatctggccctgttagtcgctaagaatatcagcttcttcccaagcaacgtggaacagttcagcgaaggaaatattgacgtttggtggatcgtgcacgacggtggaatgcttatgctcttgccattcctgctcaaacagcacaaagtgtggcgtaagtgtagcatccggatctttaccgtggcccaactggaggataattctattcagatgaagaaggacctggccacatttttataccatctgaggatcgaagcagaagtcgaggtggtcgagatgcacgactccgacatctctgcatacacctacgagcgtacccttatgatggagcaacgctcacagatgttgaggcatatgcggctctctaagaccgagagagatcgggaggcacagcttgttaaagatagaaacagcatgctgcgactgacctctataggaagcgacgaggacgaggagactgagacttaccaggagaaagtgcatatgacctggacaaaggataaatacatggcttcaaggggtcagaaagccaagagcatggaggggtttcaggatctcctaaatatgagaccagatcagtccaatgtgagacggatgcatacagccgtgaagctaaacgaggtcattgtgaacaaaagccatgaagcaaagcttgttctgctaaacatgcctgggcccccacgcaatccagagggcgatgaaaattatatggagtttctggaagtgctgacggaagggctcgagcgagtgctcctagtacgtggcggaggctctgaagtcatcactatttactcctag

SEQ ID NO: 134779 - DNA, 3426 bp, synthetic construct
  misc_feature 1..3426: note = Description of Artificial Sequence: Synthetic coding sequence
  source 1..3426: mol_type = other DNA
atggcatctgtgaggtttatggtcacacctactaagattgacgacattcctgggctaagtgacacctctccagaccttagcagcaggagcagctcacgggtcagattctcttcacgagaaagcgtgccggagaccagtcggtctgagccaatgagcgaaatgtctggtgcgactacctcccttgctaccgtcgcactggatcctccatccgacaggacatcccatcctcaggatgtgatcgaggatctaagccagaattcgattaccggggaacatagtcagttgcttgacgatggccataagaaggcccgtaacgcctatttgaacaatagtaattatgaagaaggcgatgagtactttgacaaaaatctcgctcttttcgaggaagagatggacactcggcccaaagtctcctccctgcttaatagaatggccaactacacaaacctgacccagggggccaaggaacacgaggaggccgagaatattacggagggaaaaaaaaagccaactaaaacacctcagatggggacatttatgggcgtctatctcccctgtctccagaacatcttcggcgtgattctgtttttacgcctaacgtgggtagtgggaaccgccggagtgctgcaagcatttgctattgtgcttatttgttgctgctgcacgatgctgactgctatctctatgtctgccatagctaccaatggtgtggtaccagccggaggatcttatttcatgattagccgagctttggggccagagtttggaggggcagtgggactttgcttttatctcggaacaactttcgctgcggccatgtacatcctcggcgcaatcgagatctttctggtgtatattgtgccacgggctgcaattttccacagtgatgacgcccttaaagaatcggccgccatgctgaacaacatgcgcgtatacggcactgctttcctggtgctcatggtgctcgtcgtattcataggtgtgcgctatgtaaacaagttcgcctctctatttctggcctgtgtgatcgttagcatactggccatctacgctggagcaataaagagcagtttcgcccccccgcacttccctgtgtgcatgcttgggaacaggaccctgagctctcgtcacattgacgtctgcagcaagaccaaggagatcaataatatgaccgtgccatcgaagttgtgggggttcttctgcaatagttcccagttttttaacgccacatgcgacgaatattttgttcataataatgtgaccagcattcaaggcatccctgggctggcctctggtattatcacagagaacttgtggagtaattatctgcccaaaggcgagataatagaaaagccaagtgccaaatcctctgatgtgctggggagtctgaatcacgagtacgtcttagtggatattacaacctccttcacactgttggtcgggattttctttccctctgttactggcattatggcaggcagcaataggagcggcgacttgaaggatgcccagaaaagcatccccatagggactatacttgcaatcctgactacttctttcgtttatctgagcaatgtcgtgctcttcggcgcttgcatcgagggcgtggtattacgagataaattcggggacgccgttaagggcaatctcgtggtgggaacactaagctggccgtctccgtgggtgattgtgatcgggagtttcttcagcacctgtggagctggactgcagagtctgactggagccccccgactgctgcaggctattgccaaggataacattattccctttcttcgagtttttggccattctaaggcaaacggagagcctacatgggccttactactaaccgccgccattgcagaactgggaatactgatcgcgagcctcgatctggtcgcaccgattctgtcgatgttcttccttatgtgctatttgttcgtcaatctggcttgcgccctccagactctcttacggacccctaactggagaccgagattccggtactatcattgggccctcagcttcatgggaatgtcaatctgcctggccctgatgtttatttcttcatggtattacgcaattgtggctatggtgatcgccggaatgatctacaagtatatagagtaccagggtgccgagaaagagtggggggacggcattaggggtctaagcctaagcgccgcccgcttcgccctcctgcgcctcgaagaagggcctccacatactaagaactggaggccgcagttacttgtactgctgaagctagacgaggatctccacgtgaagcatccaagattgctgacattcgcatcacagcttaaagccgggaaggggttaaccattgtgggctctgtaatcgttgggaatttcctggagaactacggagaagcactggctgctgaacaaaccattaaacatcttatggaggccgaaaaagtgaagggcttttgccagctggtggtggccgcaaagttaagagaagggattagccacctgattcagtcttgcggtctcgggggaatgaaacacaataccgtggtcatgggctggcccaacggatggagacaatctgaggacgcccgagcctggaagacattcatcggcacggtgcgagttactactgcggcacatttggctctgctggtggcaaaaaatattagtttttttccgagcaatgtggagcaattttccgaggggaacattgacgtatggtggatcgtccacgacggaggtatgctgatgctcctgcctttcctactcaagcaacataaagtctggaggaagtgttcgatcagaatcttcaccgtggcacagttggaggacaacagcattcagatgaagaaagacctggctaccttcttatatcaccttcggatcgaggcggaagttgaagtcgtggagatgcacgactccgatatctcagcctacacatacgaacggaccctgatgatggagcagcgctctcaaatgcttcgccacatgcgtctctccaaaactgagagagaccgcgaggctcagctggtaaaggaccggaactccatgctgcgcttaacgtctattggctcggacgaggatgaggagaccgaaacctaccaagaaaaggttcacatgacctggacgaaagacaaatatatggccagtagggggcagaaggcgaaatcaatggaaggattccaagatctgctgaatatgcggccagatcagagtaatgttaggcgcatgcacacagccgttaagctgaatgaggtgatcgtgaacaaatcacatgaggccaaactggtcctcctaaatatgccagggccaccccgcaaccccgagggagacgagaactacatggagtttttggaagttcttacagagggccttgaaagagtgctcttggttaggggtggtggttccgaagtgattacaatctactcctag

SEQ ID NO: 134780 - DNA, 3453 bp, synthetic construct
  misc_feature 1..3453: note = Description of Artificial Sequence: Synthetic coding sequence
  source 1..3453: mol_type = other DNA
atgcacccccctgagaccaccaccaaaatggccagcgtccggttcatggtaacacctaccaaaatcgacgatattccaggtttaagtgatacctcgcctgaccttagcagcaggtctagctctcgagtgcggtttagctctcgggaaagtgttccagagacatcgaggtccgagcccatgagcgagatgagtggcgctacgacctcccttgccaccgtggccttggatcccccttccgatcggacatcacacccacaggacgtgatcgaggatctcagccaaaacagcattacaggggagcatagtcagctgctcgatgatggtcataagaaggcacgaaacgcatacctgaataactctaactacgaggagggggacgagtactttgacaagaacctggccctgttcgaagaggaaatggatactcgccccaaagtaagttccttgctaaatagaatggccaactatacaaatctaacccagggtgctaaggagcacgaagaagccgagaatataactgaaggcaagaagaagcctaccaagacaccgcagatgggaactttcatgggagtatatctgccatgtttgcagaatatttttggcgtaatcctgttcttacggctaacctgggttgttggcacagccggagttttgcaagcattcgctatcgttctgatttgctgctgttgcactatgcttaccgcgatatccatgtctgcgattgctaccaacggggttgtgccagccggtggatcctattttatgatctctagggcccttggccctgaattcggcggcgcagtcggattatgcttttacctggggacaacattcgctgctgccatgtatattctgggggccatcgagatcttcctggtgtacatcgtacccagagccgccattttccacagtgatgatgcacttaaagagtcagcagctatgttgaataatatgagggtgtatgggactgcgttcctagtgctcatggtgttagtggtcttcattggcgttagatacgtgaataagttcgcttcactgttcctcgcctgcgtgattgtgtctattctggccatttacgccggtgcaatcaagtctagttttgctccaccccactttcctgtgtgtatgctcggaaacagaacgctgtcttcccgtcacattgacgtatgcagcaaaaccaaagaaatcaataatatgaccgtccctagtaaactgtggggctttttttgcaactcttcccagttctttaacgcgacttgtgatgaatatttcgttcacaataacgttacttcaatccaaggtattccaggtctggcctccggaattattacggagaacttatggtctaattaccttccgaaaggagagatcatagagaaacccagcgcgaaaagttcggatgtgcttgggagcctcaatcatgagtatgtgctggtagatatcaccacgagtttcaccctcctggtgggtatcttcttcccaagcgttacagggataatggcaggatcaaaccggtccggtgacctaaaggatgcccagaaaagcatccctattggtacgatccttgcaattttgaccacctcattcgtgtacctcagcaatgttgtcctctttggcgcttgcattgaaggtgtcgtgctgcgcgacaagttcggggacgctgttaaggggaatctagttgttggaaccttgtcctggccctccccatgggtgattgtgatcggctcatttttctcaacatgtggcgccgggctccagtccttgacaggcgcccctaggttgttgcaggcaatcgctaaggataatattatacccttcctccgggtcttcggtcacagcaaagcgaacggcgagcccacctgggctttactgctcacagctgcgatcgctgagctgggcatcttaattgcctctctagatttggtcgctcctattctctcaatgttcttcctcatgtgctatctgtttgtcaacctggcctgcgcactccagacactgctgagaacccccaattggagacccaggtttcggtactaccactgggccttatcctttatggggatgagcatatgcctcgccctcatgttcatcagctcatggtactacgcaatagtagctatggtaattgccgggatgatatacaagtacatcgaataccaaggtgccgaaaaggagtggggggatggcatcaggggactaagcttatccgccgcaaggtttgcactcctccggctcgaagaaggccctccgcataccaaaaattggagaccgcagctgctggttttgttgaaacttgacgaggacttgcatgtcaagcatcctagactgctgacttttgcctctcagctgaaagctggcaaggggctgacgattgtaggctcagtaatcgttggcaacttcttggagaactatggggaagcactggcagcagaacagaccataaagcacctgatggaagctgaaaaggtaaaaggcttctgccaactagttgtggccgctaagttgcgcgagggtatcagccacctgatccaatcctgtgggctgggcggtatgaaacacaacaccgttgtgatgggctggccgaacgggtggcggcagagcgaggacgcaagggcatggaaaactttcattgggactgtgagggttactactgccgcacatctggccttgttagtcgccaaaaacatctccttcttcccgtccaatgtcgagcaattctctgagggcaatattgatgtgtggtggattgtgcacgacggaggcatgttgatgcttcttcctttcctgctcaaacagcataaagtctggaggaagtgctccatcagaatcttcactgtggctcagcttgaggataatagcattcagatgaagaaagacctcgccacttttctgtaccacctccggatcgaggccgaggtggaggtggtggaaatgcatgacagtgatatctcggcctatacttatgagagaaccttgatgatggagcagaggtcccagatgcttcgccacatgcgactttctaagactgaaagagatcgggaggcccagttggtgaaagatcgcaattctatgctcagattaacctcgattggttcagacgaggatgaagaaaccgaaacttatcaggagaaggtgcatatgacatggactaaggacaagtacatggccagcagagggcagaaagccaaatctatggaggggtttcaagatttactgaatatgcgcccagatcagagtaacgtgcggcgcatgcataccgccgtaaagttaaacgaggtgatcgtgaataaatcacatgaggccaagctcgtccttctgaacatgccaggaccaccccgcaaccctgaaggggacgaaaattacatggagtttttggaggttctcactgaaggtttagagagggtacttctggtgcgaggtggcggatccgaagtcattactatctattcctag

SEQ ID NO: 134781 - DNA, 186 bp, synthetic construct
  misc_feature 1..186: note = Description of Artificial Sequence: Synthetic coding sequence
  source 1..186: mol_type = other DNA
atgagtgagatgtcaggcgctaccactagcctcgccacagtggctcttgatccccctagcgaccgtacctcccacccgcaagatgtcatagaggacctgagtcagaattctatcacgggcgaacactcgcaactgttagatgacgggcataaaaaggcccgcaatgcatacttgaacaacagctag

SEQ ID NO: 134782 - DNA, 2889 bp, synthetic construct
  misc_feature 1..2889: note = Description of Artificial Sequence: Synthetic coding sequence
  source 1..2889: mol_type = other DNA
atggacaccaggcctaaggtctcaagtctgttgaacagaatggccaactataccaacctcacacagggtgctaaagagcatgaggaggccgaaaacatcaccgaaggcaagaaaaaacccactaaaacgatgctcactgctattagcatgagcgccatcgctacaaatggggtggtgcctgcaggagggagctacttcatgattagccgcgccctggggccggaattcggtggtgccgtgggcttgtgtttttacctcggcacaacatttgctgcggctatgtatattttgggagccatcgagattttcttagtttacatcgtaccccgcgctgccatcttccactccgacgatgctctgaaagaatctgccgctatgctgaataacatgcgcgtctatggcactgcctttctggtgctgatggttctcgtggtcttcattggcgtacgttacgtgaacaagtttgcctcactttttctggcttgcgtcatcgtgtcgatcctggccatctatgctggcgccatcaagagcagctttgccccgccacatttccctgtgtgtatgctgggcaaccgcaccctgtcatcgagacacatagatgtgtgctcaaaaactaaggaaatcaacaatatgactgtgcctagtaaactgtgggggttcttttgcaactccagccaattctttaacgctacttgcgacgagtactttgtgcataacaatgtgacctctatacagggcatacctggtctggcatcggggatcattaccgagaacctgtggagcaattacttgccaaagggtgaaataatagaaaaaccgagcgctaaaagcagcgacgtcttgggctccttaaaccacgagtacgtcttggtggatattactacctcttttacgctactagtcggcatttttttcccatcggtgacaggtatcatggctggctcaaaccggagtggtgatctcaaggacgcgcagaaatcaatccctatcggtaccattctcgccattttgactacctcattcgtatacctatcaaacgtcgtgctgttcggagcttgtatagaaggggttgtactgagagataaattcggcgacgcggtcaagggcaacctagttgtgggcacattatcatggcccagcccatgggtgattgttataggtagctttttcagcacgtgcggcgccggattacagtcactgactggagcacctaggctgcttcaggcaatagctaaagacaatattatcccattcttacgcgtctttggtcacagtaaagcgaacggggaacctacttgggcactgctcctcaccgccgccattgcagagctcggaatcctgatagcttccctggatctggtggctcctatcctgagtatgttcttccttatgtgctatttgttcgtcaatttggcctgtgcactgcagacactccttagaacgcccaattggcggccacgctttcggtactaccactgggccttgtcttttatgggtatgagcatctgtctggcgctgatgttcatatcctcctggtattacgcaatcgtcgctatggtcattgctggcatgatttataaatatatagagtatcaaggcgcggaaaaagaatggggagacggcattagaggcctctcactatctgctgctcgattcgcacttctgaggttggaagaggggccaccgcataccaagaactggaggcctcagcttctggtcctgctcaaactggatgaggatctgcacgtgaagcacccaagactcttgacatttgcttcacagctcaaggctggaaaaggcctgaccattgtgggctcagtcatagtgggcaacttcctggaaaactatggagaagctctggctgctgagcagactataaaacacctgatggaagccgagaaagtcaaagggttttgccaactggttgtggccgcaaaactccgggaagggattagccacttgatccagtcatgcggcttgggaggaatgaaacacaacactgtcgtcatgggctggcccaatggatggcgtcaatccgaggacgcccgcgcatggaagacattcattggaacagtacgcgtcactaccgccgcgcatcttgccctgctagtggccaagaatatctcattcttcccctccaatgttgaacagttctccgaggggaatatcgacgtgtggtggatagtgcatgatggaggcatgcttatgctgctgcccttcctgctgaaacagcataaggtctggcgcaaatgttctatccggatttttactgtggcccagcttgaagacaatagtattcagatgaaaaaagaccttgccaccttcctatatcacctgcgtatcgaagctgaagtggaggtcgtggagatgcacgattccgacatcagcgcctatacttacgagcggactctcatgatggagcagcgcagtcagatgctgcgccacatgagactgagcaaaactgagagggatcgggaagcgcagctagtgaaagaccggaactcaatgctccggctcacatccatcggctccgatgaagacgaggagaccgagacttaccaggaaaaggtccacatgacatggactaaggataagtacatggctagcagagggcaaaaagctaagagcatggaggggttccaggacctgctgaacatgagacctgatcagtcaaacgtccgacgaatgcacaccgccgttaagctcaacgaagtcatcgtcaacaagtctcacgaggcaaaactggtcctgctgaatatgccggggccaccgaggaatcctgaaggagacgagaattacatggaattccttgaagtcctaaccgaaggtcttgagagggtgttgcttgtgaggggtgggggcagcgaggtgatcacgatttattcatag

SEQ ID NO: 134783 - DNA, 3453 bp, synthetic construct
  misc_feature 1..3453: note = Description of Artificial Sequence: Synthetic coding sequence
  source 1..3453: mol_type = other DNA
atgcatccaccagaaacaacaacaaagatggctagtgtaaggttcatggtgacaccaaccaagatcgatgacatacccggactgtccgatacatccccagatttgtcatctcgatccagtagcagagtcagattctctagcagggaatctgtccctgagacatcaagaagcgaacccatgtccgagatgtcaggagccaccacgtctctggccaccgtcgccttggaccccccttcagaccgcacttcccatccgcaggatgtgatcgaagacctatcacagaactcgataacaggcgaacactcccaactgttggacgacgggcataagaaggctagaaatgcatacctgaacaactccaactacgaagaaggagatgaatattttgataaaaacttggctctcttcgaagaggaaatggacacccggccaaaggtcagttctctactcaatcggatggccaactacacaaacttgacccagggagccaaggagcacgaagaggctgaaaacattactgagggcaagaaaaagcccaccaagacccctcagatgggaactttcatgggcgtgtacctgccatgtctgcagaatatcttcggagtgatcttgttcctccgcctgacatgggtcgtggggacggcaggggtgctccaggctttcgctatagtgctcatctgttgctgttgtacaatgctcaccgccatttcaatgagtgccattgcaactaacggcgtggtgccggccggcggcagctactttatgatttctcgggcgctcggacctgaattcgggggcgcggttgggctctgcttttacctgggcactacctttgcggctgcaatgtatatcctgggagccattgaaatattccttgtctacatcgtgcctcgggccgcaatatttcattcggatgacgccctcaaagagagcgccgctatgctgaataacatgagagtgtatggaaccgccttcttggtgctcatggtcctggtcgtcttcatcggcgtacgctacgttaataaattcgcctccctcttcttggcatgtgtgatcgtctcaattctggcgatctatgctggagccattaagagcagctttgccccgcctcacttcccagtatgcatgcttggcaatcgcactttgagtagtcggcatatcgatgtgtgctcgaaaacaaaggagattaacaacatgactgtacctagcaagctgtggggttttttctgtaacagcagccagtttttcaatgcaacctgcgacgaatactttgtgcacaacaacgttaccagcatccagggcataccagggttagcttcaggcatcatcacagaaaacctgtggagcaactatcttcctaaaggggaaatcatcgagaaaccatccgcaaaatcctcagatgttctgggcagtctcaaccatgagtatgtactggtggatataaccacttccttcactcttctcgtgggaatcttttttccatcagtcaccgggatcatggctggctccaataggtcgggtgatctgaaggacgctcagaagtcaattccaatcggcacaattctggctattcttacaacatctttcgtgtatctgtccaatgtcgtgctgttcggggcctgtattgaaggcgtcgttctgcgcgacaagtttggcgatgccgtgaagggaaacttggtcgtgggcactctatcctggccctcaccctgggtgatagttatcgggtcctttttttctacttgtggtgctggtctgcaaagcttaacgggagcgcctaggctgctccaggcgatcgccaaggacaacattattccgttcctgagggtctttggccatagcaaagctaatggagaacccacctgggccctgctgctcacagccgctatagcggagctgggcattctgatagctagccttgacttagtagcacccatactctctatgttttttctaatgtgctacctgttcgtgaatctggcatgtgccctccagacacttctgcgtacacccaattggagacccagattccgatattaccattgggccctgagtttcatgggcatgtcaatctgcttggcgctcatgttcatcagttcttggtactatgcgattgtcgctatggtgattgctggcatgatatacaagtatattgaataccagggtgccgaaaaggagtggggtgacgggatccggggactgtccctgagcgcagctcggttcgcccttctccggttggaagaaggacccccccacacaaagaactggcgaccacagctcttggtattgttgaagttggacgaagacctgcatgtgaaacacccacgccttctcacgtttgcctctcagcttaaagctgggaagggcctcactatagtcggttcggtcatcgtagggaactttctggagaattacggggaggctctggctgccgagcagacgatcaaacatctgatggaagctgagaaggtaaaaggattctgccagttagtggtggccgctaaacttagagaagggatcagtcacctaatccaatcctgcggcctcgggggcatgaagcacaacaccgtggtcatggggtggcctaacggttggcgccaatccgaagatgcccgcgcatggaagaccttcataggtaccgttagagtgacaaccgccgcccatctagctctgctcgtagctaaaaacatctctttcttcccttctaatgtggagcagtttagcgagggtaacattgatgtgtggtggatcgtacacgatgggggaatgttgatgctgttaccctttcttctgaagcagcataaggtgtggagaaagtgctccattcggatttttaccgtggcgcagctggaggataactctatccagatgaaaaaagacttggccacctttttgtaccatttgaggatcgaggctgaggttgaagtggtggagatgcatgactcggacatttctgcgtatacctatgaacgcacactgatgatggaacaacgctcccagatgctgagacatatgcggctgagcaaaacagagagagaccgggaggctcaattggtcaaggaccgaaactcaatgctgcggctgacatctatcgggagcgatgaggacgaggagactgagacataccaggagaaggtgcatatgacttggacaaaggataagtacatggcatctcgcggacagaaggctaagagtatggagggatttcaggacctgcttaacatgcgccctgaccagtccaacgtaagacgtatgcacacggccgtcaaattgaatgaagtcattgtaaataaatctcacgaggctaagttggtcctcctgaatatgcccggacccccacggaaccctgagggcgatgaaaattatatggaattcctggaggtcctgaccgagggtcttgaaagagtactgcttgtgcgaggtggagggtccgaagtcattacgatctatagttag

SEQ ID NO: 134784 - DNA, 459 bp, synthetic construct
  misc_feature 1..459: note = Description of Artificial Sequence: Synthetic coding sequence
  source 1..459: mol_type = other DNA
atggcctccgtgagatttatggtaacgccgacgaagattgacgacatcccagggctgtccgacacttcccctgacctctcgtcacggagcagtagtagggtgcggttcagtagcagggagtctgtacctgagacctcccggtctgagcccatgtctgagatgtctggggcaaccaccagcctcgcaaccgtggcgctggacccacctagcgacaggacctctcaccctcaggatgtgatcgaggatctctctcaaaacagtataacaggtgagcatagccagcttctcgatgacggccataaaaaagctcgcaatgcttatctgaacaattcaaactatgaggaaggtgatgagtacttcgacaagaatctggccttattcgaggaggaaatggataccagaccaaaagtgagctcccttctgaacaggatggctaattacactaacctcacgcagtag

SEQ ID NO: 134785 - DNA, 3252 bp, synthetic construct
  misc_feature 1..3252: note = Description of Artificial Sequence: Synthetic coding sequence
  source 1..3252: mol_type = other DNA
atgcctactaatttcacggtggtgccggtggaagcccacgcggacggtggtggggacgaaacggctgaacgcactgaagcacccgggacccccgaggggcctgaacccgagcgtccgagcccaggagatggtaacccgcgggagaatagcccatttctaaacaacgtcgaggtggaacaggagtctttcttcgagggaaaaaatatggccctcttcgaagaagagatggactcgaatcccatggtctcttctttgttaaacaaactagccaattatacgaatctctctcagggtgttgtagaacacgaggaggacgaggagtcccgcagacgcgaagcaaaagcacctcgcatggggacatttatcggcgtgtacctgccatgtctccagaatattcttggtgttattttgttcttacggctgacctggatcgtgggcgtagcaggggtcctggaatctttcctcattgtggccatgtgttgcacatgtactatgttaactgctattagtatgtccgcaattgcaaccaacggagtcgtgcccgccgggggatcgtattacatgatttcacggagtctgggcccagagttcggtggcgctgtgggtctatgcttttacctggggacaactttcgccggggccatgtatattctcgggacaatagaaatctttctgacatacattagtcctggagccgccattttccaagccgaagccgccggcggggaagctgccgcgatgctgcacaatatgcgcgtctacggtacatgcaccctggtcttaatggctctcgtggtgtttgttggtgtaaagtacgtgaataaactggccttggtgttcttagcttgcgtggtcctcagtattctggctatttacgccggtgtaattaaatcagcctttgacccgcccgatatcccagtgtgcctcttaggcaatcgcaccctgagtcggcgcagcttcgacgcatgcgtgaaggcgtacggcattcacaacaatagtgcgacttccgccttatggggtctgttctgcaatggcagccagccaagcgccgcctgcgatgagtatttcattcagaataacgtcaccgagatccaagggattcctggggcagcctctggcgtctttctggagaatctctggtccacttatgcccatgcaggggctttcgtcgagaagaaaggtgtgccatcagtgccggtggctgaggagtcccgagcctcggctctaccctacgtcctgacggacattgcagcatcgtttacactactggtgggcatttactttccatccgtaactgggatcatggctggctctaacagatctggggacttaaaggacgctcagaaaagcataccaaccggaacaatccttgcaattgttacaacttctttcatctatctgagctgtatagtcttatttggtgcatgcatcgagggcgtagtgctccgggacaaattcggcgaggctcttcagggcaatctggtgatcggaatgctggcttggccgagcccgtgggtgatcgtcattgggtcattcttcagcacttgcggagctggtctccagtccctgacgggcgctccaagacttcttcaagcaatcgcccgggacggaatagtaccttttctgcaggtatttggacatggcaaggctaacggggagccgacatgggcactgcttttaactgttttgatttgcgaaacaggaatcctaatcgcctcgttggattctgtggcacctatactgtccatgttcttcttgatgtgctacctgttcgtcaatctcgcctgcgccgtgcagactctgctgcgaaccccaaattggcgtcccaggtttaagttctaccattggactctgagttttttggggatgagcctgtgtctggcccttatgtttatttgcagctggtactatgctttaagcgcaatgctcattgctggctgcatctataagtatatcgagtataggggtgccgaaaaggagtggggagatgggattcggggactgagcctaaatgccgccaggtatgccctcctgcgtgtcgagcatggccctccgcacactaaaaactggaggcctcaggtgctggtcatgctcaatctcgacgcggaacaggctgtgaagcacccgagactgttgtcctttacaagccagctgaaggctggcaaaggtctgacaattgttgggtcggttttggaggggacctacctcgacaaacacatggaggcccagcgcgcagaggaaaatatccggtcactcatgtctacagagaagactaagggattttgccaactagtggtaagttcgtctctgcgggacgggatgtcgcatctcatacagtcagctgggcttggcggtctgaagcataataccgtgctgatggcctggcctgcctcctggaaacaagaggacaatccgttctcatggaaaaacttcgttgacacagtgcgcgacacaacggccgctcaccaggcactgttggtcgcaaagaatgtcgactcctttccacagaaccaggaacgcttcggtggggggcacattgacgtgtggtggatcgtgcacgatggtggcatgctcatgctactgccctttttgcttagacaacataaagtgtggaggaaatgccgcatgcgcatttttacagtggcccaggtcgacgataactctatccaaatgaagaaagatcttcaaatgttcctctatcatctcaggatctccgcagaggtcgaggtcgttgaaatggtggagaatgatatctccgccttcacttatgaacgcactctcatgatggagcagcggtctcaaatgctgaaacagatgcaactgtctaagaacgagcaggaaagagaagcccagctcatccatgatcgcaacacggccagtcataccgcagcagcagctcggacccaggcaccacctactccagataaagtgcagatgacctggacccgcgagaagctgatagctgagaagtaccgttcgagagacacctccttgtccggcttcaaggacctttttagcatgaagccggatcagagcaatgtccgcaggatgcatacggccgttaagctgaacggagtggtactgaataagtctcaagacgcccagctggtcctactaaacatgcccggcccacccaagaacagacagggggatgagaactatatggaatttctagaggtgttgacagaaggccttaaccgggtcctgcttgttagaggcgggggtagggaggtaattacaatatacagctag

SEQ ID NO: 134786 - DNA, 801 bp, synthetic construct
  misc_feature 1..801: note = Description of Artificial Sequence: Synthetic coding sequence
  source 1..801: mol_type = other DNA
atgcctaccaacttcactgtggttccagtggaagcccacgccgacggagggggcgatgagactgctgaacggactgaagcccccggcactcctgaaggtcctgagcccgaacgaccttcgcctggtgatggcaacccacgtgagaacagtccttttttaaacaatgtggaggtcgaacaggagtctttctttgagggaaagaatatggcgctgttcgaagaggagatggattccaatcctatggtctcatccctgctcaataagctggcaaattatactaatttgtcccagggagttgttgagcatgaagaggatgaggagagccggcgccgtgaggccaaagctccacggatgggcacctttattggtgtctatctgccttgcttgcagaatattctgggtgttatcctcttcttaaggctcacttggatagtcggagttgccggggttctggaatcattcctgatcgttgcaatgtgctgtacatgcacaatgcttactgcaatatcgatgtctgccattgcaactaatggagtcgtgcccgccggggggagctactatatgatcagccgatctctgggacccgagttcggaggcgctgtagggttatgtttttaccttggaactactttcgcaggcgcaatgtatattctgggcaccatcgagatatttttaactgggacagaggacggagttggcagcctgggattaggtctggcccaaggaaatcgcaggcagacccacttaagtccaagcgatgccgcccaggcagcacacggggcctcttacggatctttctag

SEQ ID NO: 134787 - DNA, 3066 bp, synthetic construct
  misc_feature 1..3066: note = Description of Artificial Sequence: Synthetic coding sequence
  source 1..3066: mol_type = other DNA
atggctgaacttcccaccacagagacaccgggtgatgccacactctgctcaggtcgcttcaccattagcactctgcttagcagcgatgagcctagccccccagccgcctacgactcgtcacatccttctcacctgacacacagttccacattttgtatgagaaccttcggctacaacactattgatgtggtaccaacttatgaacattacgcgaactcaactcagcccggtgagcccagaaaagtgcgcccgaccctagcagacttgcattccttcttgaaacaggaagggcgtcatcttcacgctctggcatttgatagtcggcccagtcacgagatgactgacggactggtggagggtgaagccggcacatctagcgagaaaaacccggaggaaccagtgcgatttggctgggtcaagggggttatgatacgatgcatgcttaatatctggggcgtcattctctatcttcgcctgccctggatcaccgcccaggcggggatcgtgctgacctggatcatcatcctcctgtctgtgaccgtgacatccatcacaggtctatcaatttccgctatatccactaacgggaaggttaaatcaggtgggacgtattttcttatttcccgaagcctcggcccagagctgggcgggagcattggtctgattttcgccttcgccaacgccgtgggcgtcgccatgcacactgttggtttcgctgaaaccgtacgcgacctgctccaggagtatggagctcctatagttgatcctattaacgatatccggattatcgctgttgtatccgtcacagtgctgctggccatttccctcgcaggaatggagtgggagtcaaaagctcaggtcctgttcttcctcgtgataatggtgtcatttgcaaactacctggtcggcacgcttattccccctagtgaggataaagcctcaaaaggatttttttcttacagggctgatattttcgtccaaaacctcgtgcctgactggagggggccagatggtacgtttttcggcatgttctcaatatttttcccctccgcaacaggaatcctggctggcgccaatatatctggagatcttaaagaccctgccatcgctattcccaaaggaacccttatggcaatcttttggacaacgatatcatacctcgctatctctgccactatcgggagctgcgttgtgcgggacgcttcaggcgtcttaaacgacacagtcactcctgggtggggtgcatgcgaggggcttgcttgcagttacggctggaatttcacagaatgcacacaacagcactcgtgccattatggactgataaattactaccagacaatgagcatggtgtctggctttgctcccctgatcactgccggaatctttggggcaactctctcctccgccttagcctgcctcgtgtccgccgccaaggtgtttcagtgcctgtgtgaggaccaactgtatcccttgattgggttttttggcaaaggttacggcaaaaacaaggagccagtcagaggctacctgcttgcgtacgccattgccgtggctttcatcatcatagctgagctgaacacgattgcgccaattatttcaaacttttttctgtgctcatatgccctgattaatttcagttgtttccatgctagcattacaaattcccctggatggaggcctagtttccagtactacaacaaatgggctgctctgtttggagctatcatcagcgtcgtgattatgttcttgctgacctggtgggctgccttgattgccattggcgtcgtgctgtttctcctactctatgtgatctacaagaagcccgaggtcaattgggggtccagtgtgcaagccgggtcatacaatctggcgctgtcctatagtgtcggacttaatgaagtggaggaccacataaaaaattatcggccccagtgtttggtgctgactggccccccgaactttaggcctgctttggtggactttgttggaacattcacgcgcaatctgagccttatgatttgcggccacgtgcttatcgggcctcacaagcagaggatgcccgaacttcaactgattgccaatggccacaccaaatggctgaataaaaggaagatcaaggcgttctacagcgacgtgattgctgaagacctcagaagaggagtgcagattttaatgcaggccgccgggctgggtcgcatgaagccgaacatattagtcgtgggcttcaagaagaactggcagtcagcccatcctgcaacagttgaagattacataggaattcttcacgatgcttttgattttaactacggagtctgcgtcatgcggatgagagaagggctgaacgtttccaagatgatgcaggcacacatcaatcccgttttcgaccctgccgaggatggaaaagaggcctctgcccgcgtggaccccaaggccctcgtcaaggaggagcaggcaacaacgatttttcagtccgagcagggcaaaaagaccatcgacatttactggcttttcgatgacggtggactcactcttcttatcccttacctgctgggacggaagcgccgctggtcgaagtgcaaaattagagttttcgtcggcgggcagattaacagaatggaccaggagcgcaaggctatcattagtttgcttagcaaattcagactgggatttcacgaggtccacatcttgcctgatataaatcaaaatcccagagctgaacacactaaacgcttcgaagacatgattgccccattccggctcaatgatggcttcaaggacgaggccacagtgaatgagatgaggagagattgtccctggaagatatcagacgaggagatcaccaaaaaccgtgtgaaaagcctgagacaagtcaggctcaatgaaattgtcttggattatagtcgggacgccgctcttatcgtgattacactgccaatcggaaggaaggggaaatgcccttcaagtctgtatatggcgtggttggagacgctttcacaggatttacgacctcctgtaatcctaatcagggggaaccaggagaatgtactcactttctactgccagtag

SEQ ID NO: 134788 - DNA, 3090 bp, synthetic construct
  misc_feature 1..3090: note = Description of Artificial Sequence: Synthetic coding sequence
  source 1..3090: mol_type = other DNA
atggccgagctacccaccacggaaacaccaggggacgccacattgtgttcaggacgtttcaccatttcgacactcctttcaagcgatgagccctcccctccagccgcctatgacagctcacatccctctcacctgacccactccagcactttttgcatgcgaacctttggctataatacaatcgacgtggtacccacctacgaacattacgcaaatagtactcaaccgggggagccccgaaaagttcggcctactctggctgatctgcactcatttctcaaggagggtcggcatttgcatgcattagcttttgatagtcgccccagtcacgaaatgactgacggcctcgtagagggagaagccggaacgtccagcgaaaagaacccagaagaacccgtgcgcttcgggtgggtcaagggcgtaatgattcggtgtatgctgaacatctggggagtcattttatacctacggttgccttggatcaccgcgcaagcggggatcgtgctgacctggatcattattctgcttagcgtgactgtcacatccatcactgggctgagcataagcgctatctctacaaacggtaaggtcaaaagtggtgggacctatttcttgatctcacgttccctcgggcctgagcttggagggtctatcggcctgatttttgcattcgcgaatgccgtgggcgttgcgatgcacacagtggggttcgccgaaacagtgagagatctcctgcaggagtatggggcacccatcgtggaccctattaacgatatcagaatcattgcggtcgtgagcgtgaccgtactgctcgctattagccttgctgggatggagtgggaatccaaagctcaggtgctcttctttctggtgatcatggtgagcttcgcaaattaccttgtgggaaccctcatccctccatcagaggacaaggcatccaagggctttttcagctaccgggcggatatctttgtgcagaacctcgtgccggattggcggggaccagacgggaccttctttggtatgttcagcatcttcttcccttctgccacaggcattcttgcaggggcaaatatatcgggagacctcaaggatcctgccatcgcaatcccgaagggcacactgatggcaatattctggaccaccatcagctacttggcaatcagcgcgaccatcggcagctgcgtggtacgcgacgcctcgggcgtgcttaatgatacagtcacccccggctggggtgcctgcgaaggtcttgcctgtagttacggctggaacttcacagagtgcacccagcagcattcctgccactatggcctgattaactattatcaaacaatgagcatggtttccgggttcgcccctctgattacagctggaatctttggagccaccctgagtagcgctctagcttgtctagtgtctgcagccaaggtgttccagtgcctgtgcgaggatcagttgtaccctctgattggtttcttcggtaagggatatggaaagaacaaagagcccgttaggggatatctcctagcctatgctatcgccgtggccttcatcattattgcggaattgaacacaattgcccccattatctcgaattttttcttgtgttcctacgctctcataaacttcagctgttttcatgcaagtatcaccaactctcccggttggcgccctagtttccagtattataataaatgggctgctctctttggtgcaatcatttccgtcgtgataatgttcctgttgacttggtgggctgctcttattgcaatcggggtggtattgtttctgttgttgtacgttatctacaaaaagcctgaggtgaactgggggagttcagtccaagccggaagttataaccttgctctgtcctacagtgtcggactgaatgaagttgaagatcatattaaaaattaccgtccccagtgccttgtgctcaccggaccccccaacttcagaccagcactggttgacttcgttggcacgttcacccggaatctgtcattgatgatttgcggacacgtcctgattgggccccacaaacagaggatgcctgagttgcaactgattgctaacggccacacgaaatggctgaataagcggaaaataaaagcattctactctgatgtgattgctgaggatctgagaagaggagtgcaaatccttatgcaggctgctggtctgggacggatgaagccgaacatcctggtggtgggcttcaagaaaaattggcagtctgcacatccagccacagtggaggactatatcggcattctccacgacgcctttgacttcaactacggggtgtgtgtcatgaggatgagagaaggattaaacgtcagtaagatgatgcaggctcatattaatccagtttttgaccctgccgaggacggaaaagaggcatccgcacggggcgcacgaccttccgttagtggcgccctcgatcctaaggccctggtcaaagaagagcaagccacgaccatcttccagagtgagcaaggtaagaaaactatcgacatctactggctgttcgacgacggtgggctgacgctacttatcccttaccttcttgggcgtaagcggcgctggtcaaagtgtaaaataagggtgtttgtcggcggccagatcaaccgaatggatcaggagcggaaggcaatcatctcactgctaagcaaatttaggcttggattccacgaagtccacatcctgcctgatattaaccagaatccccgggcagaacatactaagcggtttgaagatatgatcgctccgttccgccttaatgatgggttcaaggacgaagctaccgtgaatgaaatgaggagagactgcccttggaaaatctccgatgaagaaattacgaagaatagagttaaatcgctgcggcaggttcggcttaatgaaattgtcctggactacagtcgcgacgccgctctaatcgttattaccctgccaataggaagaaagggtaaatgcccaagctcattgtacatggcctggcttgagacactcagccaggatcttaggccccccgtgatcttgattcggggtaaccaggaaaacgtgctcacgttctattgccagtag

SEQ ID NO: 134789 - DNA, 3093 bp, synthetic construct
  misc_feature 1..3093: note = Description of Artificial Sequence: Synthetic coding sequence
  source 1..3093: mol_type = other DNA
atggcagaacttcccaccaccgaaactccgggtgatgctactttgtgctcaggccgcttcactatcagtacactgctgtcaagcgatgaaccatccccacccgcagcatacgatagctctcatccaagccatttaacgcactccagtactttctgcatgcgcacatttggatacaataccatagatgtggtacccacatacgagcattacgcaaactccacacaaccaggagagccaagaaaggtccggcccaccctggcggatctccattctttcctcaagcaggaaggaaggcatcttcatgcgctggctttcgacagccgcccttctcatgaaatgactgatgggcttgtggaaggggaggcagggacatcctccgagaaaaaccctgaggaacccgtcaggtttggttgggttaagggggtgatgatccgatgtatgctcaatatttggggtgtaatcctgtatctcaggttgccatggattaccgcccaggcgggaatcgttctgacttggatcataattcttctctctgtgacagttacttctatcaccgggttatcaattagtgccatctcaacaaacggtaaggtgaagtcaggcggcacttactttttaatctctaggtctctggggccagaactgggaggtagtattggcctgatcttcgcctttgccaatgcagttggggttgcaatgcacacggtcgggttcgcagagaccgtgcgcgacttgctgcaggaatatggggcccctatcgtggaccctataaacgacattcggatcatcgccgtggtgagcgtgaccgtgctgctcgccatttctctcgctggtatggagtgggaatcaaaggcccaggtgctgttctttctggttatcatggtgtcttttgctaactacctcgtcggtaccctgatcccgcctagtgaggataaagctagtaagggctttttcagttaccgagccgatatcttcgtccagaatctagtaccggattggcgggggccggatgggacatttttcgggatgtttagtattttctttccttctgcgaccggtatcctggctggggctaatattagcggggacttgaaagatccggccatcgccatccccaaggggacactgatggccatcttctggacaacgatctcctacctagctattagcgccaccattggttcatgcgtggttcgcgatgccagcggtgtgctgaacgacaccgtcactcccggctggggagcctgtgagggtctcgcttgtagctatggttggaattttacagagtgtacccagcagcactcatgtcactatggtctaataaactactaccagaccatgtccatggtatcggggtttgctcctctaattacagcggggatcttcggggctacattaagctctgccctggcatgcctggtgtccgccgccaaggttttccaatgcttgtgtgaagaccagctgtatccattaataggttttttcggtaaaggatatggaaagaataaagagcctgtgcgtgggtatctgctagcttacgctatagctgtcgcgttcattattattgccgagctcaacacaatcgcacctatcataagcaacttttttctgtgctcatatgccctgatcaacttttcatgttttcacgcttcaatcacgaactcaccagggtggagaccttcttttcagtattacaacaaatgggccgccctgttcggcgcaataataagtgtggtgattatgtttctgctaacatggtgggcggccttaatagcaatcggggtggtgcttttcctcctcctctacgttatttacaagaaacctgaagtcaactggggatccagtgtgcaggccggtagctacaacctggctctcagttactctgtgggtctaaatgaggtggaggaccatattaagaattatagaccccagtgtttagtgctgaccggcccccccaacttcaggccggctctggtcgattttgtggggacatttacgagaaatttgtccctcatgatatgtggtcacgtgttgattgggccccataagcagcggatgcctgaactgcagttgattgcaaacgggcatacaaaatggctgaataagcgtaagattaaggctttctactcagacgtgattgcggaagaccttcggagaggagttcaaattcttatgcaggcagccggtcttggtagaatgaagcccaacatactcgtcgtgggttttaagaaaaattggcagtcggcccatcccgccaccgttgaggactacataggcatcttgcatgacgctttcgatttcaattacggagtgtgcgtgatgcgcatgcgtgagggcctaaacgtgtctaagatgatgcaagcacatatcaatcctgtgttcgaccctgctgaggacggcaaagaagcatctgccaggggtgcacggcccagcgtctctggtgctcttgatcccaaagccttggtgaaggaagaacaagcaacaactatctttcagagcgagcagggaaaaaagaccatcgatatttactggcttttcgacgatggcggcctgacgcttttaatcccctacctgctgggacgaaaaagacggtggtccaagtgcaagatccgggtttttgtcggcggccagattaatcgtatggaccaagaacggaaggccattatctccctcctgtctaaatttcggctcggcttccacgaggtccacatccttccagatatcaatcagaacccacgtgcagagcatactaagaggttcgaggacatgattgccccctttagactcaacgacggatttaaggacgaagcaaccgtgaatgaaatgcgaagggattgtccctggaaaattagcgatgaggaaattaccaaaaacagagtgaaaagcctgcgccaagtgaggctcaatgagatagtattggattattcacgggatgctgcccttatcgttattaccctgcccatcggccgtaaaggaaaatgcccttcttccctgtacatggcgtggctggaaaccctatcacaggacctccgtccacccgttatacttataagaggcaaccaagagaacgtcctaacattctactgtcagtag

SEQ ID NO: 134790 - DNA, 3090 bp, synthetic construct
  misc_feature 1..3090: note = Description of Artificial Sequence: Synthetic coding sequence
  source 1..3090: mol_type = other DNA
atggccgagttacctacgacggaaacgccgggtgatgccactctgtgctctggtaggtttactatttccacattactcagtagtgatgagccatcacctcctgcggcatacgactcctcacatccctcccatctgacacatagcagtacgttttgcatgaggacctttggctataataccattgatgtagtgcctacatacgagcattacgctaactccacccagcctggcgagccacgaaaagtgaggccgaccctggccgacttacattcctttctgaaggaaggcagacatttgcacgccctggctttcgatagcagaccctcacacgagatgactgatggccttgttgagggagaggccggaacatcgagcgagaagaatcccgaagaacctgtgcggtttggctgggtgaagggcgtgatgatccggtgtatgctgaacatctggggagttatcctgtatctccggctcccttggattactgcccaggccgggatcgttctgacctggattattattctgttgtccgtgacagtgacttctattaccggactgtccatctctgccatcagcacgaacggaaaagtgaagagcggcggtacttacttcctgatatctagatctcttggccccgagctgggcgggtccattggattaatcttcgctttcgccaatgctgtgggcgtcgcaatgcataccgtgggatttgcggagacagtgcgcgatttgctccaggagtatggtgcaccaattgtcgatcctatcaacgacattaggattatcgcagtggtgtcggttactgtgctgttggctatctcattggccggcatggagtgggagagtaaggctcaggtcttgttcttcctggtgatcatggtcagttttgccaattacctcgtgggcacactcatccccccgtcagaagataaagcttctaaagggttcttttcttaccgggccgacattttcgtgcaaaacctggttcctgactggcgcggccccgacggcacttttttcggcatgttctctatttttttcccatcagccaccggaattttggccggcgcaaatatctccggggatctgaaggaccctgcaattgccatccccaagggcaccctgatggcaatattctggaccaccatatcctatctggctatttctgcaaccatcgggtcttgcgtggtaagagatgccagcggcgtcttgaacgacaccgtcacgcctggatggggtgcctgcgaaggtctcgcctgttcgtacggttggaatttcacagagtgcacccaacagcactcatgccactacgggctgatcaactattatcaaaccatgtctatggtcagcggattcgcaccactgattacggctggcatattcggcgccactctcagcagcgctctcgcctgcttagtgtccgccgccaaagtgttccagtgtttgtgtgaggaccagctatatccgctaatcggattctttggaaagggatatggcaagaataaagagccagtgaggggctacctgctggcctatgctatcgccgtggcatttattatcattgccgagcttaatactatcgctcccattatcagtaattttttcttgtgcagttacgctctaatcaacttctcttgttttcacgctagcattacaaattctcccgggtggagaccctctttccagtattataataagtgggccgcactgttcggagccataatcagtgtggtaatcatgttcctactaacctggtgggcggccctgatcgccatcggcgtggtgctgttcctactcctctatgtgatctataaaaagccagaggtgaactggggttctagtgtacaagctggcagttataatctcgcactatcatattctgtcggtttgaacgaagtggaagatcacatcaaaaactataggccccaatgtctggttctcacagggcccccgaacttcagacctgccctcgtggatttcgtcggaaccttcacgcggaatttaagtttgatgatttgtggacatgtgctgatcggtccccataaacaaagaatgccggaactccagttaattgcgaatggccacacaaaatggctgaacaagcgcaagatcaaggctttctacagtgacgtgatagctgaagatttgaggcggggggtccaaatacttatgcaggcagcgggactagggagaatgaaaccaaacattctggtggtgggatttaaaaagaactggcagagtgcacacccagctacggtagaggactacatcgggatcctacatgacgcatttgatttcaactacggagtatgtgtaatgcggatgcgggaaggcctaaacgtcagcaagatgatgcaagctcatatcaatcccgtttttgaccccgccgaggatggtaaagaagcgtctgcccggggggccagacctagtgtctctggcgctcttgaccctaaggccctggtcaaggaagagcaggcaaccacgatctttcagagcgagcagggcaaaaaaacaatcgacatctactggctgtttgacgacgggggtttgaccttgctgattccctacctgctggggagaaaacgtaggtggagcaaatgcaagattagagtatttgtgggcggccaaatcaatcggatggatcaggagagaaaggctatcatttccctgctctccaaattcagattgggttttcacgaggtccacatcttacctgatattaaccagaacccccgagcagaacataccaagcggttcgaggacatgattgctccatttaggctcaacgatggttttaaagatgaggcgacggttaacgagatgaggagagactgtccatggaaaatttccgatgaagagattactaaaaatagagtgaaaagcctgagacaggtccgattgaacgagattgttctggactactcgcgcgatgccgccctgatcgtgatcacactgcccatcgggcgcaagggcaaatgtcctagctcactttacatggcctggttggaaactctaagtcaggacttaaggccaccagtcatactgatccgcggaaatcaggaaaacgtcctgaccttttactgccagtag

SEQ ID NO: 134791 - DNA, 1293 bp, synthetic construct
  misc_feature 1..1293: note = Description of Artificial Sequence: Synthetic coding sequence
  source 1..1293: mol_type = other DNA
atgagcctaaacaacagctctaacgtgttcctggactcggtaccatcaaataccaacagattccaggtttcagtcatcaacgaaaatcacgagtcatccgccgcagcagacgataatacagacccaccgcactatgaggaaactagtttcggagatgaggcccaaaagcgcctccgcatctcatttcgtcccgggaatcaggaatgttacgacaactttctccaatctggcgaaacagccaaaaccgatgcgagctttcacgcctacgacagccatacaaatacatactatctgcagacttttgggcacaacacaatggatgccgttcctaagatagaatactatcggaacacgggctcgatcagcggaccgaaggtgaaccgcccgtcgctgttggaaatccatgagcagctcgccaagaatgtagctgtcacgccgagctccgccgaccgcgtggccaacggcgacggcatccccggggacgagcaggccgagaataaggaggatgatcaagctggcgtggtgaagttcggatgggtcaagggagtcctggtgcggtgtatgttgaatatctggggggtcatgctctttatcaggttatcctggattgtgggtgaagctggcatcgggttgggtgttttgatcatactgctctccactatggtgacgtcaatcaccgggctgtccacaagcgccatcgcaactaacggcttcgtgcgcggcggtggggcgtattacctgattagtagatccctgggacccgagtttgggggcagcattggcttgatcttcgcatttgccaatgctgtcgctgttgcaatgtacgttgtcggattcgccgagactgtcgttgaccttctgaaggagtccgactccatgatggtagacccaacgaacgacattcggataatcggctctattaccgtggtcattctccttggcatctccgtggcggggatggagtgggaagctaaggcccaggtgatattgctcgttatccttctcatcgctattgccaacttcttcatcggcactgtgattccatccaacaacgaaaaaaaaagtcgcggtttctttaattaccaagcttccatctttgcggagaacttcgggcctcgcttcaccaaaggcgaaggatttttttccgtctttgcaatattcttcccagccgctactggaattctcgctggcgctaatatttctggggatcttgaggccttgcggaaacagggcgctagcccccttccacagggcgctcagtcccgtcggagaaggcagaccagccttatttag

SEQ ID NO: 134792 - DNA, 3300 bp, synthetic construct
  misc_feature 1..3300: note = Description of Artificial Sequence: Synthetic coding sequence
  source 1..3300: mol_type = other DNA
atgtcgttaaacaattccagcaacgtatttcttgacagtgtacctagcaataccaacagatttcaggtgagtgtaattaacgaaaaccacgaaagctccgctgcagctgacgacaacactgacccaccccactatgaggaaacctcatttggagacgaagcgcaaaagcgacttcggatctctttcaggccggggaatcaagagtgttacgacaatttcctacaaagcggcgaaactgctaagaccgacgccagctttcatgcctatgactcacacactaacacctactacttgcagacctttgggcacaacactatggacgccgtgccgaagatcgagtactaccgcaacacaggctcaatcagtggccctaaagtaaaccggccctcccttctggaaatacatgaacagctggctaagaacgtcgccgtgacacctagctccgcggacagggtcgccaatggagacggcattcccggcgacgaacaagccgaaaataaagaagacgatcaggccggggtggtgaaattcgggtgggtcaagggtgttctggtgaggtgcatgcttaatatatggggagtgatgcttttcatccggctctcttggatcgtaggcgaagctggcatagggctgggagttcttatcatcttgctatccacaatggtcacaagcattactggcctgagtacatccgcaattgcgacaaatggctttgtgcgaggtgggggcgcttactatctaatcagtagatcactaggcccggaattcggcggctcaattgggctcatcttcgccttcgcaaacgctgttgccgtggctatgtacgttgtcgggttcgccgaaacagtcgtagacctgcttaaagagtccgattccatgatggtggacccaactaacgatatcaggatcatcggatccattacagtagtgatcctgctggggattagtgttgccggaatggagtgggaagccaaagcccaggtgatcctgcttgttatccttctgatcgccattgctaacttcttcatcggcactgtgatacccagtaacaacgagaaaaaatcaagggggtttttcaattaccaggcctccatctttgcggagaattttgggccaagatttacgaaaggcgagggctttttctctgtctttgctattttttttccagccgccaccgggatactggccggagccaacatctcaggcgatctcgaagatccccaagatgccattcccagaggcactatgttggccatctttattacgaccgtggcgtatttgggcgtggccatttgcgttggagcttgcgtcgtccgggatgcaacagggaatatgaatgatacaataatatctggaatgaattgcaatggttctgctgcttgtggtctggggtacgacttcagccggtgccgccacgaaccatgccagtatgggctcatgaataacttccaggtaatgtccatggtgtcaggatttgggccactgattactgccggcatttttagtgctactctgtcctccgcattagcgagcctggtcagcgccccaaaggtcttccaagccctgtgcaaggataacatttacaaggcgctgcagttctttgccaagggctatggtaagaacaatgagccgctgcggggatatatccttacattcctgattgcaatggccttcattctgattgccgagctgaatactattgcccctatcatctcgaacttctttctggcctcctacgcccttattaattttagctgtttccatgcaagctatgcaaaaagcccaggctggaggcctgcctacggaatctataacatgtgggtgtccctgtttggggccgtactgtgctgtgcagtgatgttcgtcatcaactggtgggctgcagtgattacttacgtcattgaattcttcctgtatgtttatgtcacctgcaagaaaccggacgtcaactggggctcgagcactcaagccctctcttacgtttccgccctcgataatgccctggaactaaccactgtggaagatcacgttaaaaatttccgtccacaatgcatcgttcttaccgggggccccatgacacggccagctttattagacatcacgcacgcgtttactaagaatagcggtctctgtatctgctgtgaggttttcgtgggtcctcggaaactttgtgtaaaggagatgaattcgggcatggccaagaagcaggcctggctcatcaagaacaagattaaagcgttctatgctgcagtggccgctgactgcttcagagatggcgttcgctccttactgcaggcgtctggactcggtagaatgaaacccaacacacttgtgattggctacaaaaaaaactggagaaaagcaccactgacggagatagagaactatgtaggcattatccatgatgcctttgacttcgaaatcggggtggtaattgtccggatcagccaggggtttgacattagtcaggttttgcaagttcaagaagagttagaaagactcgagcaagagcgcctggcactggaagcaaccatcaaggataatgagtgcgaggaagagtctggcgggatccgaggactatttaaaaaagctggaaagctgaacattaccaagacgacaccaaaaaaggacggtagtataaacacctcccagtcgatgcatgtaggggagttcaaccagaaactggtcgaggcctccacgcagttcaagaaaaaacaggaaaaagggacaattgacgtctggtggctattcgatgacgggggtttgaccctgctgattccatatatcctgacccttcgtaaaaaatggaaagactgtaaactgcgaatatacgtcggcggaaagatcaatcgcattgaggaggaaaagatcgtcatggcatcattgctcagtaagtttcgcattaagttcgctgatatacatatcatcggtgacataaacatcaggccgaataaggagagctggaaagttttcgaagagatgatcgagccctaccggctccacgagtcctgcaaagaccttaccacagcagagaagctcaagcgcgaaaccccttggaagattactgacgctgagctggaagctgtaaaagagaagagctacaggcaagtaagattgaacgagctgcttcaggagcactccagagctgccaacctcatcgtgttaagcttgccagtcgctcggaaaggctcaatttccgatttgctgtatatggcctggttggagattttaaccaagaacctccccccagtgctcttggtgagagggaaccataagaacgttctgacattctactcctag

SEQ ID NO: 134793 - DNA, 3300 bp, synthetic construct
  misc_feature 1..3300: note = Description of Artificial Sequence: Synthetic coding sequence
  source 1..3300: mol_type = other DNA
atgagcctcaacaacagttccaacgtgttcctggatagcgtgccatctaacacaaatcggttccaagtatctgtgatcaatgagaaccatgaatcatccgctgcagctgacgataatactgacccaccacattatgaggagacatcctttggcgatgaagcacagaaaaggctcagaatttcttttagacctggcaatcaggaatgctatgataacttcctccagtcaggagaaaccgccaagactgacgcctcgttccacgcatatgactcccacacgaacacctattatctgcaaactttcggacataacacgatggacgctgtccctaaaatagagtactatcgaaacactggttccatttccgggcccaaagtgaaccggccgtctttgctcgagattcacgagcagttggcaaagaacgtggccgttactccatcgtcagcagatcgagtcgccaacggcgatggaataccaggggacgaacaggcagaaaacaaagaggatgatcaggcgggggttgtcaagttcggctgggtcaagggggtcttggttagatgcatgttaaacatatggggagtcatgctgtttattagactatcttggattgtgggtgaggctggcattggactgggggtcatcatcattggactctccgtggttgtcaccaccctgaccggcatctctatgagcgccatctgtaccaacggagtcgtgcgcgggggcggagcctactatttaatttccagatccctcggcccagagttcggtggctccatcggcctcatattcgcctttgcaaacgcagtggcggtggctatgtatgtagtgggcttcgctgaaaccgtagtggacctccttaaagaaagcgatagcatgatggtcgacccaacgaacgacatccgaattataggcagcattacagtggtgatactgctcgggatcagcgtagccggaatggagtgggaggccaaagctcaggttatcctgttagtaattctcttaatcgctatagccaacttctttataggaactgtgattcctagtaataacgaaaagaaatctagaggcttctttaactaccaggcctcaatcttcgcggagaattttggcccaagatttacaaagggggagggctttttctccgtgtttgccatcttcttccccgccgcgaccggcatcctcgcaggggcaaatatctccggggatcttgaagatcctcaggacgccattcctcgcggtacaatgctagcaatttttatcaccaccgtggcttatctcggtgtagcgatctgtgttggcgcttgcgtggtgagggacgcaacaggcaacatgaatgacacaataattagcggcatgaactgcaatggctccgcagcgtgcggactggggtatgacttttccaggtgccgacatgagccctgtcagtatggtctcatgaataattttcaagtgatgagcatggtcagtgggttcggtcccttgatcactgcaggcatcttttcagcaacgctatcaagcgccctcgcctcactcgtgagcgctccaaaggtgtttcaggcactgtgcaaggacaatatctataaagctctgcagtttttcgctaaggggtacggcaagaataatgaacctctgcgcggctacattctcacattcttgatcgctatggctttcattttgatcgccgaactaaacacaatcgctccaattatttccaatttctttcttgcctcctatgctcttatcaacttctcatgctttcatgccagctatgcaaaaagtccaggatggagacccgcatacggcatttataacatgtgggtgagtctgtttggagccgtactttgctgcgccgtcatgttcgtgattaattggtgggcagccgttattacctatgtgattgaattctttctctacgtgtatgtgacctgcaagaaacctgatgtgaattggggatcttcaactcaggcgctgtcttatgtgtcagcacttgacaatgccctcgaactcactaccgtggaagatcacgtgaaaaacttcaggcctcagtgcattgtactcaccgggggcccgatgacaaggcccgcacttcttgatattacgcacgccttcaccaagaattctggactctgcatctgctgcgaggtgtttgtgggacccagaaagttatgtgtgaaggagatgaattccggtatggcaaaaaagcaggcatggctgattaagaataagatcaaggcattttacgccgctgttgctgcggattgtttcagggacggcgtaagaagtcttcttcaagcttccggtctgggacgcatgaaaccaaatacattagttatagggtacaagaaaaattggcggaaggcacccctcacagagatcgagaattacgtgggaatcatacacgacgcattcgatttcgaaataggagtggttatcgtgaggataagccagggctttgatatttcacaggtcctgcaggtgcaggaagagctggaacgactggagcaagaaagactcgccctggaggccacaattaaagacaacgaatgcgaggaggagagtggtggtattagaggactgttcaagaaggccggcaagctgaatatcaccaagactaccccaaaaaaggacggaagtataaacacctcccagtcgatgcatgttggagagtttaaccagaagttggtggaagcgtcgacacagttcaaaaaaaaacaggagaagggcactattgacgtatggtggctgttcgatgacggtgggttaactctgctgatcccttatattctaaccctgagaaaaaagtggaaggactgtaaacttagaatctatgtggggggaaaaattaaccgcatcgaggaggaaaaaattgtaatggctagtttactctccaaattccggattaaatttgccgacattcacatcatcggcgacataaatattagacctaataaggaaagttggaaagtttttgaggagatgattgagccttataggctgcacgaaagctgtaaggacctgactacagctgaaaaactgaagcgcgaaactccatggaagataacagacgctgagctagaggcagttaaggagaagtcctacaggcaggtgcggctgaacgaactgttgcaggaacacagcagagcggccaacctcattgtgctttcattacctgttgcacgaaagggaagtatttccgacctcctatatatggcctggcttgaaatcctgacgaagaacctccctccggtccttctggtgaggggcaaccacaaaaatgtgttgactttttactcttag

SEQ ID NO: 134794 - DNA, 1782 bp, synthetic construct
  misc_feature 1..1782: note = Description of Artificial Sequence: Synthetic coding sequence
  source 1..1782: mol_type = other DNA
atgctgaatatctggggagttatgctgtttataaggttaagttggatcgtaggagaggcgggaattggcttgggagtcttgattatcctgctgtcgactatggtgaccagtattaccggtctttctaccagcgccatcgcgaccaatggatttgtccgtggaggcggagcgtattatttgatcagcaggtccctcggcccagaatttggtgggtcaatcggcctgatctttgctttcgccaatgccgttgccgtggctatgtatgtagtgggcttcgccgaaacagtcgttgatctgctcaaggagtccgattccatgatggtggacccgactaacgatatacgaatcatcggatccatcaccgtcgtcattctcttaggaatcagcgtggcaggtatggagtgggaagctaaggcccaagtgatcctactggtaattctgctcattgcaattgccaattttttcatcggtacagtgattcctagcaataatgagaagaagtctcggggattctttaattaccaagcctccatttttgcggaaaattttgggcctagattcaccaagggcgaaggattcttctcagtctttgcaattttttttccagctgcaacagggatccttgccggggctaacatctcgggagatctggaagatccccaggacgccatacctaggggtactatgttggccatctttattaccaccgtcgcttacttgggagtcgctatttgtgttggcgcctgcgtggtgcgtgatgccactggaaatatgaacgataccataatcagtggtatgaattgcaacggcagtgcggcctgcggacttgggtacgatttttcaagatgcaggcacgaaccctgccagtatgggctgatgaataactttcaagttatgtccatggtaagtgggttcggcccacttattacagctggaatcttttctgcaaccttgtcttctgcattggcgagtcttgtgtctgccccgaaggtcttccaggctttgtgcaaggataacatctacaaggccctccagtttttcgcaaagggttatgggaaaaataatgagccactgcgtggatatatcctcacatttctgatcgccatggcctttattcttattgccgaactaaataccatcgcaccaatcatcagtaactttttcctggcctcttacgcgctgattaatttctcttgctttcatgccagctacgctaagagcccgggctggcgacccgcttatggtatctacaatatgtgggtcagcctgttcggagcagtgctgtgctgtgctgtgatgtttgttatcaactggtgggccgcagtaatcacttatgtgattgagtttttcttatatgtgtatgttacttgtaaaaagccggatgtcaactggggctctagcactcaagccctcagctatgtctccgcccttgataatgcactggaactgaccaccgtagaggatcacgtgaagaattttcgaccccagtgcattgtgcttacaggcgggccaatgacgcgacctgcccttctggacattacacacgcttttacaaaaaactcagggctttgtatctgctgtgaggtgtttgtcggtcctcgcaaattgtgcgtgaaagaaatgaattctggtatggctaagactggcctggcctataaggagcagaatcaggggtttctgtgttgctcaggcggccggttattccagggatggtgccctaaatcaagttctgggttgaggttacgcaagaatgagacaaagcactctggtgattggatctag

SEQ ID NO: 134795 - DNA, 540 bp, synthetic construct
  misc_feature 1..540: note = Description of Artificial Sequence: Synthetic coding sequence
  source 1..540: mol_type = other DNA
atgagaacaatgcgagcagtacagctgcaaatgactatcctgacacaccatatcatgaagaaaccccttctaggcatgaaactccggaaggatagcgagtcggcattgggcttaggaatccgtagtgcgatgacaataagttctaagcaagcactgtcatacgtgtcagccttggataacgctctcgagctgaccaccgttgaggaccacgtgaagaatttcagaccccaatgtattgtcttgacgggagggcccatgactaggcccgccctgctggacattacccacgccttcaccaagaattccggactgtgcatttgttgtgaggtcttcgtgggtcctcgcaagctgtgtgtgaaggagatgaactctgggatggccaaaaaacaagcttggttaatcaagaataagatcaaagctttctacgctgccgttgcggctgattgtttcagggatggcgtaagaagcttgttacaggcctccgggctgggtaggatgaagcctaacaccttggtgatcggatacaagaagaactggtag

SEQ ID NO: 134796 - DNA, 3300 bp, synthetic construct
  misc_feature 1..3300: note = Description of Artificial Sequence: Synthetic coding sequence
  source 1..3300: mol_type = other DNA
atgtcattgaataacagttcgaacgtttttctagactctgtcccgagtaacaccaatcgatttcaggtgtcagtgatcaacgagaaccacgaatcaagtgcagcagctgatgataacaccgacccaccacattacgaggagacgtcctttggcgatgaggcgcaaaaacggttgaggatttcctttcggccaggaaatcaggagtgctatgataactttctgcagagcggggagaccgctaagaccgatgcctcattccacgcgtacgactcccacactaacacttactatctgcagacgtttgggcataacacgatggacgccgtaccaaagattgaatactaccgcaatactggttccattagcggacccaaagttaaccgcccctctctcctggaaatacatgagcaattggccaaaaatgttgctgtgacaccaagcagcgcagatcgcgttgctaatggcgatgggattcccggagatgagcaggcagagaacaaggaggatgaccaggctggcgtggtcaaattcggctgggtcaaaggggtgctggtgcgctgtatgctcaatatatggggtgtgatgttgttcatccgcctctcctggatcgtgggcgaggcggggataggtttgggagttctgatcattttgcttagcacgatggtgactagcatcacggggctgtccacaagtgccatagctactaacggcttcgtgagagggggcggtgcatattatctgataagcaggagccttggcccggagtttggaggtagtataggtctgatcttcgcctttgccaatgccgtcgctgtggccatgtacgtggtgggattcgctgagactgtggttgacctgctgaaagagtcagattcaatgatggtggacccgactaatgacatcaggatcatcggaagcatcactgttgtgattctcctgggtataagtgtggcaggcatggagtgggaagcgaaagcccaggtgattctgctagttatcttgctgatcgcaattgccaatttttttatcggaacagtgattccatcaaataatgagaaaaaatcacgggggtttttcaactatcaggcctccatcttcgctgaaaactttgggccaagatttacaaaaggcgagggcttcttttctgtatttgctattttttttccagcagccacaggaatcttagccggcgcgaacatcagcggagatctggaggatccccaggacgccattccaaggggaaccatgctggccatttttatcactacagtggcttacctgggggtggcaatttgcgttggagcttgcgtagtgagggacgccactggaaacatgaatgacaccattatcagcggcatgaattgcaatggttcagcagcatgtgggttgggctacgatttctcccggtgtcggcacgagccctgccagtacgggttgatgaacaatttccaggtaatgtcaatggtgagtggttttggaccactgattaccgcaggtatcttctcagctactctcagttctgcccttgccagtcttgtgtcagccccaaaagtgttccaggccttgtgtaaagataacatctacaaggcactccagttcttcgctaaaggttacggtaagaataatgagccactgagaggctacattctgacattcctcattgcaatggcgtttatcctaattgcagagctgaatactattgctccaatcatttctaacttcttcctggcttcctatgcgctcatcaatttcagttgttttcacgccagctatgcaaagtcaccaggctggagacctgcatacggaatctataacatgtgggtatccttatttggcgcagtgctgtgttgcgcagtcatgtttgtgattaactggtgggcagccgtcatcacttacgtgatcgaattttttctttacgtgtacgtgacttgtaagaagccggatgtgaattggggcagctctacgcaggcgctgtcttacgtatccgcactggacaatgctctggaactcacaactgtggaggaccacgtgaagaatttcaggccgcagtgtatagtgctgaccggtggacctatgacaagaccagctctgcttgacataactcatgccttcactaagaactctggcttgtgcatttgctgcgaggtgtttgttggcccccgaaagttgtgtgtcaaggagatgaactccggtatggcaaagaagcaggcatggttaataaaaaacaagataaaggcattttatgcagccgttgccgctgattgtttcagggacggcgtcagatcacttctgcaagcctctggcctgggccgaatgaagccaaataccctagtaatcgggtataagaaaaattggaggaaggcacctctgaccgagatagaaaattacgtgggcataatacatgatgcctttgattttgaaataggcgtggtgattgtgcggatatcccagggcttcgacatctctcaggttctccaggtacaggaagagttggagcgcctggaacaggagagactggcactggaggcaactatcaaggacaacgaatgtgaagaagaaagcggcggcattaggggactgttcaaaaaagccggcaaattgaatatcactaagactacaccaaagaaagacggatcaatcaacacctctcaatccatgcacgtgggcgagttcaatcagaagcttgttgaggcgtccacacaattcaagaaaaagcaagaaaaagggaccatagacgtctggtggctattcgacgatgggggccttaccttactcattccctacattctgacgttgcggaaaaaatggaaagattgtaagttgcgaatctacgtaggcgggaagattaatagaatcgaggaggaaaagatcgttatggcaagtttgctgagcaagtttaggatcaaatttgccgacatacatatcatcggtgatataaatattcgaccaaataaagaatcttggaaagtgttcgaagagatgattgagccttaccggctccatgagagttgcaaagatctcaccaccgccgagaaactaaagcgtgagactccttggaagatcacagacgccgagctggaagccgtgaaagaaaaaagttatcgacaagtacgcctgaacgaactgctccaggagcattcccgggctgctaatcttatcgttctatcactgccggtggccagaaaagggtctatctcagacctgctatatatggcctggctcgaaattcttactaagaacctgccaccagtgctgttagtgcgaggaaatcataagaatgtgcttaccttttactcctag

SEQ ID NO: 134797 - DNA, 1947 bp, synthetic construct
  misc_feature 1..1947: note = Description of Artificial Sequence: Synthetic coding sequence
  source 1..1947: mol_type = other DNA
atgctaaacatttggggggttatgctctttattaggctgtcctggattgttggcgaggcaggcatcggccttggcgtgctcatcatccttctgagtaccatggttacatccattaccggcctctcgacctccgcaatagccactaatggcttcgtgcgcggaggcggggcttactacttaatttctagaagtcttggccctgagttcggcgggagtatcggattaatctttgcctttgctaatgctgtggctgtagccatgtacgttgttgggttcgccgagactgtagttgatctgctgaaggagtccgattcgatgatggtggatccgacaaatgacattaggatcattggaagcattacagtggtgatccttcttggtatttccgttgccgggatggagtgggaagctaaggcacaggtgatactgctggtaatcctgttgattgcaatcgccaacttctttattggaactgtaatcccctctaataatgaaaagaagagtaggggtttctttaactatcaggcctctatcttcgctgagaattttgggccaagattcacaaaaggagaaggctttttttccgtttttgccatttttttccccgccgccacaggtattttagccggggctaatatatccggtgatctggaagatcctcaggacgcaatacctcgaggcaccatgctggccattttcattaccaccgtcgcttacctcggcgtcgccatctgcgttggcgcatgcgtcgtgcgagatgccacgggaaacatgaatgataccataatctcgggaatgaactgcaatgggagcgcagcctgtggcctcggatacgatttctcccgctgtcgccacgagccatgtcagtacggcctgatgaacaattttcaagttatgagcatggtctccggattcggccccttgataactgcagggatttttagtgcgacgctgtcttccgccttggcttctctcgtgtccgccccgaaagtgtttcaggcactttgtaaggacaatatctataaggccctccagttcttcgctaagggctacggtaagaataatgaaccactccgcgggtatattctaacgtttttaatagcaatggcgtttatcctcatcgcggagctgaacactattgctcctattatctcaaacttctttctggcttcatatgcactaattaacttttcatgctttcatgccagctacgctaaaagtccaggctggcgccccgcatacggaatttacaacatgtgggtcagcttgttcggcgccgtcctatgctgcgccgtcatgttcgtgatcaactggtgggccgccgtgattacctatgtcatcgagttctttttgtacgtttacgtcacctgtaaaaagccagacgtgaactggggtagttcaacacaggcactaagctatgtttcagcactagataacgctctcgaactgacaacagtggaggatcacgtaaagaattttagaccccaatgtatcgtcctaaccggcggccccatgacaaggcctgcccttttggacatcacacacgccttcacaaagaacagcgggctgtgtatatgttgcgaagtattcgttggaccacggaagttatgtgttaaggagatgaactctggaatggccaagaaacaggcctggctgattaagaacaaaatcaaggccttttacgccgcagtggctgccgattgcttcagagacggggtgagatcacttctccaggcttccggcctggggaggatgaagcccaataccttagtgatcggttacaaaaaaaactggcggaaagcccctttgacagagattgaaaattatgtcggtatcatccacgatgcctttgacttcgagataggcgtcgtgatcgtccgcattagccaggggtttgatataagtcaggtcctgcaggtccaggaggagctcgaacgcctggagtag

SEQ ID NO: 134798 - DNA, 3639 bp, synthetic construct
  misc_feature 1..3639: note = Description of Artificial Sequence: Synthetic coding sequence
  source 1..3639: mol_type = other DNA
atggaacctagacccactgcccccagttcaggggccccaggtctggctggagtgggtgaaacacccagcgcagccgcattggcagcagcgcgagtggaactgcccggtactgcagtgcctagcgtgcctgaggacgccgcccccgctagccgtgacggcgggggcgtcagagacgaggggcccgcagcagccggcgacggtctggggagacccctgggacccaccccatcacagtcacgcttccaagtcgatctggtatcagaaaatgccggtcgtgccgccgcagccgctgcagcagcagcagccgccgcagccgcagctggtgctggggctggggcgaagcagacccctgcagacggcgaggcgagtggagaaagcgagcccgcaaagggatccgaagaggccaagggacgtttccgcgtgaattttgtggatccagctgcctctagcagcgcagaggattcactgtcggatgcagctggagtgggtgtcgatggcccaaacgtgtcctttcaaaacggcggcgataccgtcctctctgagggcagctctttacactctggagggggtggaggctctggacaccatcagcattactactacgatactcacactaatacatactaccttcgcacattcggacataacactatggacgccgtccctagaattgatcactatcgacatacagccgcccagctgggcgagaaattgctaaggccctcactggcagaactccacgatgaactggagaaggaaccttttgaggacggctttgccaacggggaagaatctactcctactagagacgcggtcgttacgtacacagctgagtcgaaaggcgtcgtaaaattcggctggattaaaggcgtactcgtgcggtgcatgctgaatatatggggggttatgcttttcattcgactgtcctggatcgtgggccaggccgggattggtctctccgtcctggtgattatgatggcaaccgtagtgaccactattaccggtctgagtacctccgcaattgcaacaaacggtttcgtaagggggggcggtgcctactacctcatcagccgttctctggggcctgagtttggcggggcaattggcttgattttcgcattcgccaatgcagttgctgtggcaatgtatgtggtggggtttgctgaaaccgtggtcgagcttctcaaagagcacagcattctgatgatcgatgagatcaatgacatccgcattatcggagcaattacagtagtgatcttgctaggaatcagcgtggcaggaatggagtgggaggccaaagcccaaatcgttctcctggtgattctactcctcgctattggagattttgtgataggcaccttcatccctctcgaatctaaaaagcccaaggggttctttggttacaaatctgagatttttaatgagaacttcggacctgattttcgtgaagaggagacgtttttctccgtcttcgccatctttttccccgctgccactgggattctggccggggctaatatttcgggagacctggcagaccctcagtccgccattcctaaaggtaccctgctggctatcctgattacaacgctggtgtacgttggaatcgctgtttcagtgggcagttgtgtggtgagagacgctacagggaatgtaaacgacaccatcgtgaccgaattgaccaattgtacatccgccgcatgcaagcttaacttcgacttcagtagctgcgagagctcaccctgttcttatggcctcatgaacaactttcaggtgatgtctatggtttcaggctttaccccgctcatctcagccgggatttttagcgctaccctatctagcgccctggcaagccttgtcagcgctccaaagatctttcaggcgctgtgcaaagacaatatctatcccgcctttcagatgttcgcgaaagggtacggaaagaataacgaaccacttagggggtatattctaacattcctcatagctctaggctttattttaatcgccgaactcaacgtcatcgcccctattatttccaacttttttctggcctcctacgctctcatcaatttctccgttttccatgccagcctggccaaaagcccaggttggcggcccgcctttaaatattataacatgtggatttcgctcctcggagccatcctgtgttgtatcgtcatgtttgtcatcaactggtgggcagccttgttgacatacgttattgtactaggactctacatttacgtgacatataagaaaccagacgttaattgggggagctctactcaagctctgacatatctcaatgccctgcaacatagcattaggctgtcaggggtggaagaccatgttaagaactttcgcccccagtgcctggtcatgactggtgctcctaacagccgacctgcgttactgcatttggtccacgacttcactaagaacgttggcctgatgatttgcggccacgtgcatatggggcctcgcagacaggcgatgaaagagatgtccatcgaccaagccaagtaccagagatggcttatcaagaacaagatgaaggcattttacgcgcctgtgcacgccgacgatttgcgcgagggtgctcaatacctgatgcaggctgccggactcggacgcatgaagccgaataccctggttttaggattcaaaaaggactggcttcaggccgacatgcgggatgtggacatgtacattaatcttttccatgacgcctttgacattcagtatggtgtggtggtcatccgactaaaagaaggtttggacatctcccatctgcagggtcaggaggaactgctatcttctcaggagaaaagtcctggcacaaaggatgtagtggtgtcagtagagtactcaaagaagtcggatcttgacacatccaaacccctgtctgagaagcccattacccacaaagtggaggaagaggacggcaagaccgctactcagcccttattaaaaaaagaaagcaagggacctattgtcccattaaacgttgcagatcagaagctgctggaggcctcaactcagttccagaagaagcagggcaaaaataccatcgatgtatggtggctctttgatgacggcggactcaccctgctgatcccttatctgttgacgaccaaaaagaagtggaaggactgcaagattcgggtgttcatcggcggcaagatcaatcgaattgaccacgatcgccgcgccatggctacactgctaagtaagttcaggatcgattttagcgacataatggttttaggagacattaataccaagcctaagaaggaaaacatcatcgcattcgaggagatcatcgagccatacaggctgcacgaagacgacaaggaacaggacattgccgataaaatgaaggaagacgagccttggcgcattaccgataatgagctggaactgtataagactaagacataccgtcagattaggctcaatgaattgctcaaagaacattccagtaccgccaatattatagtcatgtctctacctgtggctaggaagggcgctgtatcttccgccctctatatggcatggctggaggcattgtctaaagatctgcctccgattctattggtccgcgggaatcaccagagcgtgctgacattttattcttag

SEQ ID NO: 134799 - DNA, 3591 bp, synthetic construct
  misc_feature 1..3591: note = Description of Artificial Sequence: Synthetic coding sequence
  source 1..3591: mol_type = other DNA
atggagccccgccccaccgcgccctcttcgggcgctccaggcctggcgggtgttggtgagacaccttctgccgccgctctcgcggctgctcgcgttgagctccctgggaccgcagtgcctagtgtgcccgaagatgctgccccagcctctagggatgggggcggagtaagggacgaaggacccgcagctgctggtgatggactcggacgccccctgggccctacgccctctcaaagccggttccaggtggacttagtttccgagaatgccggccgggccgccgccgctgctgctgctgccgccgccgctgcggcagcagcaggcgctggcgcaggggctaaacagactcctgcagacggggaagcatctggcgagtctgaaccagcaaagggctctgaggaagccaagggccggtttcgagtgaattttgtagaccctgctgccagctcaagtgctgaagactctctcagtgatgccgcaggagttggggtggatggcccaaacgtaagtttccagaacgggggcgacactgtgctcagcgaggggtcctcattgcatagtggcggtggcgggggctccgggcaccaccaacattattattacgatacgcacacgaacacctattatttgcggacatttggacacaacacgatggatgcagtcccaagaatcgaccattatagacacaccgctgcacagctgggggagaagttactccgcccctccctcgctgaattgcacgatgagcttgagaaggagccttttgaagatggctttgctaatggcgaggagagtacccctacaagagacgccgtcgtgacctatactgcggagtctaaaggcgtggtgaaattcggctggataaaaggcgtactggtgagatgcatgctgaatatttggggtgtaatgttgttcataagactgagctggattgttggccaggccgggatcggactcagcgtgctcgtgatcatgatggcaacagtagtgaccactatcactggcctcagcacaagcgccatcgccacaaacggctttgttagaggggggggagcctattatctcatctcaagaagcctggggccggaattcggcggcgctattggtctgattttcgcattcgcaaacgcagtcgcggtcgcgatgtacgttgtgggcttcgccgagaccgtggtcgagctgctaaaagagcacagcattctgatgattgacgaaattaacgacatccgaattattggagccataacagtggtgattttgctgggcatttctgttgctgggatggaatgggaagcaaaggcacaaatcgtattgctggtaatccttttattggctattggcgatttcgtgatcggcacatttataccactggagagcaagaagccgaaaggtttttttggttacaagagcgagatattcaacgaaaactttgggccggactttcgtgaggaggaaacattttttagcgtctttgctatcttttttcccgcggctaccggcatactcgccggagcaaacatctctggagatttggctgacccacagtcggccattccgaagggcacgctactcgctattttgattacaaccctggtttacgtcgggatcgccgtgagtgtcgggtcatgcgttgtccgagacgccacaggcaatgtgaatgacacaatcgttaccgaactgactaactgcaccagtgccgcgtgtaagttgaatttcgattttagtagttgtgagtcttctccctgcagctacggactgatgaacaactttcaggttatgtccatggtcagcggatttactccgcttatcagtgccgggatcttcagcgctacgttatcatccgctctggcttctttagtgagtgcaccgaagatttttcaggccctttgcaaggacaatatctaccccgcctttcagatgttcgccaaagggtacggcaaaaataacgagcccctccgtgggtatattctcacattcctgatcgcactgggtttcatccttattgcagagctcaacgtcattgctccaattatctccaattttttcctggcaagttatgcacttataaatttttcagtgtttcacgccagtctggcaaagtcaccgggctggcgccccgccttcaagtattacaatatgtggatttctctgttaggcgccattctgtgctgcatcgtgatgttcgtaattaactggtgggccgctcttttgacctacgtgatcgtgctgggtttatatatttacgtcacctacaagaagccggatgtcaactggggttccagtacccaggccttaacctacttgaatgccttgcagcactcgatcaggctttccggagtggaggatcacgtgaaaaacttcagacctcagtgcttagtgatgacgggagccccaaacagcagacccgcgcttctgcatctggtccatgacttcacaaagaatgtgggcctcatgatttgcggacacgtgcacatggggcccaggagacaggccatgaaagaaatgagcatagaccaggcaaaataccaacgctggcttatcaaaaataagatgaaggctttttatgctccagtccatgcagacgatttgcgagaaggagcacaatacctgatgcaggcggctgggttgggaaggatgaagccgaatacattggtgctgggattcaaaaaggactggctgcaggctgacatgagggacgttgacatgtatatcaatctttttcacgacgcatttgatattcaatatggagtggtggttatcagactgaaggaaggcctggatatctctcacctgcaaggacaggaagagctcttgagctcacaggagaaatccccaggaacgaaggacgtcgtcgtcagcgtcgagtacagcaagaaatctgatctggacacgagtaaacctctgtccgagaagccaatcacacataaagagtccaagggcccaatcgtgcctctgaatgtggccgaccagaaacttctcgaagctagtacacaatttcagaagaaacaaggtaaaaatacaattgacgtgtggtggctgttcgatgatggcgggctgaccctcctgatcccctacttgctgaccaccaagaaaaagtggaaagattgtaagatcagagtgtttatcgggggtaaaatcaaccgcatcgatcacgaccgcagagccatggccacactcttatccaagtttcgaatcgacttttccgatattatggtgctgggtgatattaacaccaagcctaaaaaggagaacatcattgcatttgaggagataattgaaccatacaggcttcatgaggatgataaagaacaggatattgccgataagatgaaggaggatgagccatggcgaatcactgacaacgagcttgagctctacaaaactaaaacttacagacagatcagacttaatgagttgctgaaagaacacagctcgactgccaacattattgtaatgagcctgccggtcgcaaggaagggagctgtaagttccgccctgtatatggcatggctcgaggctctctccaaggatcttcctccaatcctgcttgtgcgtgggaaccaccaaagcgtgctgacattctatagttag

SEQ ID NO: 134800 - DNA, 1788 bp, synthetic construct
  misc_feature 1..1788: note = Description of Artificial Sequence: Synthetic coding sequence
  source 1..1788: mol_type = other DNA
atgaagttctttagctacatattggtttatcggcggtttttgtttgtcgtcttcactgtgctggtacttcttcctctcccaatagttctccatactaaggaggccgagtgcgcctacacactgttcgtggtcgctacattctggctcaccgaggctctgcccttgtcggttactgcgctattgccgagtctcatgctgccaatgtttggcataatgccaagtaaaaaagtggcatccgcatactttaaagacttccaccttctcctgatcggagttatctgtctggctaccagtatcgagaaatggaaccttcacaaacgtatagctctgaaaatggtaatgatggtaggtgtcaatccagcatggcttaccttaggcttcatgagttcaaccgccttcttgtccatgtggctgtcaaacacctcgacagccgccatggtgatgcctattgccgaggctgtcgtccagcagatcattaatgcagaggccgaagtcgaggcaacccaaatgacctacttcaatgggagcacaaaccatgggctggagatagatgagtccgttaatgggcatgagattaacgagcgtaaagagaaaaccaaaccagtgcctggctacaacaacgacactgggaagatatcgtctaaagtggagctcgagaaaaactccggtatgcgtaccaaataccgcacgaaaaagggacacgtgacacgcaaactcacgtgcctgtgcatcgcctacagtagcaccatagggggactgacgacgattacaggcacaagtactaacctgatctttgccgaatactttaatacccggtaccccgactgccggtgcctgaacttcgggagctggttcactttcagctttcccgcagcgcttattatattgttattgtcctggatatggctccagtggctattcctgggcttcaactttaaggaaatgttcaaatgtgggaaaactaagactgtccagcagaaggcatgtgcagaagtgattaaacaagaatatcagaagctggggcccatccggtatcaggaaattgtcactttggtcctctttatcatcatggcattactctggttcagcagggaccccggattcgtgcctggctggagcgcattattctcagaatatcctggcttcgccacagattcaacagtcgcactgctgatcggcctgctgttcttccttatccccgctaaaactttgactaaaacaactccaacaggggaaatagtcgcgtttgattatagccccctcattacgtggaaagagttccagtccttcatgccctgggacattgcgattttggtcggaggcggttttgctctggcagatggttgtgaggaatccggtttgagcaagtggattggaaacaaacttagtcctctgggctccctgccagcctggctgattatcctcatttcaagcctcatggtgacaagcctcacagaagtggcatccaaccccgccaccatcaccctgtttctccccattctttctccgctggcagaagccatccacgtgaaccccctttacattctcatacccagcacactgtgtacatccttcgcgttcttgctcccagtggctaaccctcccaatgcaattgtgttctcctacggacacctcaaagtgatcgacatggttaaggccggcctcggggttaacatcgtgggcgtggcagtggtcatgctgggaatctgcacgtggattgtgcccatgttcgatctttatacataccccagctgggctcccgcaatgagcaacgaaacgatgccttag

SEQ ID NO: 134801 - DNA, 486 bp, synthetic construct
  misc_feature 1..486: note = Description of Artificial Sequence: Synthetic coding sequence
  source 1..486: mol_type = other DNA
atgctgcctatgttcgggataatgccatccaaaaaagtggccagcgcttacttcaaggacttccatctgctgctcattggcgtgatatgtctggctacgtccatcgaaaaatggaacttacacaagcggattgctttgaagatggtcatgatggtgggagttaatcctgcctggttgactcttggattcatgtcatcaactgcctttctctctatgtggctttcaaacactagcactgcagcaatggttatgccgattgcagaggctgttgtgcagcagattatcaacgctgaggctgaagttgaagcaacacagatgacgtacttcaacggctccaccaaccacggtcttgagattgacgaatcagtgaacgggcatgagattaacgagaggaaggaaaaaactaagcccgttcctggctataacaacgacaccggaaaaattagctcaaaagttgaactggagaagtacctccaggtaagatag

SEQ ID NO: 134802 - DNA, 1881 bp, synthetic construct
  misc_feature 1..1881: note = Description of Artificial Sequence: Synthetic coding sequence
  source 1..1881: mol_type = other DNA
atgggtctgcttcaggggctccttcgtgtcaggaagctgctgttggtggtttgtgtccctttgctcctgttgcctctgcccgtcctacacccctcttcagaggcatcatgtgcgtacgttctaatcgtaacagcagtctattgggtaagtgaagccgtcccccttggtgccgccgcgctggtgccagcattcctatatcccttttttggtgtgctgcgaagcaacgaggttgcagcggaatactttaaaaacacaacactgctcctcgtaggtgtgatatgcgtcgccgccgcagttgagaagtggaacctgcacaagcgcatcgcactgcgaatggtgctaatggcaggcgcgaaacctggtatgctgcttctttgtttcatgtgttgtacgacattgttgtccatgtggctgtctaatacatcaaccactgcaatggtgatgccaatcgttgaggctgtgctccaggagctggtaagtgccgaggacgaacagctggtggctggaaacagcaacaccgaagaggccgagccaatcagtcttgacgttaagaacagccagccttctctcgagctgatcttcgtaaacgaggagtcgaatgctgatttgactacgctgatgcacaacgaaaatcttaatggcgtgccctctatcacgaatccaataaagacagctaatcagcatcaaggtaaaaaacagcatccatcacaggagaagccacaggtgttaaccccatctcctaggaagcagaaactgaaccggaagtacagatcgcaccacgatcagatgatctgtaaatgtcttagtctttcgatctcctatagcgccacaatcgggggtctgactacgatcataggcacaagtacgagcctcatctttctggaacatttcaacaaccagtacccagccgcagaggtagttaactttggaacctggttccttttcagtttcccaatatcactgattatgctagtcgtgagttggttctggatgcattggttgttcctagggtgtaacttcaaagagacctgttccctgagtaagaagaaaaaaacaaagagggagcaactgagcgagaagcgcatccaggaagagtacgagaaattaggcgacatttcctaccctgaaatggtcaccggttttttttttattctgatgaccgtgttgtggttcacccgcgagcctgggttcgtacctggctgggattccttcttcgagaaaaagggctacagaaccgacgctaccgtgagtgtgttcttaggattcctgttattcttgattccagcgaagaagccctgctttggaaagaaaaacgatggcgaaaaccaggagcattctctggggactgagcccattattacttggaaagacttccagaagacgatgccttgggagatcgtgattctggttggaggcgggtatgccctggcctctggatccaaatcaagtgggctgtcaacctggatcggaaatcagatgttgtcattatcttcactccctccctgggccgtgacccttctggcctgtatactcgtatccattgtgaccgagttcgtgtccaaccctgccaccatcaccatcttccttcctatcctgtgctccctatccgagaccttgcacattaaccctctatatacgctcatccccgtcacaatgtgcatttcctttgccgtgatgctgccagtgggcaatcctcctaacgcaatcgtattcagctacggacattgccagataaaagacatggtgaaggctgggttgggcgtaaatgtcatagggttagttatcgtgatggtcgctattaacacatggggggtgtctcttttccatctggacacctacccagcgtgggcccgggtctccaatataacggaccaggcatag

SEQ ID NO: 134803 - DNA, 1569 bp, synthetic construct
  misc_feature 1..1569: note = Description of Artificial Sequence: Synthetic coding sequence
  source 1..1569: mol_type = other DNA
atggcctccgctcttagttacgtatccaaatttaagtcatttgtgattttatttgtaacgccattgttgctgctgccactagtcattctgatgccggccaaattcgtcagatgtgcgtacgtcattattctaatggccatctattggtgcactgaggttattccattagccgttacttctctcatgcctgtgctgctgtttcccttattccagattttggatagtcgccaggtctgtgtacagtatatgaaggatacaaacatgctgtttctgggcggtcttatcgtcgcggtggcggtcgagcgctggaatctgcacaaacgaatagccctcaggaccttgctctgggtgggagccaagcccgctcgcctcatgctgggctttatgggagtgaccgccttgctgtccatgtggatctcaaacactgcaaccacagcaatgatggtacccatagtggaagccattcttcagcaaatggaggcaacatcagctgccacagaggccggactggaactggtggataaaggtaaagccaaagagctgcctggctcacaggttatttttgagggccccactctcgggcaacaggaggaccaggagcgcaaaagactgtgcaaagccatgacactctgtatttgctacgcagcttccatcggaggcactgctactttgaccggaacagggcccaatgtggtgctgcttgggcagatgaatgagttgtttccggactctaaggacctcgtcaatttcgcatcttggttcgccttcgcctttcctaacatgttagtgatgctgttgttcgcatggttatggctgcagttcgtttatatgcgtttcaactttaaaaagagctggggctgcggcttggagagtaagaagaatgagaaggcggcactcaaagtcctgcaggaggaataccggaagctgggcccactcagctttgccgagattaatgtgctgatctgcttcttcctgcttgttatcctttggttttcacgcgatcctgggtttatgccaggctggctgacagttgcgtgggtcgaaggggaaacgaagtacgttagcgatgccaccgtcgccatcttcgtcgccacactccttttcatcgtaccttcccaaaagcctaaatttaactttcggagccagaccgaggaggagcgcaagactccattctatccaccacctttactggactggaaagtgacacaagaaaaagttccttggggaatagtgttgcttctggggggcggatttgccctggccaaggggtcagaggcgagcgggctctctgtatggatggggaaacagatggagccactccacgccgttccaccagcagcaatcactctgattttatcacttcttgtggcggtctttacagaatgtacgagtaacgtcgcaacaaccacgttgttcttgcctatttttgcatccatggtaaagaccggagtgattatgaatataatcggcgtgttctgcgtgttcctggctgttaatacatggggcagggccattttcgacctggaccattttcctgattgggccaacgtaacccacatcgagacctag

SEQ ID NO: 134804 - DNA, 1707 bp, synthetic construct
  misc_feature 1..1707: note = Description of Artificial Sequence: Synthetic coding sequence
  source 1..1707: mol_type = other DNA
atggcgtcagccctgagctatgtctccaagtttaagtcctttgtaatattgtttgtgacccccttactgctgctccctctggtgatcttgatgccagccaagttcgttcggtgtgcctacgtgatcatcctcatggcgatctactggtgcactgaagtcatccccctggccgtcacatctctgatgcccgtcctgttattccccctgtttcagatattggatagtcgtcaggtttgtgtgcaatacatgaaagacaccaacatgttatttcttgggggcctgattgtggctgtagcagtggaacgctggaatctgcacaaaaggatagccctcagaactctcctttgggtgggcgcgaaacctgcacgtcttatgctggggtttatgggagtgacagccttgctgtccatgtggatctccaacaccgccactaccgccatgatggtgcccattgtcgaggcaatcttgcagcagatggaggcgacctctgcagctaccgaggcaggcttggagctggtggacaagggaaaagctaaagagttgcctggctcgcaagttattttcgagggccctactctgggccagcaggaagatcaggagaggaaaaggctgtgtaaagccatgaccctatgcatttgttacgcagcctccatcggtgggaccgcgacgctaaccgggacggggcctaatgtggtgcttttagggcagatgaacgagctgttcccagactctaaggatttggtaaacttcgcatcctggttcgccttcgcctttcccaacatgctggtgatgctcctctttgcctggctgtggctgcaatttgtgtatatgagatttaactttaagaaatcctggggctgtggtttggaatcgaagaagaatgagaaggcggcactgaaggtgttacaggaagaatacaggaagctcggtcccctgtcctttgccgagataaacgtgctaatttgcttcttcttgttggtgatcctctggtttagtagggatcccggattcatgccaggctggctgactgtcgcgtgggttgagggcgagaccaagtacgtatccgacgctactgtggcaattttcgtagccacattactttttattgtgccgtcgcagaagcccaaattcaactttcgttcgcagacggaagaggaacggaaaactcctttctatccccccccgctgcttgattggaaggtcacccaggaaaaagtgccttgggggatcgtccttcttttaggcggcgggtttgccttggccaagggatccgaggcctctggcttaagtgtttggatgggcaagcagatggagccgctgcacgcagtgcccccagccgctatcacactgatattatcgctgcttgtggcagtctttaccgaatgcactagtaatgtcgcaactaccacgcttttcttaccaattttcgcctcaatgagcaggtcaatcggtctgaatcccctttacatcatgcttccctgcacactttctgcttcgttcgcttttatgttgccggtagctacaccacccaatgcgattgtgttcacatatgggcacctcaaagtggccgatatggtcaagacgggcgtgatcatgaatatcataggtgtgttctgtgtgttcttggctgttaatacctggggccgtgctattttcgacttggatcacttccctgattgggccaacgtcacacatattgaaacctag

SEQ ID NO: 134805 - DNA, 1578 bp, synthetic construct
  misc_feature 1..1578: note = Description of Artificial Sequence: Synthetic coding sequence
  source 1..1578: mol_type = other DNA
atggcatccgcactgagttatgtctccaaatttaagagctttgtcattctgttcgttacacctctcctgctgttgccccttgtcattctgatgcccgccaaagtttgcgttcagtatatgaaggatactaacatgctgttccttggggggcttattgtagccgtagcagtcgagagatggaacctgcacaagcgaatcgcacttagaactctgctgtgggtgggagcaaaacccgctaggcttatgctgggtttcatgggggtaacagcactcctgtcaatgtggatctccaacacagccactactgcgatgatggtccccatagtggaagctattctgcaacagatggaggccacttcagctgccaccgaagccggcctggagctcgtggataagggaaaagccaaagaactgcccgggagccaagtgattttcgaggggcctaccctcggccagcaggaggaccaggaaaggaagcggctgtgcaaagcaatgaccctgtgtatatgttacgccgctagcattggagggaccgccaccctgactggaaccgggccaaacgtcgtcctgttagggcagatgaacgaattgttccctgatagcaaggaccttgtgaacttcgcaagttggtttgcattcgcttttccaaacatgctggtaatgctgctctttgcgtggttgtggttgcagttcgtatatatgaggtttaattttaagaaatcctgggggtgcggcttggagagtaaaaagaacgagaaagcagcactcaaagttctgcaggaggaatacagaaaattggggccactaagtttcgctgagattaatgttctgatttgttttttcctgctcgtgatcttgtggtttagccgagatcccgggtttatgcccggttggctgacagtcgcctgggtggagggagagacaaagtatgtctctgacgccacagtggctatattcgtagctacgctactgtttattgttcccagtcagaagcccaagtttaactttagaagccaaacagaagaagagagaaagactcctttttatcctccacccctgctcgattggaaggttacccaagagaaagtgccttggggaatagtgcttttactaggaggaggttttgcactggccaagggctctgaagcatctggcctctcggtgtggatgggcaagcaaatggaacctttgcatgctgttccccctgctgcaatcactttgatacttagcttgctcgtcgcagtctttaccgagtgtacctccaatgtggctactaccacgctgttcctgcctatattcgctagcatgtctcggtctatcggactgaatcctttgtatatcatgctgccatgtactctctctgcatcgttcgcctttatgctcccagtggccactccaccaaacgccatcgttttcacctatggccacctcaaagttgccgatatggttaaaactggtgttataatgaacatcattggtgtgttttgtgtgtttctagctgtgaacacttggggacgggctattttcgatttggatcactttcccgattgggccaacgttacccacattgaaacatag

SEQ ID NO: 134806 - DNA, 1569 bp, synthetic construct
  misc_feature 1..1569: note = Description of Artificial Sequence: Synthetic coding sequence
  source 1..1569: mol_type = other DNA
atggccagcgctttgtcatatgtatcgaaattcaagagcttcgttattctgtttgtcactcctctcctgttgcttcctttggttatcttgatgcccgcaaagttcgtgagatgtgcatacgtgattatcttaatggccatctactggtgcactgaggtcatcccgctggccgtcacatccctcatgcccgtgttgttgttccccctgttccagatcttggatagtcgccaagtatgcgtgcagtatatgaaggacaccaatatgctatttctaggaggactgatcgtcgccgttgccgtagagcggtggaacctgcacaagcgcatagccctgagaaccctgttgtgggtgggggcaaagcctgctagactaatgctcggttttatgggcgtgacagctctgctctctatgtggatttctaatactgccacaactgcgatgatggtcccgattgtcgaagccatccttcagcagatggaggccacctccgcagccactgaagcggggctggagttagtggacaaaggtaaagcaaaagagctgccagggtcacaggtcatatttgaaggccccacactaggacagcaggaggatcaggaaagaaagcgcctctgcaaggcaatgaccctgtgcatttgctacgccgcctctattggcggaacagccaccctgacaggtacgggtccaaatgttgttttgttagggcagatgaatgagctgttccccgattcaaaggatcttgtgaattttgcaagctggttcgcctttgccttcccgaatatgctggtaatgctgctcttcgcctggctgtggttacagttcgtgtacatgcggttcaattttaagaaatcgtggggctgcgggctggagtcaaaaaagaacgagaaggctgcactcaaggtgctgcaagaggagtatcggaagctgggtccgctgtcatttgcagagatcaacgtgctgatctgcttcttcctcctcgttattctgtggttttccagagatcccgggtttatgcccgggtggctcacagtagcttgggtggaaggcgagaccaagtatgtaagcgatgccacagtcgcaatttttgtggccaccctgctttttatcgtgcccagccagaaacccaaatttaactttcggagccagactgaggaggagcggaaaacaccgttttaccctccccccctcttagactggaaggtgactcaggaaaaagtgccttggggtatcgttttgctcctgggtggcggcttcgctctggcaaaagggagcgaggctagtgggctatccgtttggatggggaaacagatggaacctttgcatgctgtgccaccagctgccattacactgatattgtctcttttagtggccgtttttaccgagtgtacttccaatgtggctacgaccacactgtttttaccaatcttcgcctccatggtgaagacaggggtgattatgaacatcatcggagtcttttgtgtgttcctcgctgtcaatacctggggccgagcaatcttcgatctagatcatttccccgactgggctaacgttacacatatagagacgtag

SEQ ID NO: 134807 - DNA, 1779 bp, synthetic construct
  misc_feature 1..1779: note = Description of Artificial Sequence: Synthetic coding sequence
  source 1..1779: mol_type = other DNA
atggctacttgttggcaggccctatgggcataccgatcctacctgatcgtgtttttcgtgccaatcttgctgctgcccctccccatcttagtacccagtaaggaggcgtattgcgcttatgctattattctcatggcactcttctggtgtaccgaagctctgcccctggccgtgacggctttgtttccactgattctatttcccatgatgggtatcgtggatgcaagtgaagttgccgtggagtacctcaaggactccaatctgctgttcttcgggggtctgctggtggcaatagctgttgagcactggaacttacacaagagaattgccctgcgggttcttctcatcgtgggagtgagaccagcccctttgatcctgggattcatgttggtcacggcgtttctctctatgtggatctccaacactgcaacttccgccatgatggtgcccattgcccacgccgttttagaccaactgcacagctcacaggctagtagcaacgtagaagaaggttccaataaccccacttttgagctccaggagccaagtccacaaaaggaagtgacgaaattggataacggacaggcactgcccgtgaccagcgcgtcctctgagggcagagcccacctcagccagaaacacctccacttgacgcaatgcatgagcttatgcgtctgttactctgcatctattggaggtatagcaacccttacgggaaccgcccctaacttggtgctgcagggacaaattaactctctgttcccgcagaacggaaacgtggtgaatttcgcttcatggttttcattcgctttccctaccatggtcatcctgttgctcctcgcttggttgtggctccaaatcctattcctggggttcaatttccgaaagaacttcggaatcggtgagaagatgcaggagcaacagcaggccgcctactgcgtgattcaaacagagcacaggctgttagggccaatgacatttgccgagaaggccatctccatcctcttcgttatccttgtgctcctatggttcaccagggaacctggcttcttcctcggctggggtaacctggcatttcccaatgccaagggcgaatcaatggtgtccgacggtaccgtggcaatctttatcggcatcatcatgttcatcattccctccaagtttccaggtctgacccaagaccccgagaacccaggcaaactgaaggcccccctcggtctgcttgactggaagaccgtcaaccaaaaaatgccttggaacatcgtgctgctgctgggtggtggttacgcattggccaaaggttccgagagatccggcttatccgagtggctgggaaacaagttaactcctctccagagtgtccctgcccctgcgattgccatcatcctgtcgctgctagtggctacgtttactgaatgcacctcaaatgtagcaacaaccaccatcttcctgcctatactggcctcgatggcccaggccatctgcttgcaccctctgtacgtgatgttgccctgtaccctagcgacgtcattggccttcatgttgccagtagctactccgccgaatgctatcgtcttttcattcggcgatctgaaagttctggacatggcaagggccggctttctgcttaacataattggtgttttgatcatcgccctagccattaattcttgggggattcccctcttttctctccattcgttcccctcttgggcccagagcaacactactgcccaatgtttgccatccctcgctaatacaaccacgccctctccctag

SEQ ID NO: 134808 - DNA, 1926 bp, synthetic construct
  misc_feature 1..1926: note = Description of Artificial Sequence: Synthetic coding sequence
  source 1..1926: mol_type = other DNA
atggctacctgttggcaagctctgtgggcgtatcgttcttacctgattgtcttcttcgtccctattctgttattgcctttacctattctggtgccatctaaggaagcttattgtgcttatgccatcatcttgatggcgctgttctggtgcaccgaggccctgcccctcgccgttactgccctttttcctctgattctgttcccgatgatggggatcgtggatgcatcagagatcatccaaaggcccttcccctcgtctttcgagtccccgggcgagtgccagtctgtggggatgtcagtgacagcctcgcacaacctgggaggaacagtgggcgatagtcgggtatttccccctttgtcccacgtgtccacttgccaggtagctgtcgaatacctgaaagattcaaatctgcttttcttcggcggactcctcgtggcgatcgccgtggaacactggaatctgcacaagagaatagcccttcgcgtgttgctgattgttggggtgcgtcccgctcccctaattttgggcttcatgctggttactgccttcctctccatgtggatttcaaatacagcaacctctgccatgatggtccccattgctcatgctgtgcttgatcagctacatagcagccaggcctcttctaacgtagaggagggttccaacaacccgacctttgaactacaggagccatcccctcagaaagaagtgacgaagctggacaacgggcaggccttgcccgtcacttcagcctcaagcgaaggccgagctcacctctcccagaaacaccttcatcttactcagtgcatgagtctttgcgtctgctactctgcctcaattggtggcatcgctacgttaacgggaactgctcctaatctcgtcctgcagggacaaatcaatagtctgttcccccaaaatggcaatgtggttaacttcgcttcatggtttagcttcgctttcccgacaatggtaatactactgctgttggcctggctctggctgcaaatcctctttttgggttttaattttaggaaaaactttggcatcggcgaaaaaatgcaggagcagcaacaggccgcctactgcgtgatccaaacggaacacagattgttaggcccaatgacctttgccgagaaggccattagcatcttgttcgtcatccttgtgctgctctggttcactagggaaccgggttttttcctgggctggggaaacttggctttccctaacgccaagggcgaaagcatggtctctgatggcactgtcgctatatttatagggatcatcatgttcattatccctagtaagttccctggactgacccaagaccctgaaaatcctggcaaattaaaagctccactgggtctcttagattggaagaccgtcaaccagaagatgccctggaatattgtgctcctcctgggcgggggttacgccctggccaagggatctgagcgctcaggcctgagcgaatggctcggtaacaagttaactcccctccagagcgtgccagccccagcgatcgcaattattctgtccctcctggtcgccacattcacagaatgcacttcaaacgttgccacgacaaccatattcctcccaatcttggctagcatggctcaggccatttgcctccatcccttgtacgtaatgctgccatgtacgttggcaacaagcttggcatttatgctgcccgtggccacgccacctaacgcaattgtttttagctttggcgatctgaaagtgctcgacatggcccgggccggcttccttctgaacataatcggcgtgctgatcattgctctggcaatcaactcatggggaattccactgttcagcctgcacagctttcctagttgggctcagtctaacactacagctcaatgtctaccttctctggccaatactactacacccagtccgtag

SEQ ID NO: 134809 - DNA, 1566 bp, synthetic construct
  misc_feature 1..1566: note = Description of Artificial Sequence: Synthetic coding sequence
  source 1..1566: mol_type = other DNA
atgccagtttgtggcaatgtcgcagtggaatacttgaaagactcaaacctgctctttttcggggggcttctagtggccattgctgtggagcattggaaccttcacaagcgaatagctctgcgtgtgcttttaatagtgggcgtgcgcccagctcccctgattctggggttcatgttggtcacagcattcctaagtatgtggatctccaatacagccaccagcgcaatgatggtgcccattgcccacgctgtgcttgaccagcttcacagttcacaggcatcatctaacgtggaagagggttccaacaaccccaccttcgaactgcaggaaccctcaccacagaaagaagttaccaagcttgataacggccaggctctgccggttaccagcgcttcgtctgagggacgggcccacttatcccagaagcatcttcacctcactcaatgcatgtctctctgtgtgtgctactcagcaagtataggaggcattgctaccttgacggggacggcacctaatctggtcttacaaggacagattaactccttatttccccagaatggaaacgttgtaaatttcgcttcctggttcagcttcgccttccctaccatggtgatcctgctcttattggcctggctgtggctgcaaattctttttcttggattcaacttccgtaagaattttggcattggcgaaaagatgcaagaacagcaacaggccgcctattgcgtgatccagacggagcatcgtctgctggggccaatgaccttcgcggaaaaggcaatctcaatcctctttgtgattttggtcctgctctggtttacgagagaacccggcttctttcttgggtgggggaacctggcatttcccaatgctaaaggagaatctatggtctccgacggaacggtggccatctttattgggataatcatgttcattatcccatccaaatttcccggcctgactcaagatcctgagaatcctggaaagctcaaggcccctctgggcttactggattggaaaactgttaaccagaagatgccgtggaatatcgtgctcctccttgggggcgggtacgccctcgccaaaggttccgagagaagtggattgtccgaatggttaggcaacaaactgacccccctgcagtctgtgccggctcccgctattgccatcattttgagtttgctagtggccacctttactgagtgtacgtccaatgtggccactactaccatctttctgcctatcttggcctctatggcgcaagcaatatgcttgcatccactttacgtgatgctgccgtgcactctggccacatcattggctttcatgttgcctgtggcaacccctccgaatgccatagtgttttcgttcggggatctcaaagtgttggacatggccagagcagggttccttctgaatatcatcggggtgctgattatagctctggctataaacagctggggaatccctctgttctctctccactcattcccttcatgggcccagtccaataccactgcccagtgcctaccgtctctcgcaaacaccaccactcccagcccttag

SEQ ID NO: 134810 - DNA, 1035 bp, synthetic construct
  misc_feature 1..1035: note = Description of Artificial Sequence: Synthetic coding sequence
  source 1..1035: mol_type = other DNA
atggccctgttttggtgcactgaggcactgcctctggcggtgactgcactctttcccctgatcctattcccaatgatgggaatagtcgacgcaagtgaagtcgccgtcgagtacctcaaggattccaacctgctttttttcggggggctgctagtcgcgatcgccgtcgagcattggaacttgcacaaaagaattgcgttgcgggtcctactgatcgtcggcgtgcgaccagccccactgatcctggggttcatgctggtgacggccttcctcagcatgtggatctctaatactgcgacatctgcaatgatggtccctatcgcgcacgcggtgctcgatcagctgcattccagtcaggcttctagcaatgtggaggagggctcaaataatcccaccttcgagttgcaggagcctagcccacagaaggaagtgaccaagcttgacaacggccaggcactgccagtgacttctgcctcttccgagggcagagcccacctttcccagaaacacctccacctgacacagtgcatgtctctgtgtgtctgctattcggcatccatagggggaattgcaactctaaccgggactgccccaaaccttgtgctgcagggacagataaatagcctgtttccgcaaaatggcaatgtggtgaactttgcgagctggttttcctttgcctttcctacgatggtaattctgctcctcttggcctggctttggctacagatcctattcctgggattcaattttagaaaaaactttggtatcggagagaagatgcaggagcaacagcaggctgcctattgcgtgatccagaccgagcaccgcttgctcgggcccatgacctttgccgagaaagctatttcaatcctgtttgtgattctggttttgctgtggtttactagggaaccggggttcttctggcttgggcaatttgggttctcccaatgccaaggcggggaagtcagggtcgctggggtgggccgacggactcacctgggcttgacctgctcgggccggagagagggttattag

SEQ ID NO: 134811 - DNA, 1650 bp, synthetic construct
  misc_feature 1..1650: note = Description of Artificial Sequence: Synthetic coding sequence
  source 1..1650: mol_type = other DNA
atggcaacatgttggcaagctctttgggcttaccggtcttaccttatcgtgtttttcgtgccaattttactcctgccactgcctatcctcgtgccgtcgaaggtggccgttgaatacctgaaggattcaaacttgctgtttttcggaggactgctggttgccattgccgtcgagcattggaacttgcacaaacgcatcgccctgagagttcttctaatagtgggtgtaagacccgcccctctgattcttggtttcatgctggtcacagctttcctatccatgtggatatctaatacggcgacctctgccatgatggtgcccatcgcccatgccgtgctggaccaacttcacagctcccaggcgtcgagcaatgtcgaagaagggagcaacaaccctacctttgagctccaggagcccagccctcagaaagaggttacaaagctggacaatggacaggcactcccagtgacgtctgcctcatctgaagggagagcgcaccttagtcagaagcacctgcacctcacccaatgtatgagcttgtgcgtctgttattctgcttcaatcgggggtattgccaccctcacaggtaccgcacctaatctggtgttgcaagggcagatcaatagtctgtttccacagaacggcaacgtggtgaacttcgcaagctggttcagctttgcgttccccaccatggtgatcttgttgctgctggcctggttgtggctgcaaatattattcctgggcttcaacttcagaaagaacttcggaattggggaaaagatgcaggaacagcagcaagccgcatattgcgtgatccagacagagcaccgactcttaggacctatgacctttgctgaaaaggcaatctctatattgtttgtgatactcgtccttctctggtttaccagggagcccggctttttcctcgggtggggaaaccttgccttccctaatgcaaaaggagaatctatggtgagcgatgggacagtggccatttttatcggtattattatgttcattatccccagtaaattcccaggcctgactcaggatcccgagaaccctggtaagcttaaagctccactgggcctactggattggaaaaccgtcaaccagaaaatgccctggaatatagtgcttctactggggggcgggtatgctttggcgaagggcagtgaaagatctggcctgtcagaatggcttggaaataagcttacaccactgcaatcagtgcctgctcctgccattgcaatcattctaagcctcttggttgctacatttaccgagtgtacgtccaacgtcgctaccactaccatttttctgcctattctcgcatctatggcacaggccatttgccttcaccccttatatgtgatgcttccgtgcacattggccacttcactggctttcatgcttccagtcgctaccccaccaaatgctatcgtgttttcatttggcgatctgaaggttctcgatatggcacgggcaggcttcctcttgaatatcattggcgtgttgattattgcattggctattaattcctgggggattcctctattcagcctgcattcattcccttcctgggctcagtccaatacaactgcacaatgcctgccctcactcgcaaatacaacgacccctagcccatag

SEQ ID NO: 134812 - DNA, 1809 bp, synthetic construct
  misc_feature 1..1809: note = Description of Artificial Sequence: Synthetic coding sequence
  source 1..1809: mol_type = other DNA
atggccgctctggcggctgcagccaaaaaagtgtggtcagccaggcgactgctcgtcctgctgttcacccctctggctcttcttcccgtggtattcgctttaccccccaaggagggacggtgtctattcgtcattctgctgatggccgtgtactggtgtaccgaagccctgcctctgagtgtaacagctctgcttccaatcgtattgttccccttcatgggtattcttccgagtaataaagtatgtccccagtattttttagacactaacttcctatttttgtctgggttgatcatggcctccgctatcgaggaatggaacctgcacaggcgcatcgcactcaaaatactgatgttggttggcgtgcaaccggctaggctcattctgggaatgatggttaccacttcctttctctctatgtggcttagcaatacagcctcaactgccatgatgcttcccatcgccaacgccattctgaaaagtctcttcggccagaaggaggtgaggaaggacccttcacaggaaagcgaggaaaacactgctgccgtgcggcgcaacggcctccacaccgtccccaccgaaatgcaattccttgccagcactgaagccaaggatcaccccggagaaacagaggtgcccctggacttaccagctgatagcagaaaagaggatgagtacagacgcaatatatggaaaggctttctgatctcaattccgtattctgcctcaatcgggggaaccgccaccctgaccggtacagctcctaatctgattctcctgggccagctgaaatccttcttcccacaatgcgatgtggtgaacttcggatcatggttcatctttgcatttcctctgatgttgctgtttcttctcgccggatggttgtggatttcttttttgtatggaggactcagtttccgggggtggaggaagaataagtccgagatccgtaccaatgccgaggaccgcgctcgcgctgtcattagagaagagtatcagaacctcggccctattaaattcgccgagcaggccgtgtttattctgttctgtatgtttgccattctcctattcacacgggacccaaaattcatccccggatgggcctccttattcaaccccggttttctgtcggatgccgtcacaggtgtggccatagtaactatactgttttttttcccctcacagcggccctccctgaagtggtggttcgactttaaggcgcctaacacagaaacagagcctctgttgacctggaagaaagcccaggagacagtcccctggaatatcattctactcctagggggaggattcgctatggctaaaggatgcgaggaatcgggactgtcagtctggataggcggccaactccacccattagaaaacgtgccccctgctctggcagtgctgttgatcactgtggttatcgccttctttacggagttcgctagcaacacggctacgattatcatattcctcccagtcctagccgaattggctatcaggcttagagtacatcctctatacctgatgatcccgggcactgttggttgtagttttgcgtttatgctcccagtgagcacacccccaaactccattgctttcgcctcagggcacttactggtaaaggacatggttaggaccgggttattgatgaatctgatgggcgtgctgctgttgtcactcgccatgaatacctgggcacagacaattttccagctgggtacattccccgactgggctgatatgtattcagtgaacgtgacggccctgccaccgacactggccaatgacaccttcagaacgctgtag

SEQ ID NO: 134813 - DNA, 1668 bp, synthetic construct
  misc_feature 1..1668: note = Description of Artificial Sequence: Synthetic coding sequence
  source 1..1668: mol_type = other DNA
atggctgtgtattggtgcacagaagccctgcccctgtcagttaccgccctgctgccaattgtgctcttcccatttatggggattctgccctcaaataaggtatgtccccagtattttctagacactaacttcttgttccttagcgggctcatcatggccagcgcgatcgaggagtggaatctacaccggaggattgctctgaagatccttatgttggtgggcgttcaacccgcgagattgattctcggaatgatggttaccacaagtttcctgtcaatgtggcttagtaacaccgcatcaacagctatgatgctgcctatcgccaacgccatccttaaatctttgttcggacagaaggaggtccgcaaggacccctctcaggaatccgaggagaacacagctgcggttaggcgcaacggtttgcataccgtcccaacagagatgcagtttcttgcctcaactgaagccaaggaccatccaggagaaaccgaagtcccactggatttaccagctgactctaggaaagaagacgaatacaggcggaatatctggaaaggctttctgatcagcatcccttactccgcttccatcgggggcactgccacattgacaggaaccgcaccaaatctgattctgctcggacaactgaaaagcttctttcctcagtgcgacgtcgtgaacttcggaagctggttcatctttgcgttcccacttatgttgctattcctattagccggttggctctggatttcctttttgtatggtggactgagttttcgcggatggcggaagaataagagcgaaattcgaacgaacgccgaggatcgggccagagctgttattagagaggaatatcaaaacctcggtcccatcaagtttgccgaacaggcagtatttatccttttctgcatgtttgccatcctgctttttacaagagaccccaaattcatccccgggtgggcatctctctttaatcccggcttcctctcagacgctgtgacaggcgtggccattgtcacaatcctgttcttttttccatcgcaaagacctagtcttaagtggtggttcgatttcaaggctccaaatacagagactgaacccctgttaacgtggaagaaagcccaggagacagtcccttggaatatcatcctgctcctcggaggtggcttcgctatggcgaaaggttgtgaagaatcaggcttgagcgtgtggatcggtggacagctgcatcctctcgagaatgtgccacccgcgctggcagtccttttgatcacagtggtcatcgctttttttacggagtttgccagtaacacggcaacaattataattttcctcccagtgcttgccgagctcgccattagactgcgggtacatcctctatatctgatgatccctggaacggtgggctgctccttcgctttcatgttacctgtgtccacacctccgaacagcattgcattcgcatctggacatttgctggtcaaggacatggtccgtactggcctgttaatgaatctgatgggggtgctcctcttgagcctggcaatgaacacgtgggcccagacaatcttccagttaggtacattcccagattgggcggatatgtacagcgtgaatgtgacggcactgccacctacacttgcaaacgatacatttcgaaccctttag

SEQ ID NO: 134814 - DNA, 699 bp, synthetic construct
  misc_feature 1..699: note = Description of Artificial Sequence: Synthetic coding sequence
  source 1..699: mol_type = other DNA
atggctgctcttgcggcggcggctaagaaggtgtggtctgcgagaaggctgctggtgctactctttactcccctcgctctgttaccagtcgttttcgctttgccccccaaggagggaaggtgcctcttcgtgatcctgctcatggctgtttactggtgcaccgaggccctccccctgtctgtgaccgccttgcttccaattgttctgttcccgtttatgggcattctgccttccaataaagtgtgcccgcagtacttcttggatactaactttttgtttctatccggcctgatcatggcatctgccattgaggagtggaatctccacaggcggattgcccttaagattttgatgctggtgggcgtacaacctgcaaggctcatcttgggcatgatggtgactacttctttcctgtcaatgtggcttagcaacacagccagtacagcgatgatgctgccaattgccaacgccattttaaaatctctattcgggcagaaggaggtcagaaaggatccaagtcaggagagtgaagaaaataccggaatcgaacctaacacctttctgtcagaggagcgcctcaagctgcaggcgcctctggtaattcgactgggccagatcactgagtccggccagtggaatatgagcggcaacgatgtttgcaatttccgtgtgttaagttttctgcccgggggcatgtag

SEQ ID NO: 134815 - DNA, 1017 bp, synthetic construct
  misc_feature 1..1017: note = Description of Artificial Sequence: Synthetic coding sequence
  source 1..1017: mol_type = other DNA
atggccgcgctggcggcagccgccaagaaggtctggagtgcaaggcggcttctcgtcctgctttttacacccctcgcactgctgcccgtcgtgttcgccctgcctccgaaagaagggcgctgcctgttcgtgatactacttatggccgtgtactggtgcactgaggctttgccgcttagcgtcactgcattgctacccatcgtgttatttcccttcatgggcattctgcccagtaataaagtgtgcccccagtattttttagatactaacttcttgtttctgagcggtcttattatggcttctgccatcgaggaatggaaccttcaccggcggatcgccctcaaaattctaatgctagtgggggtgcagccagctcgattaattctggggatgatggtgactacctcatttctctcaatgtggctgtccaacaccgcttctaccgctatgatgctaccaatcgcaaatgccattcttaagtcgcttttcgggcaaaaagaagtgcgcaaggacccctcacaggagagcgaagagaataccgccaagacaacactcggaagacaacggtttcactggatatgcagactgacgccgggcaggcgcatgaatatcgtggggacctccggtcgtgctagttcttctccttctccaacacagcccgttcttggggcccagcctcacagccgggcccagcctttgacttcatcctgtcttgctagttctagagggtggctgtggatttctttcctgtatgggggacttagcttccgtgggtggcggaaaaacaagtctgagataaggaccaacgctgaggaccgggcccgcgctgtgatcagggaagagtaccagaacctgggcccaataaaatttgccgaacaagccgtattcatcctgttttgcatgtttgctatcttgctgttcacgcgggatcccaagttcataccaggttgggcctcattgttcaatcctggatgtaaaatggggatcattagtatttccactattcagaaaatgtag

SEQ ID NO: 134816 - DNA, 1563 bp, synthetic construct
  misc_feature 1..1563: note = Description of Artificial Sequence: Synthetic coding sequence
  source 1..1563: mol_type = other DNA
atggctgtgtactggtgcacagaagctttacctctcagtgtcaccgcccttctgccgattgtcctcttccctttcatgggaatactgcccagcaataaggtctgcccccagtactttttagacacgaacttcctgtttctctcaggattgataatggcttcagcaattgaggaatggaacctgcatcgacggattgccctgaaaattctgatgcttgtgggggtccaacctgccaggttaatcttgggcatgatggtcactacaagttttttgtcgatgtggctctccaacacagcctccacggccatgatgctgccgattgcaaacgccatcctgaagtcattgtttggacaaaaggaggtccggaaggatccttctcaagaaagtgaggagaacactgctgccgtgagacgaaacggcctgcatacggtgccgaccgagatgcaatttctcgcctcaacagaggctaaggaccatcctggtgaaactgaggtgcctcttgacctccctgcggactccagaaaggaagatgaatacaggcgcaatatatggaagggcttcctgatctcaatcccctattccgcctccatcggcgggacagcgacattgactgggacagcgcctaacctcatccttctgggtcaactgaagagcttttttccacaatgcgacgtggtcaatttcggttcctggttcatcttcgcgttcccccttatgctcctgtttctcctggctggatggctgtggattagcttcctttacggcggtctttcatttagggggtggcgcaaaaacaagagcgagatcagaactaacgccgaggatcgcgcccgagccgtcatccgcgaggagtatcaaaatctggggcctatcaagtttttgagtgacgctgtgactggggtcgccatcgtgactattctcttcttctttccgtctcagagaccctccctcaaatggtggttcgattttaaggccccgaacactgagacagagcctcttttgacgtggaaaaaagcccaggagaccgtcccatggaacatcatactgctgcttggcggaggcttcgcgatggccaaaggctgtgaagaatccggtctttccgtttggattggcggacagctgcaccccctggagaatgtcccacctgccctggctgtgctgttaataactgtggtgatcgcattcttcaccgagttcgcctctaacaccgctaccattatcatctttctacctgtactggccgagcttgccattcgattacgcgtccacccactctatttaatgatccccggcaccgtcggctgctccttcgcctttatgctgccagtatctacaccaccaaatagcattgcatttgccagcggacacctgctcgttaaggatatggtgagaactggattgctgatgaacttgatgggagtgcttctcctctcccttgccatgaatacctgggctcagacaatctttcaactggggaccttcccagactgggctgacatgtattctgtgaatgtcaccgcattacctcccaccctggccaatgataccttcagaactctctag

SEQ ID NO: 134817 - DNA, 1659 bp, synthetic construct
  misc_feature 1..1659: note = Description of Artificial Sequence: Synthetic coding sequence
  source 1..1659: mol_type = other DNA
atggctgcccttgccgcggcagcgaaaaaagtctggtcagcccgtcgactgctggtgctactgttcacacctctagccctgctgcctgtcgtttttgctctcccccctaaagaaggaaggtgcctgtttgtgattctcttgatggccgtatactggtgcaccgaagcactccccctgagcgtcaccgccttgttgcccatcgttctctttccttttatgggcattctcccttcaaacaaggtgtgcccacagtatttccttgacaccaattttctgttcctgagtgggttgattatggccagcgcaatcgaggagtggaatcttcatcgtaggatcgccttgaaaatcctgatgctcgtgggagttcagcctgcccggttaattctcggtatgatggtcaccactagctttctctctatgtggctctccaacactgcatcaaccgccatgatgctgcccatcgcaaacgccatcctgaagagcttatttggccagaaagaagttcggaaagacccctctcaagaatcggaggagaatactgctaagacaaccctcggccgacagagattccattggatatgcaggttaactcccggtcgccgaatgaacatagtcggaacttcgggtagagcatcttcatctccgtccccaacccagccagtgctaggtgcccaacctcactctagagcccagccgttaacctcctcttgcctggcatcatcccgtggttggctctggatcagctttttatacggaggactatccttcagggggtggcgtaagaataagtccgaaatacgcacaaatgccgaggatagagcccgtgccgttatacgggaagaataccaaaacttgggccccatcaagttcgccgaacaagccgtttttattctgttctgtatgtttgcaattttattgtttacacgagaccccaagttcatcccaggatgggccagtctgttcaatccgggctttctctccgacgccgtgaccggcgtcgctattgtgaccattctgtttttcttccctagccaacgcccaagcctcaaatggtggttcgactttaaagccccgaacactgagaccgaaccattgttaacttggaagaaagcacaggaaacagttccatggaacatcattctgctgctgggcgggggcttcgctatggccaagggatgcgaggaaagcgggctttctgtatggatcggcggacagttgcacccgttggagaacgtgcccccagcgctggccgtgctgcttatcacagtagtcattgccttcttcaccgaattcgctagcaatacagccacgatcataatcttcttgcctgtgctggcggagctcgctataaggttaagagttcatcccctgtacctgatgattcctggcacggtgggctgttcctttgcatttatgctaccagtcagcacacctccgaacagcatcgcttttgcaagcgggcacctcttggtgaaagacatggtgagaacagggctcctgatgaacctcatgggggtgctactcttgagcctggccatgaacacctgggctcagaccatctttcagttaggaactttccctgattgggccgacatgtattcagttaatgtgactgctctaccacccacactggccaacgacacatttcgaactctgtag

SEQ ID NO: 134818 - DNA, 558 bp, synthetic construct
  misc_feature 1..558: note = Description of Artificial Sequence: Synthetic coding sequence
  source 1..558: mol_type = other DNA
atggccgtctattggtgtaccgaggcactgccgctttccgtgacagcccttctcccaatcgtcttgtttccttttatggggatcctgcctagtaataaggtttgtccccagtacttcctggatacaaatttcttgtttctctccggattaattatggcatcagccatcgaagagtggaacctccatcgccgaattgccctgaagattctgatgctcgtaggtgtccaacctgctcggctcatcctcgggatgatggtaactacgagctttctcagcatgtggctaagcaatactgcatctaccgccatgatgctccctatagccaacgccatccttaagtctctgttcggccagaaggaggtgcggaaggacccctctcaagagtctgaagaaaacactggtatagaacccaacacctttcttagtgaagagaggttgaagttgcaagcacccctcgtcataagactggggcagattaccgagtcgggtcagtggaacatgtctggcaacgacgtctgcaacttcagggtgttgagcttcctcccaggtggaatgtag

SEQ ID NO: 134819 - DNA, 564 bp, synthetic construct
  misc_feature 1..564: note = Description of Artificial Sequence: Synthetic coding sequence
  source 1..564: mol_type = other DNA
atgctcagccccgcctggcttctttctcctagctgcagctcatcaaggcccaagggccctctctcttccgggggcctcacttccaaggaaagtggtttgagcgtctggatcggtgggcaactacatcctcttgagaacgtaccaccggccctggccgtgctcctgatcaccgtcgtgattgccttcttcacagagtttgcaagtaacaccgctacgatcataatctttctcccagtgttggctgaactggctatcaggctgagggtgcacccactctacctgatgattcccggaaccgtggggtgctcctttgcattcatgctgcccgtctccacaccacctaattccatagctttcgcatctggacacctactcgtcaaggacatggtgcggaccggcctgttaatgaatctgatgggagtgctgctcttgtcattagctatgaacacatgggcacaaacgatcttccagctgggcaccttccccgattgggccgatatgtattctgtcaacgtaactgctctaccaccaacactggctaatgacacctttagaacattatag

SEQ ID NO: 134820 - DNA, 1230 bp, synthetic construct
  misc_feature 1..1230: note = Description of Artificial Sequence: Synthetic coding sequence
  source 1..1230: mol_type = other DNA
atggctgtctactggtgcactgaggccctaccgctctctgtgactgccttactgccgatagttctttttccctttatggggatccttcctagcaataaggtgtgcccacagtactttctggacacgaattttctttttttgagcggacttatcatggcaagtgccattgaggagtggaaccttcaccggaggattgcccttaaaattttgatgctggtgggcgtgcaaccagcgcgcctaatcctaggcatgatggtcacaacatcttttctatccatgtggttatccaataccgccagcaccgccatgatgctacctattgccaatgcgatacttaagtcgctgttcggccagaaggaggtgagaaaagaccctagccaggagtctgaagagaacacagctgccgtccgccgaaatggtcttcacacagtgccaaccgaaatgcagtttttagctagtacagaggctaaagaccaccccggcgagactgaggtgcctctagatctgccagccgatagccgcaaagaggacgaatatcgacgaaatatttggaaagggttcctcatctctattccctatagcgcttctattggtggcacagcaacccttaccggaaccgctcctaatctgattttactgggccagctgaaatcatttttcccccagtgcgacgtggttaacttcggctcttggttcatctttgctttccccctcatgcttctgttcctcctcgccggatggctttggatctcattcctgtatggagggctgagttttagagggtggaggaagaataagtcagaaatccggactaatgcggaggaccgggccagggcggtcatacgggaggagtaccaaaatcttgggcccatcaagtttgccgaacaggcagtttttattctgttctgcatgttcgccatcctcttgttcacccgcgaccccaagttcatcccggggtgggcatctttgttcaaccccggctttctgtctgatgccgtgactggggttgcgatagtcactatattatttttttttccctctcagagacccagtctcaagtggtggtttgattttaaggctcctaatactgagactgagccattgctcacctggaaaaaggcccaggaaacagtgccatggaacattatcctgctgcttggcgggggattcgccatggctaaagggtgcgaagaatctggattgagcgtctggattggcggtcagctgtag

SEQ ID NO: 134821 - DNA, 1668 bp, synthetic construct
  misc_feature 1..1668: note = Description of Artificial Sequence: Synthetic coding sequence
  source 1..1668: mol_type = other DNA
atggccgtatattggtgcaccgaagccctgccgctgagcgtgacagccctgctcccgatcgtgctttttcctttcatggggattctccccagcaacaaggtttgccctcagtacttcctggataccaattttctgtttttatctggattaatcatggctagcgcgatcgaggagtggaatctgcatagaaggattgcgcttaaaatcttgatgctcgtaggcgtgcagcccgcccgtcttatattaggtatgatggtaaccacctccttcttgagtatgtggctgagtaacactgcttccaccgccatgatgttgcctatcgccaacgccatcttaaagtcccttttcggccaaaaagaagtgaggaaagaccccagccaagaaagtgaagaaaacaccgcggctgtcagacggaacggacttcataccgtaccgaccgaaatgcagtttcttgccagcaccgaggcaaaagaccacccaggggagacagaagtcccgttggacctccctgccgactcgcgcaaggaggacgaatatcgccggaatatctggaaagggtttctgatctctatcccatacagtgcctcaatcggcggcaccgcgacactcacaggcacagcaccaaatctgatacttcttggacagctgaagagcttctttccccaatgtgacgtggtaaacttcggatcctggtttatctttgctttccccttaatgctactgttccttctcgctgggtggctttggatatctttcctttacggtggcctgtctttccgtggctggcggaaaaataagtccgagattcgcactaacgcagaggatagggcccgcgcagtgattcgggaggagtaccagaatctagggccgatcaaatttgccgagcaggctgtcttcattttattttgcatgtttgcgatactcctcttcactagagacccaaagtttatccccggatgggcttccctgttcaatccaggattcctctccgatgcggtgactggggtcgctattgtcacaattctattcttttttcctagccaacgcccaagcttgaagtggtggtttgatttcaaggccccgaatactgagactgagccccttctgacgtggaagaaggcacaggagactgtgccatggaacatcatcctgttgctgggcggaggatttgccatggcaaaaggttgtgaggaatctggcttatccgtttggattggaggacagctgcatccccttgaaaacgtccctcctgccctagccgtgctactgattacggtggttatcgcattcttcaccgagtttgccagcaatacagcgaccattatcatcttcttgccagttctggccgagctcgcaatacgactacgtgtgcaccctctgtacctgatgatacccggaactgtggggtgttcctttgctttcatgctacctgttagcacccccccaaatagcatcgccttcgcctcaggacacctgcttgtgaaggatatggtgcggaccggtctgctcatgaatctgatgggagtgctgctcctgtccttggccatgaacacatgggctcagaccattttccagctcggcacctttccagattgggcagacatgtactcagtgaacgttaccgcactgcccccaaccttagctaatgatactttccgcactctgtag

SEQ ID NO: 134822 - DNA, 2763 bp, synthetic construct
  misc_feature 1..2763: note = Description of Artificial Sequence: Synthetic coding sequence
  source 1..2763: mol_type = other DNA
atgagcgatccacactcttcccccttgctacccgaacccctcagcagccgctataagctgtatgaagccgaattcactagcccatcatggcccagcacctcaccagatacccatcctgcgttgcctctcctggagatgcctgaggagaaggatctgcgctcgagcaatgaggactcacatattgtgaagattgagaaactcaatgaacgcagcaaaaggaaggacgatggggtggctcatagagactccgcaggccagcgctgtatctgtctcagtaaggccgttgggtatttaacaggagacatgaaggaatacagaatttggctgaaagataagcacttggccctacagttcatcgactgggtcctgcgtggtaccgcacaagttatgttcatcaacaatccattgtcaggtcttattatcttcattggtctgctgatacagaacccttggtggacaattaccggtggactgggcactgttgtgagtacactgacagcactcgctctcggccaggatcgaagcgccatcgcatctggactacatgggtacaatggcatgcttgtaggattgctgatggccgtttttagtgagaagttagactattattggtggttgctgttccccgtcaccttcaccgccatgtcatgtccagtgctcagttcagccctgaactccattttctcgaaatgggacctcccagtgtttacactgcctttcaacatcgctgtcacactttacctcgcagcaacaggtcattataacttgttttttcctaccaccctcgtggaacctgtgtcctccgttcctaatataacctggaccgaaatggaaatgccgctactgcttcaggccattcccgtgggggtgggtcaggtctatgggtgtgacaacccttggacaggtggcgtgttcctggttgccctgtttatcagtagtccccttatatgcttgcacgctgcgattggtagcatagtaggtttgttggcagccttaagcgtcgccacacccttcgagacaatctacaccgggttatggtcgtataattgtgtactcagctgcattgccatcggcggcatgttctacgcgttgacatggcagacccaccttctcgctttgatctgcgccttattctgcgcgtacatggaggccgctatcagcaatattatgagcgtcgtcggagtaccccctggcacctgggccttctgtctggccaccatcatttttctgttactcaccaccaataatccggccatctttcgattgccgttaagtaaagtcacgtacccagaggccaaccgcatatattatctaacagttaaatccggggaggaggaaaaagccccatccggcggaggaggcgaacaccccccaaccgccggccccaaggttgaagaggggtccgaggcagtcctcagcaaacacaggagcgtgttccatatagaatggtcctccatccggagaagatctaaggtcttcggcaagggtgaacaccaggaacgccagaacaaggatcccttcccctaccggtatcggaagcctacagtcgagctgctggatctggatactatggaagagagctccgaaatcaaagtcgagacaaacatttccaagacaagctggatcagaagcagtatggcagcgtcaggcaagcgggtgtccaaggcgctaagctacattactggggagatgaaagaatgcggagaaggcttgaaggataagtcccctgtgtttcagttcttcgattgggtgctgagaggcacgtcccaggtgatgtttgttaacaatcccctgtctgggattctgattatcctcgggctcttcatccaaaatccgtggtgggcaatttctggctgcctgggcactattatgtctactctgacagcgctcatacttagccaggacaagtctgcaattgccgccggattccatggctataacggtgtcctggtgggcctactgatggcggtgttcagcgacaagggggactactactggtggctgctgcttcccgttataatcatgtctatgagctgtcctattctgtcatccgctttgggtacgatcttctccaagtgggatctgcctgttttcaccctgccattcaatatcaccgtcacactatacctcgcagctactggtcactataacctcttcttcccgaccaccctgctccagcccgcaagtgccatgccaaacataacttggtctgaagtgcaggttccactcctgttgagagcgatccctgtggggattggccaagtttatgggtgtgacaacccctggactggaggcatattcctgattgctctgttcattagttctcccttaatctgcctacacgctgcaataggcagcaccatggggatgctggccgccctaaccatcgccactcctttcgactcaatctatttcggcctctgtggattcaattctactcttgcctgcattgccattggagggatgttctacgtgatcacctggcagactcacctgctggctattgcatgtgcactgttcgcagcatacctcggcgccgccctcgccaacatgctatccgtgttcggtttgcctccttgcacgtggcccttttgcctctcagctctcactttcctcctccttaccacaaataacccagccatctacaagttacctctcagcaaggttacctacccggaagctaaccgcatctattacttgtctcaggaacgaaatcggcgtgcttccatcataaccaagtatcaggcatatgacgtatcttag

SEQ ID NO: 134823 - DNA, 1170 bp, synthetic construct
  misc_feature 1..1170: note = Description of Artificial Sequence: Synthetic coding sequence
  source 1..1170: mol_type = other DNA
atggaagacagccctaccatggtcagagtggatagccctaccatggtgagaggcgagaatcaggttagcccatgtcaggggcggcgctgcttccccaaggccttgggatatgtaactggtgatatgaaggagctggctaatcagctgaaggataagcccgtggttctacaattcatagactggatcctgcgcggaatctcccaagtggtgtttgtgaacaaccctgtctcaggaatcctcatcctcgtgggtctcctggtgcagaatccctggtgggccctgacagggtggctcggcacagtggtctctaccctgatggccctcctgctgagccaagaccgctccctcatcgcctccggtctgtacgggtacaacgcaaccctggttggggtactgatggcggtgttctccgataaaggtgactatttttggtggctccttctcccggtgtgtgccatgagtatgacgtgtcctatctttagcagtgccctcaactccatgctgtctaaatgggacctgccagtgttcactcttcccttcaatatggcactttcaatgtacctgtccgcaacaggccattataaccccttcttcccagctaagcttgtgatccctattacaacggcacctaacatatcatggtccgacctgagtgccctggaacttctgaaatccataccagtgggcgtgggtcagatttacgggtgtgataatccttggaccggggggatcttcctgggcgctatattgcttagctcccctctcatgtgccttcatgccgcaatcggaagtctgttggggatcgccgctggactttctctgagcgccccatttgaagatatctattttggactttgggggttcaatagcagcctagcttgtatcgcaatggggggcatgttcatggccctaacctggcagacacatctgttggctctgggctgcgcccttttcacggcctacctgggagtaggtatggcaaactttatggccgaggttgggcttcccgcgtgtacctggcctttttgtctcgcaaccttgctgtttctgatcatgactacaaagaacagtaatatctacaaaatgccactgtccaaggtcacttatccagaagagaatcgtatattttatctacaggcaaagaaaaggatggtggaatcccccctgtag

SEQ ID NO: 134824 - DNA, 855 bp, synthetic construct
  misc_feature 1..855: note = Description of Artificial Sequence: Synthetic coding sequence
  source 1..855: mol_type = other DNA
atggcgctgctgctgagtcaagatcggagtctgatcgcatccggcctatacggttataacgctacgctcgtcggcgtcctgatggccgtgtttagcgacaagggagattacttctggtggcttctccttcctgtttgcgctatgtcaatgacctgtccaatcttcagttccgccctgaactcaatgctgtctaagtgggacctaccagttttcacactgccatttaacatggcactgtctatgtacctatctgccacaggccattataacccattttttccggcgaaattggttattcccatcacgacagcacccaatatatcgtggagtgacctctctgcactcgagctgctcaagtctatacccgtgggtgttggacagatctatggatgcgacaatccctggaccggaggaatctttctgggagctattctgctgtcaagtcccttaatgtgtctacatgcagcaatcggcagcctactcggcattgctgcaggtctaagcctgtctgcccctttcgaggacatctatttcgggctttggggattcaacagcagcctcgcatgtatcgcaatgggaggaatgttcatggcactaacgtggcagacacacttgcttgcgctgggatgtgctctgttcaccgcctacctcggagtgggtatggctaacttcatggcagaggtcgggctgccagcttgtacatggccattttgcctggccactttgctgttcctgataatgacaacaaagaacagcaacatctacaagatgcccctgagtaaggtgacttaccccgaagagaacaggattttctatcttcaggcaaaaaagaggatggtggagtcccctctgtag

SEQ ID NO: 134825 - DNA, 1338 bp, synthetic construct
  misc_feature 1..1338: note = Description of Artificial Sequence: Synthetic coding sequence
  source 1..1338: mol_type = other DNA
atgaacggccggtccctgataggcggagctggcgatgctcggcacggtccagtatggaaggatccctttggcaccaaggctggagatgccgcccgccgcggcattgccaggctgagtttggcactggcagatggatctcaggagcaggaacccgaggaagagatcgccatggaagatagccctactatggtgagagtcgacagtccaaccatggtgcgcggggaaaaccaagtgtcaccatgccaaggtaggcgatgctttccaaaggcactcgggtatgtgacgggagacatgaaggagctggcgaaccagctcaaggacaaacccgtcgtgttgcagtttatcgactggatcctgagggggatcagccaggtggtgtttgtgaataacccggtttcaggtatccttatccttgtgggtcttttggtgcagaatccgtggtgggccctgacgggatggctggggacggtcgtgtctacactgatggcactcctgctgtctcaggatcgcagcctgattgccagtggcttgtacggatataatgcaaccttggttggcgttctcatggccgtctttagtgataaaggagattatttctggtggctcctcctgcctgtatgtgccatgagcatgacctgcccaattttctcctcagccctgaatagtatgctgtccaaatgggaccttcctgtatttactcttccctttaacatggctttaagcatgtacctctccgccacaggacactacaaccctttctttcctgctaagctggtcatccctattacaactgcaccgaacatctcttggtccgacctcagcgccctcgaactgctgaaaagcatccccgtcggtgtcggccaaatctacggatgcgataacccctggactgggggaattttcctgggtgccatactgctgtcctcaccgctgatgtgcttgcacgccgctattggctcactgttgggaattgcggccgggttgtctttatctgctcctttcgaagacatttatttcggcctatggggctttaacagttctctggcctgtatagcaatggggggcatgtttatggctttgacatggcagacacacctcttggcactggggtgcgcactcttcacagcctacctgggcgtcggcatggcaaatttcatggctgaggtaggcctgcctgcctgcacctggcccttctgcctcgcgaccctgctgtttcttatcatgactaccaaaaatagcaatatttataagatgccactgagcaaggtgacctatcccgaagagaaccgcatcttttaccttcaggccaaaaagcggatggtggagtcacccttatag

SEQ ID NO: 134826 - DNA, 1338 bp, synthetic construct
  misc_feature 1..1338: note = Description of Artificial Sequence: Synthetic coding sequence
  source 1..1338: mol_type = other DNA
atgaatggccggagtcttatcggaggagccggggacgctaggcacggtcccgtgtggaaggatccattcggtacgaaggccggtgacgcagctcggcggggtattgcaaggctctctctggctctggctgatggaagccaggagcaagagcctgaagaagagatcgcgatggaagatagcccgaccatggtgagagttgactctccaaccatggtccgcggcgaaaaccaggtgtctccttgccaggggcgtcgttgtttccctaaagcactcggatacgtcactggtgacatgaaagaacttgctaaccagttgaaggataaacctgtggtgctccagtttattgactggatcctaagagggatttctcaagtcgtattcgtcaacaatcccgtgagcggtatcctgattcttgtcgggctcctggtccagaacccatggtgggctttgaccggctggctcggtaccgttgtgagcaccctcatggccctgctgctctcgcaggatcgctccctgattgccagtggactgtacggctacaatgcaacactggtcggcgtcctgatggccgtgtttagcgacaagggagactacttctggtggcttctgcttccggtttgcgcaatgtcaatgacttgccccattttttcctctgcccttaattcgatgctgtctaagtgggacctgccggtgttcacactgcctttcaatatggcactttcgatgtatctgtcagccaccggacactataaccctttcttccccgccaagcttgtcattcctatcacgacagcccctaacatttcatggagcgacctcagtgccctggagctgctgaaaagcatccctgtgggcgtggggcaaatttatggctgtgacaacccatggactggaggcatcttcctaggcgcaatcttgctgtccagtcccctgatgtgtctgcatgcagccatcggaagtctgctcggtatcgctgcagggctttcactgtctgccccgtttgaagacatctactttgggctatggggatttaattccagcctagcctgcatcgctatgggcggtatgttcatggccctgacatggcaaacccatcttttggctctcggttgcgcgctcttcacagcctatctgggagttggtatggccaatttcatggccgaggtaggacttccggcttgcacttggcccttttgtctggcgaccctgctctttctaatcatgacaacaaagaacagcaatatttacaagatgccacttagcaaagtgacttaccctgaggagaatcgaattttttatttgcaagccaagaaaagaatggtggaaagccctctctag

SEQ ID NO: 134827 - DNA, 645 bp, synthetic construct
  misc_feature 1..645: note = Description of Artificial Sequence: Synthetic coding sequence
  source 1..645: mol_type = other DNA
atgaatgggagatccctgattggtggagcgggcgacgccagacacggcccagtgtggaaagacccgtttggaactaaagcaggggatgcagctagacgcggaatcgctcggttaagtctggctctcgctgatgggtctcaggagcaggaacctgaggaagagatcgctatggaagacagcccaaccatggtccgtgtagattctccaaccatggtaagaggagagaatcaggtgtccccttgccaggggaggcgttgtttccccaaagccctggggtacgtcacgggggatatgaaagaactggctaatcaattaaaggacaagcctgtagttctgcagttcattgactggattctgcgcgggatctcccaagttgtgtttgtaaacaatcctgtgtctggaattctcattctggttggactgttggttcaaaatccttggtgggcgctgacagggtggctcggcacggtcgtcagcaccctgatggccctcctgctgtctcaagatcgatccctcatagctagcggcctctatgggtacaacgcaacccttgtgggcgtgctgatggccgtcttcagcgacaagggcgactatttttggtggttgttactacctgtgtgcgctatgtctatgacatgttgttag

SEQ ID NO: 134828 - DNA, 846 bp, synthetic construct
  misc_feature 1..846: note = Description of Artificial Sequence: Synthetic coding sequence
  source 1..846: mol_type = other DNA
atgggcaggcgtaatcgctcccttatcgcctctggcctttatggctacaatgcaaccctcgtgggcgttctcatggcagtcttctccgacaaaggagattacttttggtggctactcctccctgtgtgcgccatgtctatgacctgcccaatcttttccagcgctttgaattctatgttatctaagtgggacctgccggtttttaccctgccgttcaacatggcacttagcatgtacctgtccgctaccggtcactacaatcccttctttcctgcaaaacttgttatccccatcaccacagcccccaatatctcatggagcgatctgtccgccctggaactcctgaaaagcattcccgtgggcgtcgggcagatctatggttgtgacaatccctggacagggggcatcttcctcggggccatactgctatcctctccattgatgtgcttgcacgcggcaattggtagcctgttaggtattgccgcaggactttccctatctgccccattcgaggacatctactttgggctctggggattcaatagctccctcgcatgcattgccatgggaggcatgttcatggccttgacatggcagacccaccttttagctcttggctgtgctctgttcaccgcttatttgggagtcggcatggccaactttatggcagaggtcgggctcccagcctgcacctggcccttctgtctcgctacgctcctgttcttaattatgacaacgaaaaactctaacatctataaaatgccactgtctaaggtgacctaccctgaggagaatcggattttttatctgcaagctaaaaagcgaatggttgagagcccattatag

SEQ ID NO: 134829 - DNA, 774 bp, synthetic construct
  misc_feature 1..774: note = Description of Artificial Sequence: Synthetic coding sequence
  source 1..774: mol_type = other DNA
atggctgtgttcagtgacaaaggtgactacttctggtggctgttgctgcctgtgtgtgcgatgtcaatgacctgtcccatatttagttcagccctcaatagtatgctcagtaagtgggatcttcccgtatttacactgcctttcaatatggccttgagcatgtatctgtctgccactggccactataatccgttctttccggctaaacttgtcatcccgatcaccactgctcctaacatctcttggtccgatctgtctgcgctggagctgctaaagtctatccccgtaggcgtaggccagatttacggatgtgataatccttggactggcgggatttttctgggtgctattctgctgtctagcccactgatgtgtctgcacgctgcaatcggaagcctgctgggcatcgcagcaggcctgagtttatcagcccctttcgaggacatttactttgggctctggggctttaactccagcctagcttgcatcgcaatgggaggaatgtttatggccctcacatggcaaacacacctgctggcgctgggatgtgctctattcacggcatatctcggtgtgggaatggcaaattttatggcggaggtggggcttccagcctgtacatggccattctgtttggcgactctgttattcctgataatgaccaccaagaactcaaatatttacaagatgccccttagcaaagtgacctaccccgaggaaaaccggatcttttatctacaagcgaaaaagagaatggttgagtctcccctgtag

SEQ ID NO: 134830 - DNA, 2763 bp, synthetic construct
  misc_feature 1..2763: note = Description of Artificial Sequence: Synthetic coding sequence
  source 1..2763: mol_type = other DNA
atgtccgaccctcatagttctcccttactgcctgaaccactgtcatcccgctacaagctttatgaagccgagttcacttccccttcttggcctagtacatcccccgacacccaccctgcattgccactcttggagatgcccgaagaaaaagaccttagaagcagtaatgaagatagccacatcgtgaagatcgagaaactgaacgagagatcgaaacgcaaagatgatggcgtagcccatagagactcagccgggcagagatgcatctgcctctctaaggctgttggttacctgactggcgatatgaaagaatatcgcatctggctcaaagacaaacacctggccttgcagttcatcgattgggtcctgcggggtacagcgcaggtgatgttcataaataatcccctgagcggcctgatcattttcatcgggttgcttattcagaatccatggtggaccattaccggcggactggggacggtggttagtaccttaactgcactcgcactcggccaggaccgaagtgccattgcaagcggtcttcacggttacaatggtatgctggttggccttctgatggcagtcttcagcgagaagcttgactattactggtggctgctatttccggttacatttacggccatgtcctgtccagttttatccagcgcactgaactccatcttctcgaagtgggacctgccggtgttcactctgccattcaacatcgccgtgaccctgtacctcgcggcaaccgggcactacaacctgttttttcccacaactctcgttgagcccgtctcctccgttccaaacatcacgtggacagagatggagatgccgctgctacttcaggcaatccctgtgggcgtggggcaggtgtatggatgcgacaatccttggactggcggtgtgttcctcgtcgccctttttatctcctcgccactcatttgtctgcatgccgctattggcagcatagttggtttgctagccgcactttccgtcgccacgcccttcgagactatctataccggtttgtggtcttacaattgtgttctgtcatgtatcgccatcgggggaatgttttacgcactgacctggcagacccatctgcttgctttgatttgtgcccttttttgcgcctatatggaagcagctatttccaacataatgtccgttgtcggtgtaccccctggaacttgggccttttgtctcgcaactataatttttctgctgttgaccaccaacaatcctgcgatcttccgcctccctttgtccaaagtcacatatccagaggccaacagaatttactacctcacagtgaaatcaggcgaggaggagaaagcccccagtggcgggggaggagaacatcctcctactgctggaccaaaggtcgaggaggggtctgaggccgttctgtctaaacatcggagcgtattccacatcgaatggtcgtcgattagaagacggtctaaggtgttcggcaagggtgagcaccaggaacgccaaaataaggatccatttccttatcgctaccggaagcccaccgtagagttactcgatctggatacaatggaagaatccagcgaaataaaggttgaaacaaacatcagcaagacgagctggattaggtctagtatggccgcaagcggaaagagggtgagtaaggccctgagctatatcacgggagaaatgaaggaatgtggcgagggcttgaaggacaaaagcccggtcttccaatttttcgattgggtgcttcgggggacaagccaggtaatgttcgtgaacaatcctctcagtggcattctcataattttgggccttttcattcagaatccctggtgggccatctccggatgtttgggaacaatcatgagtacacttactgctctgatattgtcccaagataaatccgctatcgctgctggctttcatggatacaatggcgtacttgtggggctgcttatggctgtattttcagataaaggcgattactactggtggttgttgttaccagtgatcatcatgtcgatgagttgcccgatcttgagttccgccctggggaccatttttagtaaatgggacctccccgtctttactttacctttcaacatcacggtgacactgtacctggcagcaactggccactataaccttttcttcccaactaccctgttacagcccgcaagcgctatgccaaatatcacatggtctgaagtgcaggtaccactgctgctgagggcaatccccgttgggatcggccaagtctatgggtgtgacaatccctggacaggagggattttcctgatcgccctgttcatttcatcccccctaatctgccttcacgcggcaattgggagcactatgggaatgctggctgcacttacgattgcaaccccctttgatagcatctacttcggtttgtgcggattcaacagcaccctggcatgcatcgccattggcggaatgttctacgtgatcacctggcaaactcacctgctcgcaattgcttgcgccttatttgcagcctatctgggtgcagctctggccaatatgctctctgtgttcgggttgccgccatgcacctggcctttttgtctcagcgctttaacgtttttgctcttgacaaccaataaccctgctatttacaaacttccgcttagcaaagttacctatcccgaggctaataggatctactatctcagccaggaaagaaacaggcgagcttccataattaccaagtaccaggcatacgatgtatcctag

SEQ ID NO: 134831 - DNA, 708 bp, synthetic construct
  misc_feature 1..708: note = Description of Artificial Sequence: Synthetic coding sequence
  source 1..708: mol_type = other DNA
atgtcggatccgcattcaagcccactgcttccggagccactttcctcacgatacaaattatacgaagcggaattcaccagccccagttggccctctacgagcccggacacacacccagctctgcccctgcttgagatgcctgaagaaaaagatctgcgcagtagcaatgaggatagtcatatcgtgaagatcgaaaagctaaacgaacggagtaagcgcaaggatgatggggtcgctcaccgcgacagtgccgggcagcgatgcatttgtctctccaaagcagtcggttatctgacaggcgacatgaaggagtacagaatctggctgaaagataaacacctggctctccagttcattgactgggtactgcggggtacagctcaagtgatgtttattaataatccgctgtcgggactaattatcttcattggtctgctgattcagaatccttggtggactattacaggtggtctgggcacagtggtgagcacactgacagctctggctctcgggcaggatcggagcgccatcgcatcgggcttgcatggatacaacgggatgttggtcggtctcctgatggccgtcttcagtgaaaagctggactattattggtggctgctgttcccagtgacatttactgcaatgagctggatggagacagacttcaactggtctaagtctggttgttggaaacacctgctacagtag

SEQ ID NO: 134832 - DNA, 627 bp, synthetic construct
  misc_feature 1..627: note = Description of Artificial Sequence: Synthetic coding sequence
  source 1..627: mol_type = other DNA
atggaccaatggggtgtgtacttcaacccagttctcgttagtttttgccagtccttttttggctatcccttatccatcttctttatcgttgtcaatgaattttgtgaaagatttagctactatggcatgagagctattctgatcctctactttaccaattttatctcctgggatgataacctctccacggccatctatcatacctttgtcgctctgtgctatctgacacccattctgggtgccttgatagctgactcctggttgggcaaattcaaaaccatcgttagtctgtccatcgtatacaccatcggtcaggccgtgacttctgtgagtagcattaatgatctcaccgaccacaatcatgatggaaccccagactctcttccggtccacgtggtgctgagcctaattgggctagccctcattgccctcgggaccggcggcattaagccttgtgtgagtgcattcgggggtgaccagttcgaggaagggcaagagaaacagcgaaatcgattcttttccatcttttatctcgccatcaatgccggatcattactttccaccatcattaccccgatgcttagaggaaagagatacctgaaagggacgagtgtgggcctgttctag

SEQ ID NO: 134833 - DNA, 849 bp, synthetic construct
  misc_feature 1..849: note = Description of Artificial Sequence: Synthetic coding sequence
  source 1..849: mol_type = other DNA
atgcgggctatcttaatcctctacttcactaactttatctcctgggacgacaacctatccacggccatctatcatacctttgtggccctctgctacctgacacccattctgggagctttaatcgcagactcttggctgggaaaatttaaaactatagtgagtttgtcgatcgtgtacacaatcggacaagcggtgaccagcgtctcttcaataaacgatctgacagatcataatcatgacggtacccctgactctctccctgttcacgtggttttgtccttgattggactggctctgattgctttaggcacgggaggcatcaagccctgtgtgagcgcattcggaggcgaccaatttgaggaaggacaggaaaaacagcggaatcgcttcttctccatcttttatctggccattaatgctgggtccttattgtccaccatcattacccccatgctgcgggggaagcgctacctgaaaggtacctctgtgggtctttttcttgtgcgaccgtccccatgtttacttagattcgtcctcttctttcccagtgcactcttctcatcctgtcagctccatgcagggatgcatgtgggcatctggtctaagtgtttccttccgtgcgagttccacctgttattcgtgctatttaaatctctgattcccgtcaccacgggggagtctaagcccagcctggcctgggcatctatcttcctgaactgctattcctgtaaggtgatgctggttgttagaggcaaacgccaggaaagatgcctgggctcccaggcgggaggccgtagttgtcatttcagcctccaagcccttctcccatccgatatctctgtgacgtag

SEQ ID NO: 134834 - DNA, 2127 bp, synthetic construct
  misc_feature 1..2127: note = Description of Artificial Sequence: Synthetic coding sequence
  source 1..2127: mol_type = other DNA
atgggtatgtctaaaagtcatagcttctttgggtaccccctgtcaatctttttcatcgtagtgaatgagttttgtgaacggttctcgtactatggaatgcgcgctattctgatactgtatttcacaaacttcatcagttgggatgataacctgtccactgcgatctaccacacgttcgtggccctgtgttacttaactcctattttgggggctctgatcgccgacagctggctcggaaagttcaagacaattgtgtctctctcaatcgtgtatacaatagggcaagccgtcacaagcgtgagctcaatcaacgacctgaccgaccacaatcacgatgggacacccgactcattacctgtccacgtcgtcttatcccttattggactggccctaatcgctctgggcaccggaggtatcaagccatgtgtgtcagcttttggaggagatcaattcgaagaggggcaggaaaagcagaggaatcgattcttttccatcttttaccttgcgataaacgctggctccctgctcagcacgatcattacaccaatgttacgagtccagcagtgcgggatccacagcaagcaggcttgctaccccctcgcctttggagtgccagcagctctcatggccgtggccttaatcgtgttcgtccttggcagcggcatgtacaaaaaattcaaaccccaggggaacattatgggaaaggttgctaagtgtatagggttcgccataaaaaacagatttcgacacagaagtaaggcattcccaaaacgtgagcattggctagactgggcaaaggagaagtacgatgagcgcttgataagccagataaaaatggtgacccgcgtgatgtttttgtatatccctcttcccatgttttgggctctcttcgaccaacaggggtcgcgctggaccctccaggctaccaccatgtccggcaagatcggcgctcttgagatccagcctgaccaaatgcaaaccgtgaacgctatcctgatagtaattatggtccccattttcgatgctgttctataccccttaatcgccaaatgtggatttaattttactagtcttaagaagatggccgttgggatggtgctggccagtatggccttcgtggtcgccgctattgtccaggtggagatcgataagaccctgcccgtgttccctaagggtaatgaagtgcaaattaaagtcctcaatatcggcaataatacgatgaatatcagcctccctggcgagatggtaactcttggcccaatgtctcagaccaacgcctttatgaccttcgatgtgaataaattgacgaggattaatatcagcagccctgggagccccgtgacagccgtgacagatgatttcaagcaagggcagagacacactctgctggtttgggcccctaaccactaccaggtcgttaaagacggactgaatcagaagcctgaaaagggcgagaacggaatacgcttcgtgaacactttcaatgagcttattaccatcaccatgagcggcaaggtgtacgctaacatctccagctacaacgcaagcacttaccaattctttccttccggcataaaaggcttcactattagcagcacggagattccaccccagtgtcagccgaacttcaatactttttacctggagttcggatcagcctatacctacatcgtgcagagaaagaacgattcttgtccagaggttaaagtttttgaggatatctccgcaaatactgtgaacatggctttacagataccccagtacttcttactgacctgtggggaggttgtgtttagcgttacaggactggagtttagctactcacaggccccctctaatatgaaatcagtgctccaggccgggtggttgttgaccgttgctgtgggcaacatcattgtgttaattgtggcaggggccgggcaattctccaagcagtgggccgaatatattctctttgctgcactattactggtggtatgcgtgattttcgccatcatggccaggttttatacatacataaatcccgctgaaattgaggcacagttcgatgaagacgaaaagaaaaatcggctggagaaaagtaatccatactttatgtctggggcaaattcccagaagcagatgtag

SEQ ID NO: 134835 - DNA, 1503 bp, synthetic construct
  misc_feature 1..1503: note = Description of Artificial Sequence: Synthetic coding sequence
  source 1..1503: mol_type = other DNA
atgccaccagccgtcggaggacctgttggatacacaccacctgatggaggctggggttgggctgtcgttatcggcgccttcatcagcatcggtttctcttatgccttcccgaagagcattactgtcttcttcaaggagatcgagggaatcttccacgccaccacctctgaggtgtcatggatctcatctattatgcttgccgtaatgtatggggggggacccatctcctcaattctggtgaataagtacggcagtcggatcgtcatgatcgtggggggatgcctttcaggatgtggcctgattgccgccagcttttgcaacacggttcagcagttgtatgtgtgcattggcgtgataggcggcctcggtctggcctttaatttgaacccagccctcactatgatcggaaagtacttttacaagcggaggccccttgctaatggactcgccatggcagggagtcccgtattcctgtgtacgttggctccgttgaaccaggtgttttttggcatttttgggtggcggggctccttcttgatcctgggcggccttctgctgaactgttgtgttgctggagcactcatgcggccaatcgggcccaaacccacaaaagctggaaaggacaaatccaaggccagcttggaaaaagctgggaagagtggcgtcaaaaaagacctacacgacgcgaatactgacctcattggccggcatccaaagcaggagaagcgaagtgtcttccagacaatcaaccagtttcttgacctgactctattcacccatcggggtttcctgctttatctgtcaggtaatgtcatcatgtttttcgggctgttcgcaccattggtgtttctctcaagctacggcaaatctcagcactattcttccgaaaagagcgccttcttactgagcatcctggcgtttgtcgacatggtggcgcgtccaagcatgggactcgtggcgaacaccaaacccattcgtcctaggatacagtactttttcgccgctagtgtggtcgccaatggagtgtgtcacatgttagcgcctctaagcaccacctacgttggcttttgcgtgtacgccggatttttcggatttgcctttggttggttgtcctcggtactctttgaaacactgatggacctggtgggccctcagcgctttagttccgcagttggactggtgaccatcgtcgagtgctgtccagtgctgttaggaccaccattgctcggacgcttaaacgacatgtacggggactacaaatatacctattgggcatgtggagtcgtgctcattatttcaggcatttacctgttcattggtatggggattaactaccgtctgctcgccaaagagcagaaggctaatgaacagaagaaggaatctaaggaagaggagacttctattgatgtggccgggaagccaaacgaagtaacaaaagcagccgagtcacccgatcagaaagacaccgatggaggacccaaggaggaagaatccccggtttag

SEQ ID NO: 134836 - DNA, 648 bp, synthetic construct
  misc_feature 1..648: note = Description of Artificial Sequence: Synthetic coding sequence
  source 1..648: mol_type = other DNA
atgccacccgccgtgggtggtcccgtcggctatacaccccctgatggaggatggggctgggccgtagtcattggggcgttcatatctattggtttttcttacgcctttccaaaatcaataacagtgttcttcaaagagattgagggcatttttcatgctacaacatcagaggttagttggatctccagcataatgttggcagtgatgtatggcgggggacctatatctagtatacttgtcaacaagtatggcagccggatcgtaatgattgtaggcggatgtctctctgggtgcggcctgattgccgcttcattttgtaacacagtgcaacagctctatgtgtgtatcggagtgatcggcggactcggcctggcatttaatctgaaccccgcattgacaatgataggaaagtacttctataagaggaggcccctggctaatggccttgccatggctggttcacccgtgtttctgtgcaccctggctcctctcaatcaggtgttcttcgggatctttggatggagagggagttttcttatcctgggggggctgttgttgaattgctgcgtcgcgggtgcacttatgcgtcccattggtcccaagcccactaaggctgggaaagataaaagtaaggcatccctggagtag

SEQ ID NO: 134837 - DNA, 1293 bp, synthetic construct
  misc_feature 1..1293: note = Description of Artificial Sequence: Synthetic coding sequence
  source 1..1293: mol_type = other DNA
atgcccccagctgtcggcgggcccgtgggttacaccccaccagatgggggctggggttgggccgtggtgattggtgcctttattagtatcggcttttcctatgcctttccaaaaagcattacggtgttcttcaaggaaatcgaaggcatatttcatgcgactacatcagaagtcagttggatctcctctattatgcttgcagtgatgtacggcgggggcccaatctctagtattctggtgaataagtatggttcgagaattgtgatgatcgtggggggctgtttgtccggctgcggccttatcgcagcttctttttgcaacacagtgcaacagctttacgtatgcatcggggttatcggtgggctaggcttagcatttaacctcaatccagcactaaccatgatcgggaagtacttctataagcgccgccctctggccaatgggctcgctatggcggggtcacctgttttcttgtgcacactggctccattaaatcaggtcttctttggaatctttggctggcgcggatctttcctcattttgggcgggctattgttaaactgttgtgttgcaggcgccttaatgaggccaatcggcccaaagccgactaaggccgggaaagataagtccaaagcctccttagaaaaggccggcaagtcaggagtcaaaaaagatctgcatgacgcaaatactgatctcatcggcagacatcctaagcaggaaaaaagatcagtgtttcagaccattaaccagttcctcgatctcaccctgttcactcatcgtggctttctcctgtacctgtctggtaatgtgattatgttcttcggactattcgcaccattagtgtttctcagcagttacgggaagtcccagcattactccagcgagaagagtgctttcctgctgtccatactggcatttgtggatatggtggcgcgcccctcaatggggctagtcgccaacaccaaacccatccgcccccggatacaatactttttcgctgcgagtgttgtggccaatggcgtttgtcatatgctcgccccactgtccaccacatatgtagggttctgtgtgtacgccggttttttcggtttcgcatttgggtggcttagctccgtcttgttcgagaccctcatggacctcgtcggcccccagcgattttcaagcgccgtcggattagtgactatcgtcgaatgttgccccgttcttctcggccccccgctgttaggaatagtgtatctacccactaacgtgggtctcctacaaaataagcatgtcagatgggagtgttag

SEQ ID NO: 134838 - DNA, 891 bp, synthetic construct
  misc_feature 1..891: note = Description of Artificial Sequence: Synthetic coding sequence
  source 1..891: mol_type = other DNA
atgccacccgccgtgggagggccagtggggtatacacccccagacggcggctggggctgggcggttgttataggagcgttcatcagcataggatttagctacgcgttcccaaagtccattactgtgttcttcaaagaaatcgagggaattttccacgccactacgtctgaggtgtcatggataagttccataatgctcgcagttatgtacggcggtggacccataagtagtattttggtcaataagtacgggtcacggatcgtaatgatcgtgggtggatgcttatccgggtgtggtttgattgcagcgtcattctgcaatacagtacaacagctctacgtgtgcattggagtcatcggcgggctcggtctggcctttaacctcaaccccgcactcacaatgatcggcaagtatttctataagaggaggccactagccaacggccttgccatggccggctctcccgtgttcctttgcacccttgctccgttgaaccaggtgttttttgggatcttcggatggcgtggcagcttcctgatcctcggtgggctgctcctgaactgttgcgtcgccggtgcactgatgcgacccattggtcctaagcctactaaagctggaaaagataagtcaaaggccagcctggaaaaagcgggtaagtctggagtgaaaaaagacctgcacgatgcgaataccgatctcatcgggcgccatccaaagcaggagaagcgctccgtctttcagaccataaatcagttcctggatctcactctgttcacacatcgcgggttcctgctgtatctcagcggcaatgtgatcatgttcttcgggctcttcgctccattagtgttcttgtccagttacgggaagtcacagcactactcaagtgagtag

SEQ ID NO: 134839 - DNA, 1371 bp, synthetic construct
  misc_feature 1..1371: note = Description of Artificial Sequence: Synthetic coding sequence
  source 1..1371: mol_type = other DNA
atgccccctgctgtcggcgggcccgtggggtacaccccacctgacggaggctggggctgggctgtcgtgatcggcgcatttatctccatcgggttctcatacgcctttcctaagtctattaccgtgttctttaaagagatcgagggtatttttcacgccacaacatcggaagtctcatggatttccagcatcatgctggccgtgatgtacggcggaggccctatttctagcattctggtgaacaagtatggcagccggattgtgatgattgtgggaggttgtttgagcggctgcggcttaatagccgccagcttttgcaacacggtgcaacagttgtatgtttgcatcggagtgatcggcggactaggattggctttcaatctgaatcccgctctaacaatgatcgggaagtacttctacaagcgccggccgcttgccaacgggctggccatggctgggtctcctgtattcctgtgtacattagcacccctaaaccaagtgttctttgggatctttgggtggaggggatcgtttctcatcctgggggggttgctcctgaattgctgcgttgctggcgccctcatgcgccccattggccccaagcctaccaaggccgggaaggataagtccaaggctagtctggaaaaggcagggaaaagcggcgtcaaaaaggatctccacgatgctaacacagacttgataggtcgccacccaaaacaggagaagcgaagtgttttccagactatcaaccagttcttggacttaactctgttcacgcaccgggggtttctgctttatctgagcggaaatgttattatgttcttcggtctgtttgcacccctcgtgttcctgtcctcctacgggaagtcccagcattattcctccgagaaaagcgcctttctcctgagtattcttgcgttcgtagatatggttgcgcgcccctcgatgggcttggttgcaaacacaaagcccattaggccccggattcaatatttttttgccgcaagtgtggtggctaacggagtttgccacatgctcgcacccctctctacgacctacgtcggcttttgcgtatacgccggtttcttcggcttcgcatttggatggcttagcagtgtgctctttgagaccctgatggacctggtcgggcctcagagattctcaagcgccgtggggcttgtgactattgtagaatgctgtcctgtgcttttgggcccccccctcctaggcaggctcaacgacatgtatggggactacaaatatacatattgggcctgcggagttgttcttattatttcagggatctatctgtttatcggtatggggattaactacagattattagcaaaggagcaaaaagcaaatgagtag

SEQ ID NO: 134840 - DNA, 1503 bp, synthetic construct
  misc_feature 1..1503: note = Description of Artificial Sequence: Synthetic coding sequence
  source 1..1503: mol_type = other DNA
atgccacccgctgtcggaggccccgtcgggtatactcctccagacggtggatggggctgggctgtggttatcggggcgttcatatccatcggcttttcatatgccttccccaaaagcataactgtattttttaaggagatcgagggaattttccacgccaccacttccgaggtgagctggattagctctattatgctggccgtgatgtacgggggaggtcccatcagctctatcctcgtaaacaaatacggttctaggatagtgatgatcgtaggcggatgcctatcaggatgcggcttgattgccgcttcattctgcaataccgttcagcagttgtatgtctgtattggtgtgattggcggcctgggactggccttcaacctgaaccctgcattgaccatgattgggaagtatttttataaacgcaggccactggctaatgggctggccatggccggatctcccgtgttcctctgcacactcgccccactgaaccaagttttcttcggtatcttcggctggcgtggttcattcctgatactgggaggtttactgttgaattgctgtgtggccggggcgctgatgcgacctattgggccaaagccaacaaaagccgggaaagataagtctaaagccagtcttgagaaggccggaaagagcggcgtgaagaaagatctccatgatgctaatacagacctcattggaaggcaccccaaacaggagaagcgaagcgtattccagacgattaaccaatttctggacctaacactctttacacacagagggttcctcctgtatctctcgggcaacgtcattatgttctttgggctctttgcgccgctggtcttcttgtcctcatacggcaaatctcagcactactcatcagagaaaagcgccttcttgctaagtatactagcatttgtggacatggttgcgagaccctccatgggcttggtggctaatacaaaacctatcagaccccgtatccagtatttctttgcagctagcgtcgttgcgaatggcgtgtgtcacatgctggctccactgtctacgacgtacgtggggttctgcgtctatgcaggctttttcgggttcgctttcggttggctgagctcagttctgtttgagacgctgatggatctcgtggggccccagcggttctctagcgcagtgggtttggttacaatcgtcgaatgctgcccagtgctcctgggccctccacttcttggtcggttaaacgacatgtacggcgactacaagtacacttactgggcatgcggggtggtgctcataatctccggaatctacttgtttatcggcatgggtatcaattatcgcttgctcgcaaaggaacagaaggctaacgagcaaaagaaggagtccaaagaggaggagactagcatcgatgtcgcagggaagcccaacgaagtgactaaggctgccgagagtcctgaccagaaagatacggacggcggacccaaggaagaggaatcccctgtgtag

SEQ ID NO: 134841 - DNA, 606 bp, synthetic construct
  misc_feature 1..606: note = Description of Artificial Sequence: Synthetic coding sequence
  source 1..606: mol_type = other DNA
atgaaacatgtaaacgaacggtttcaggacgagaagaataaggaagtggtgttaatgtgcattggggtgaccagcggcgtgggcagactgctattcggacgtatcgccgactatgtgccaggcgtgaagaaggtctatctgcaagtactctcttttttttttattgggctcatgtcaatgatgatacctctgtgcagcatcttcggggcgctgattgcggtctgcttgataatgggactatttgatgggtgtttcatatcgataatggcgcccattgcctttgaactggtgggagcccaggatgtctctcaggcgatcggattcctgctgggcttcatgtccatccccatgactgtgggaccccccattgcagggctactgcgagacaagcttggaagctatgacgtcgcgttctatctggctggtgtacccccactaatcgggggcgccgttctctgttttatcccctggattcactctaaaaaacagcgggagatctccaaaacaaccggcaaggagaaaatggaaaagatgctcgagaaccagaatagtttactgagcagtagcagcggaatgtttaaaaaggagtctgacagtattatctag

SEQ ID NO: 134842 - DNA, 1548 bp, synthetic construct
  misc_feature 1..1548: note = Description of Artificial Sequence: Synthetic coding sequence
  source 1..1548: mol_type = other DNA
atggttctatcccaagaggagcctgacagcgctaggggtacaagtgaggcacagcctctcggaccagctccaaccggtgccgcgccacctcctgggcccggcccctcagactcacccgaagcagcagtggagaaggtggaggttgagctagccgggcctgctacggcagagccccacgaacccccggagccgccagaagggggctggggctggctggtaatgctggctgccatgtggtgcaatggaagcgtgttcggaatccagaatgcttgcggggttctatttgtcagtatgctggaaacatttggtagtaaggacgacgacaagatggtatttaaaactgcttgggtcggaagcctctccatgggtatgattttcttttgctgccctattgtgtcagtgttcacagatctttttggttgccgtaagaccgcagtcgttggcgctgctgtgggctttgtgggcttgatgtcatcttccttcgtgagctccattgaacctctctacttaacttatggcattattttcgcctgtgggtgtagtttcgcatatcagccgtccctggttatactgggccactacttcaagaaacgattgggtctggtgaacggtatcgtgactgctggctcatctgtgttcactatcctgctgcccctgctgctccgggtgctcatcgattccgtgggtttattctacactctgcgcgtgctgtgtatctttatgtttgtgctcttcctcgccggattcacataccgccctcttgcaacaagtactaaagataaagagtccggcgggtccgggtcctcactcttcagccggaagaagttttcaccgccaaagaaaatctttaacttcgctatcttcaaggtgacggcttacgctgtgtgggctgtgggtattcccctggcccttttcggctacttcgtcccatacgtgcacctcatgaagcacgtcaacgaacgttttcaagacgaaaagaacaaagaggtggtgctgatgtgcatcggggtcacctctggtgtgggccgccttttgttcgggcgcattgctgactatgtgcctggcgtcaaaaaagtgtacctgcaggtcctctctttcttcttcattgggctgatgagcatgatgattcctttgtgctcgatttttggagctttaatcgccgtatgtcttatcatgggcctctttgacggatgttttatctccatcatggcgccaatcgcctttgaactcgtaggcgctcaggacgtcagtcaagcaatcggtttcctcctgggctttatgtccattcccatgactgtcggaccccctattgctggcctcctgcgggataaactcggcagttatgacgttgccttctaccttgcgggtgttcccccactcatcggcggtgccgtgctgtgctttatcccctggattcatagtaagaagcagagagagatctcaaagaccactggcaaggagaaaatggaaaaaatgctggaaaatcaaaactcgctgcttagtagtagcagtgggatgtttaaaaaagaaagcgacagtattatctag

SEQ ID NO: 134843 - DNA, 651 bp, synthetic construct
  misc_feature 1..651: note = Description of Artificial Sequence: Synthetic coding sequence
  source 1..651: mol_type = other DNA
atggtttttaaaacggcttgggttggtagcctgagcatggggatgatatttttctgctgccccattgtcagcgtctttactgatttgtttggctgtaggaaaactgccgtggtgggggctgccgtgggttttgtcggcttaatgagtagttcctttgtgagttccattgagccgctctacttaacgtacggcattatcttcgcctgtggctgcagtttcgcttatcaaccctctctggtgattctcggccattatttcaaaaagcgactgggccttgtgaacgggattgtcacagccggatcttctgtctttactatactcctcccactgctcctcagagtgctaatcgattctgtgggcctgttctatacactgcgagtcctctgcattttcatgttcgtgttattcctcgccgggttcacatataggccacttgccaccagtacgaaggacaaggagagtggcggctctggctcatcactgttcagcagaaagaagttctccccacctaaaaagatcttcaactttgctattttcaaggtgacagcatatgctgtgtgggcggttggaataccactagccctatttggatactttgtgccatatgtccacctggcgaagttttcattcgtgattctaaagtatgaatag

SEQ ID NO: 134844 - DNA, 636 bp, synthetic construct
  misc_feature 1..636: note = Description of Artificial Sequence: Synthetic coding sequence
  source 1..636: mol_type = other DNA
taatgggtggggtccctgtccatgggcatgatcttcttctgttgtccaatagtgtcagtgtttacagatctgtttggatgtcgcaagacagcagtggtgggggccgcagttggattcgtcgggttaatgagctcaagcttcgtttcctccatcgagccgctgtatctgacctacggcataatattcgcctgcggctgcagcttcgcctaccagccaagcctggtgattctcggccactattttaaaaaaagacttggccttgtcaatggaatagtgactgccggatctagcgtgttcaccatacttcttcctcttttactcagagtcctgattgatagtgtcggtcttttttacacactgagggtgctgtgcattttcatgttcgttctctttctggcgggttttacgtacaggcccctggccacttctacaaaggacaaagaatcaggagggtccggctcctcgttgttctcacggaaaaaattctcccctcctaagaagatttttaacttcgctattttcaaagtcaccgcatacgccgtctgggctgtagggatcccattagcactgtttggttacttcgtgccatacgttcacctagcgaagttcagctttgtgattctgaaatacgagtag

SEQ ID NO: 134845 - DNA, 621 bp, synthetic construct
  misc_feature 1..621: note = Description of Artificial Sequence: Synthetic coding sequence
  source 1..621: mol_type = other DNA
tgatgggtcggtagccttagtatgggaatgatttttttctgttgtcctatagtcagcgtttttacggacctgttcggctgccgcaagactgccgtggtcggcgccgctgttggatttgtggggcttatgtctagtagctttgtctccagcatcgagcctctctatctgacgtatggcatcatcttcgcctgtggatgttcgttcgcttaccaaccctccctggtgatcttaggccattatttcaaaaagaggctaggactcgtaaacgggattgtgaccgctggctcctctgttttcactatcctgctgcccctcctgctgcgagtgctcatcgactctgttgggttgttttacactctaagagtgctgtgcatctttatgttcgtgctgtttctggccgggttcacttaccgccctctggctacaagcacgaaggataaagagtcaggcggctctggttccagcttgttctccaggaaaaagttcagcccccctaaaaaaatctttaacttcgctatattcaaggttacggcctacgctgtgtgggcagtgggtattcctctggctctgttcgggtactttgtcccttacgtccatctggtgagcatgttacttcactag

SEQ ID NO: 134846 - DNA, 981 bp, synthetic construct
  misc_feature 1..981: note = Description of Artificial Sequence: Synthetic coding sequence
  source 1..981: mol_type = other DNA
atggttctgtcacaggaagagccagacagtgcaagagggacctctgaggctcagccccttgggcccgcccctacaggtgcggccccacctcctggtccaggaccttctgactctcccgaggctgcagtggagaaagttgaggtggaattggctggtcctgcaactgcagaaccccacgagccccccgaaccacctgaaggcgggtggggctggttagtgatgctcgccgcaatgtggtgcaatggttccgtgtttggaattcagaacgcatgtggggttctgtttgtatctatgcttgaaacattcggtagcaaagatgatgataagatggtctttaaaaccgcatgggttggaagcctgagcatgggtatgattttcttctgctgccctatcgtgtcagtgtttactgacttgttcgggtgtaggaagactgcagtggttggcgcagcagtgggctttgtagggctgatgtccagctcttttgtgtcttctatcgagccgctatacctgacttacggcatcatttttgcttgtgggtgctcttttgcataccagccatctctggtgattctggggcactacttcaaaaagaggcttggtttggtgaatggcatcgttaccgctggatcttcggtgtttaccattctgctgcctttgctgctacgcgtcctcatcgactctgtgggacttttctataccttacgcgtattatgcatcttcatgttcgtgctttttcttgcaggcttcacctacagacccttagccacatccactaaggataaagagagcggcggcagtggttcctccttattctctcgtaagaaattctctccacccaaaaactttcagttttgccatctgcagggggattcattgtgcagcgtcgggtcgtggaataccacctgtaccttctggatattgtgtgccttgtgcagtttaggggagtacgctcccagcctcatcatgaacatcaccatatag

SEQ ID NO: 134847 - DNA, 1461 bp, synthetic construct
  misc_feature 1..1461: note = Description of Artificial Sequence: Synthetic coding sequence
  source 1..1461: mol_type = other DNA
atggccaaggtcaaccgtgcacgatcgaccagtccacctgatggtggttggggctggatgatcgtggccggatgtttcctcgtcaccatctgcacccgtgcagtgaccaggtgcattagcatctttttcgttgagtttcagacatattttacccaagactacgcccagaccgcctggattcactccatcgttgattgtgtcaccatgctctgcgcacctctgggcagcgtagttagcaatcacctcagctgtcaggtggggattatgcttggcggcctgcttgccagtactgggcttattcttagcagcttcgccacttctctcaagcatctgtacttaacactgggagtccttaccgggctgggatttgccttatgttattctccagcgattgcaatggttggcaagtactttagccggcgcaaggccctagcttatggcatcgcaatgagcggtagcggtattggaactttcatcctggctccagtagtgcaactgctaatcgaacagttcagttggcgaggcgctttactgattctgggtggcttcgtgctcaacttatgcgtctgcggcgccctcatgcgacccataacacttaaggaggaccataccacgcccgaacagaaccacgtgtgcagaacacagaaagaagatatcaagagagtgtccccatacagtagtctgactaaggaatgggctcagacatgtctctgttgctgcctccagcaggagtacagctttttgttgatgtccgactttgtggtgctggccgtgtccgtgctcttcatggcatatgggtgtagtcctctttttgtgtacctggtgccttacgccctgtcggtgggggtttcacaccagcaggccgccttcctgatgagcatccttggggtgatagacatcatcggaaatatcaccttcggatggctgactgacagacgttgtttgaaaaattaccaatatgtatgctacctcttcgctgtgggtatggatggcctttgctacttgtgccttcctatgcttcagtccctgcctctgctggtgccctttagctgcacatttggctacttcgatggcgcctatgtgacactcatcccagtggtaactaccgagattgtaggaaccacatccctatcatcagccctgggagtggtatatttccttcacgcagtgccatatctagtgtccccgcctatcgctgggagattggtggatacgacaggatcatataccgctgcatttctactgtgcggcttttcaatgattttctcttccgtgctgctaggctttgccagacttattaagaggatgcgaaagactcagctgcaatttattgctaaagaatcggatcctaaactccaactctggactaatggtagcgtggcttactccgtcgctcgagaacttgaccaaaagcacggcgagccggtggctacagcggtgcccggatatagtcttacctag

SEQ ID NO: 134848 - DNA, 1551 bp, synthetic construct
  misc_feature 1..1551: note = Description of Artificial Sequence: Synthetic coding sequence
  source 1..1551: mol_type = other DNA
atgccctctggaagccactggactgcgaattcaagtaagataatcacctggcttttggagcagcctgggaaggaagaaaaaaggaagaccatggccaaagtgaatagggcacgctctaccagtccaccggatggaggatgggggtggatgatcgtggccggctgcttcctggtcacaatctgtacccgggcagttaccaggtgcattagcatcttctttgtagaattccagacatatttcacacaggattatgcccaaactgcctggattcactctatcgtggactgtgtgacgatgttatgcgctcccctgggatctgttgtgtccaaccacctttcctgtcaagtagggatcatgctagggggccttctcgctagcaccggcctgattctgtccagtttcgctacttctctgaagcatctctacctgactttgggcgttctgacaggtctcggcttcgctctgtgctacagccccgctatcgctatggtgggaaaatacttttctaggaggaaggccctggcctacggaatcgctatgagcggatctgggatcggcacttttattcttgcccccgtcgtccagctgttgatcgagcagttcagttggaggggagctctccttatcctgggcggctttgtcctaaatctttgtgtatgcggagctttgatgcgccctatcactctgaaggaggaccacacaactcccgagcagaatcatgtgtgccggacccaaaaagaggatattaagcgggtgagcccatactcctccctcaccaaggagtgggctcagacctgcctatgctgttgtcttcaacaagaatattcttttctgttaatgtctgacttcgtggttttagccgtgagtgtgctgttcatggcttatggctgttcacccctgttcgtgtatctggtgccatatgcgctatctgttggagtgagccaccagcaggctgccttcttgatgtctatacttggcgtaattgatataatcggcaatatcaccttcggttggcttaccgaccgccggtgcctcaagaactaccagtacgtctgttacctgtttgctgtaggaatggacggcctatgttatctgtgtctccctatgctgcagtcactgcccctccttgtgcctttctcttgtacatttgggtactttgacggagcctacgtaaccctgatcccagtcgtcactacagaaatcgtgggcacgactagccttagcagtgctctcggcgtggtctacttcctgcacgctgtgccttatctcgtcagtccgcccattgctggtcggctggtagacaccaccggttcctacacagccgcattcttgttgtgcggcttctcaatgatcttctccagcgttcttctagggttcgcacggctcatcaagaggatgcggaagacacagttgcaattcatcgcaaaggagtcagacccaaagctgcagctatggacgaacgggagcgtggcatattctgttgcacgggagctcgaccagaaacatggagagcctgtagccactgccgtcccaggttattctctaacatag

SEQ ID NO: 134849 - DNA, 78 bp, synthetic construct
  misc_feature 1..78: note = Description of Artificial Sequence: Synthetic coding sequence
  source 1..78: mol_type = other DNA
atgccaagcgggtcacattggacggccaattcctctaagatcattacatggctgctggagcaacctgggaaagagtag

SEQ ID NO: 134850 - DNA, 453 bp, synthetic construct
  misc_feature 1..453: note = Description of Artificial Sequence: Synthetic coding sequence
  source 1..453: mol_type = other DNA
atgagacccatcaccctgaaagaggaccataccaccccggaacagaaccacgtctgccggacacagaaggaagacataaagagggtctccccttatagcagcctcactaaagaatgggcccagacgtgtctttgttgctgcctacaacaagaatatagtttcttactgatgtccgattttgtggtcctcgccgtctccgtattgttcatggcttatgggtgctccccactgtttgtttacctcgtaccctacgcacttagcgtgggagtgagtcaccagcaggctgcctttctcatgagcatactgggcgtaatagatatcattgggaatattaccttcggctggttaaccgatcggagattctgcatcaagaccttcggaatctttagaaagagcgtcagaaagatgtacatcctgcgatctacaatcctgcacttctacactgaattttag

SEQ ID NO: 134851 - DNA, 1842 bp, synthetic construct
  misc_feature 1..1842: note = Description of Artificial Sequence: Synthetic coding sequence
  source 1..1842: mol_type = other DNA
atgggcagggggggcgggggcctcgatgttggaggaggaggcgaaggctcacgggaccgcctgagccgagacggccttgcctcatggggggccgaaccggggggcggtggttcaggaagcggttcctcttcaccaccatcctcatcctcttgttccagccggaacaaatatcagccacaaagcggttcttctgggccgtcatctcactccccccccgccgccatggcactccaatcacaggccagcgaggaggccaaagggccgtggcaggaagccgaccaggagcagcaggaacctgtgggttcccctgaaccggagagtgaacccgagccagagccagaaccagagcctgtaccagtaccccccccggaaccacagccagaaccccagccccttcctgatcctgcacccctccctgagcttgagttcgagtctgagcgggtccatgaacccgaacccacacccactgtggaaacccgggggactgcccgcggatttcagccacccgagggcggattcgggtgggtagtggtctttgcagccacgtggtgcaacggcagcatcttcggtattcataatagtgtcggaattctgtacagcatgctgcttgaggaggagaaggaaaaaaaccgccaggtggagttccaggctgcgtgggtcggggccctggcaatggggatgatctttttctgttcaccaatagtttctatattcacagacaggctcggctgccggattactgcgaccgccggagcggccgttgctttcatcggacttcatactagttccttcacttccagtcttagtctgcggtactttacttacgggatcctgttcggttgcggatgctcgttcgcctttcagccttcccttgtcattttgggccactatttccagcgtagactgggcctcgcaaacggtgtggtcagcgctgggagctccatatttagcatgtcttttccctttcttattcgtatgctaggtgataaaatcaaattggctcagaccttccaagtactgagtactttcatgttcgtgctgatgctcctaagtttgacatatcggcccctcctaccttcatcacaggacaccccttccaaacggggggtacgtaccctgcaccagaggttcctggcgcagcttaggaagtactttaatatgcgcgttttcagacagaggacatatcggatatgggccttcgggattgccgccgcagccttggggtatttcgtgccatatgtgcatctgatgaaatacgttgaagaggagttcagtgagattaaagagacatgggtcctcctggtgtgtatcggcgctaccagcggattgggaaggctggtttcagggcacatctctgattctatccccgggcttaaaaaaatatacctgcaggttctgagttttctactgctcggcctgatgtcgatgatgataccgctctgcagggactttggaggccttatagtggtttgcttgttcctcggcctctgcgacgggtttttcattacgatcatggcacctattgcctttgagctggtgggtcccatgcaggcctcacaggccatcggatacctgctgggcatgatggccctgccaatgatcgctgggcctcctatcgccggcctcctgagaaattgttttggagactaccacgtggcattttacttcgctggtgtgccaccgatcatcggggccgttattctgttttttgtgccgcttatgcatcagcggatgttcaagaaagagcagagagatagctccaaagacaagatgctcgcccctgatccagaccccaacggagaacttctcccaggatcacccaatccagaggagccaatctag

SEQ ID NO: 134852 - DNA, 1437 bp, synthetic construct
  misc_feature 1..1437: note = Description of Artificial Sequence: Synthetic coding sequence
  source 1..1437: mol_type = other DNA
atgccccccatgcctagcgcaccccctgtccaccctcctcccgacggcggatggggctggattgtggtcggagccgcctttataagtatcggcttttcatatgcattccccaaggcagtgacagtcttcttcaaggaaatccagcaaatcttccacacaacctattcggaaatcgcttggatttctagtattatgctcgctgtaatgtacgccggaggacctgtgtcatcagtgctcgtgaataaatacggatccaggcccgtagtaattgccggcggactgctgtgttgcctgggcatggtgctggcgagctttagcagcagtgtcgtacagttgtacttgacaatgggtttcatcaccgggcttggactggcattcaatctgcaaccagctctgaccatcatcgggaagtacttttatcggaagcggcctatggctaatggcctggcaatggcgggatcaccagtgttcctgagtagcttggctcctttcaatcagtacttgttcaacacttttggatggaaggggtcgtttttaatcttggggtcccttctgcttaacgcatgtgtagccggaagcctgatgaggccgttgggcccaaatcagaccaccagtaagtcaaagaacaagactgggaaaacagaagacgactcaagtccaaaaaagattaaaacaaagaagtctacttgggagaaagttaacaagtacctggacttttcactgttcaagcaccgcggcttcctcatatatctgtccgggaacgtcatcatgtttctgggcttcttcgctccaattatcttccttgcaccttatgctaaggatcaggggatagatgaatacagtgcagcttttctgctatccgttatggcttttgtggacatgttcgctaggccatcagttggcttaattgccaactcgaagtacatccgaccgcgcatccagtatttttttagctttgcgatcatgtttaatggggtgtgccatcttttgtgtcctcttgcccaggactacacctcgctcgttctctatgcggttttcttcggccttggatttggatccgtgtccagtgtactctttgagaccctaatggatctggtgggcgccccccgcttctcctcagccgtgggcttggttaccattgtggagtgtgggcccgtactcctcggcccgccgttggccggtaaactcgtggaccttaccggggagtacaagtacatgtacatgtcgtgtggagctattgtggtcgctgctagcgtatggctccttatcggaaacgcgatcaactaccgactgctggcaaaggaacgcaaggaagaaaacgcccgacagaagacacgagaaagcgagcctctaagtaagagcaagcactctgaggacgtaaatgtaaaggtgtcaaacgctcaaagtgtcacgtccgaacgagagacgaatatctag

SEQ ID NO: 134853 - DNA, 1140 bp, synthetic construct
  misc_feature 1..1140: note = Description of Artificial Sequence: Synthetic coding sequence
  source 1..1140: mol_type = other DNA
atggtcctggctagtttctcatccagcgtggttcagctgtatctgaccatgggcttcataacaggcctgggcctggctttcaacctgcagcctgccctgactataatcggcaaatatttctaccgaaagaggcctatggctaacggcctggccatggccggaagcccagtatttttgagctcattggccccttttaatcagtacctcttcaacacctttgggtggaaaggcagttttctgatattaggctctctgctgttgaatgcatgtgtagcaggtagcctgatgaggccactgggtccaaatcagacaacgagcaaaagtaagaacaagaccggtaaaacagaggacgacagcagtcctaaaaaaataaagactaagaagtccacttgggagaaggtcaataagtatctggatttcagcctgtttaaacatagaggatttctcatctatctgtctggaaacgtgataatgttcctgggattcttcgcacccatcatctttttagctccttatgctaaagaccaggggatcgatgaatactcggctgcttttctcttatccgtaatggcctttgtcgacatgttcgcaaggccatcagtcggcctcatcgctaatagcaagtatatacgtcccagaatacaatacttcttttctttcgccataatgttcaacggagtgtgccacctgttatgcccgctagcccaggactatacatccctcgtgctctatgccgtgttttttggactgggattcgggtcagtgagtagtgtcctgtttgagactcttatggatttagtcggggcaccaaggttttcctcagccgtgggacttgtgactattgttgagtgtgggccagtattgttgggtccccccctcgctgggaaattggttgacctgaccggggaatacaagtatatgtatatgagctgtggcgcaatcgtcgtggcagcctcggtgtggctactcatagggaatgccataaactatcgcctgttagccaaagaacgcaaggaggaaaacgccaggcagaaaacccgagagtctgagccattaagcaaatctaaacattctgaagatgtgaacgttaaggtgtcaaatgcacagtccgtcaccagcgagagagaaacgaacatatag

SEQ ID NO: 134854 - DNA, 1437 bp, synthetic construct
  misc_feature 1..1437: note = Description of Artificial Sequence: Synthetic coding sequence
  source 1..1437: mol_type = other DNA
atgccgccaatgccatctgcccctccagtgcaccctcccccggatggcgggtgggggtggattgttgtgggggccgcctttataagcattggcttttcctacgcgttccccaaggctgttactgtgttctttaaagagattcagcagatttttcacaccacatactccgagatcgcctggattagcagcatcatgctggcagtgatgtacgctggcggcccagtttctagcgtgctcgtgaataagtacggatcacgacctgttgtgatcgccggagggctgctgtgttgcctagggatggtgttagcttcctttagcagttccgttgtgcaactatacctgaccatggggtttataacaggcctgggtctggcgttcaaccttcagccagcactgaccatcattggtaaatatttttatcggaagcggcccatggccaacgggctggcaatggccgggagtcctgtttttctgagctccctggccccattcaatcagtacctttttaatacatttggatggaagggatcatttctcatcctggggtccctgttactaaacgcttgcgtggccggatcgctcatgagaccattaggtcccaaccaaaccaccagcaagagcaaaaataaaaccggtaagaccgaggatgactcttcccccaaaaagataaagacgaagaagtccacctgggagaaagttaataagtacctcgatttctctctgtttaaacaccgcggatttctcatctatctgagtggcaacgtcattatgttcctgggcttttttgcccctatcatttttctggcgccctatgccaaagaccagggaatcgacgaatatagtgctgccttccttttatctgtgatggcattcgtggacatgtttgcacggccaagcgtcggcttgattgctaactcaaaatacatccgccccaggatccagtactttttctcctttgcaattatgttcaatggagtgtgccatctcctctgtcctttggcccaggattatacatcgctcgtgctgtacgctgtattcttcggtctcggcttcggtagcgtgtccagtgtactgtttgagacactgatggacctagtgggagctcccaggttcagcagcgccgtagggctggtcactatcgtggagtgcggaccagttctactgggccccccactggccgggaaactcgtggatctgaccggagagtataaatatatgtacatgagctgtggtgcaatcgtggtggccgcctctgtttggctgcttatcggtaacgccattaactatcggctgctcgcaaaagagcgtaaggaagagaatgcaaggcagaaaacaagggaaagtgagcctctgagcaagtctaagcacagcgaagacgttaacgtgaaggtttctaatgcccaaagtgtaacatctgaaagggagactaatatttag

SEQ ID NO: 134855 - DNA, 1437 bp, synthetic construct
  misc_feature 1..1437: note = Description of Artificial Sequence: Synthetic coding sequence
  source 1..1437: mol_type = other DNA
atgcctccaatgccttccgcaccgcccgtgcatcctcctcctgacgggggttggggatggatagtggtgggcgcagcgtttatttctattggtttttcttacgcctttcccaaagcggttacagtattttttaaggaaattcagcagattttccatacaacatactcagagattgcatggatttcatccattatgctggcggttatgtacgccggaggtcccgtgagctcagtgttagttaataaatatggctcgcgtcccgttgtgattgcaggtggcctcttatgctgtctggggatggtattggcctcattttcttctagtgttgtccaattgtaccttacaatgggcttcatcaccggcctcggactggctttcaacctccaacctgctctgactatcatcggtaagtatttttataggaagaggcccatggcgaacggcttagcaatggccggcagccccgtgttcttatcctctctagccccctttaatcagtatctatttaatacttttgggtggaagggttcttttttgatcctgggctccctcctgcttaacgcttgtgttgctggcagcctgatgaggcctctcggacccaaccagacaacatcaaaaagcaaaaacaagacggggaagacagaagacgattcctcgccaaagaaaataaaaacaaagaagagtacatgggaaaaagtgaacaagtacctcgatttcagcttgtttaaacatcggggttttctcatttatctttccggcaatgtgattatgttccttgggtttttcgcccctattattttcttagctccatacgcgaaagaccaaggaatcgacgaatattctgccgcttttctgctgtcagtcatggcctttgtggatatgttcgctcgccctagtgtcggactgatcgctaattccaaatacatccggccccgcatacagtacttcttcagcttcgcaatcatgttcaatggggtgtgccacttgctgtgtccattggcccaggactacaccagtctggtgctctatgcggtgttttttggcctgggtttcgggtccgtctcatcagtgctctttgaaactcttatggatctggtcggagcccctcgattcagcagcgcggtgggcctggtgactattgtggaatgtggacccgtgctgttgggccccccgctcgctgggaagctggttgacctgactggtgaatataaatacatgtacatgtcctgcggtgccattgtggtggctgcctccgtctggttgttaatcgggaacgccataaattaccgcctcctcgcaaaggagcggaaggaagaaaatgcccgacagaaaactcgggaatccgaacccttgtcaaaaagcaaacactctgaggacgtgaatgtcaaggtgtctaacgcacagtctgtgactagcgagcgggagactaatatctag

SEQ ID NO: 134856 - DNA, 1437 bp, synthetic construct
  misc_feature 1..1437: note = Description of Artificial Sequence: Synthetic coding sequence
  source 1..1437: mol_type = other DNA
atgcccccgatgcccagcgctccacccgtccacccaccacccgacggagggtggggctggatcgtggtcggtgctgctttcatcagtattggcttctcctatgcattccccaaagctgtcacggtattttttaaggaaatccagcagatcttccacactacatacagtgagatcgcttggatcagtagcatcatgctcgcggtcatgtatgctggcggtcctgtgtcctcagtgctcgtcaataaatatggctcccgcccggtcgtgatcgccggaggcttattatgctgcctcggcatggtgctggcatctttctcatctagcgttgtacagctgtaccttactatggggttcatcacgggcctaggtctagcattcaatctccagccggctctaacaatcatcggaaaatacttctataggaagcgccccatggccaacggcctcgctatggcggggtccccagtgttcctgtccagccttgcaccttttaaccagtatctgtttaatacatttggctggaagggatcctttttgattctgggatcacttctgctgaacgcgtgcgtagccgggtcgctaatgcggcctctcggccctaaccagaccacctctaagtctaagaataaaaccggcaagacggaggatgacagctcaccaaagaagattaagactaaaaagtctacctgggaaaaagttaacaagtacttagacttttctctattcaagcatagaggttttttgatctacctcagcggcaacgtgatcatgtttctcggatttttcgcccccataatcttcctggcaccatacgctaaagaccagggcatagacgagtattcggccgccttcctgctgtcagttatggcctttgttgacatgtttgcccggccatcagttggactaatagccaattccaagtacatcaggccaaggatccagtactttttttcttttgctatcatgtttaatggcgtgtgtcacctcctctgccccttagctcaggattatacgagcttggtgctctatgctgtattcttcgggctaggctttggatcggtttcctccgtgctttttgagaccttaatggatctcgtaggggcaccccggttttccagcgcggtaggacttgtgaccatcgtggagtgcggaccagtcctgctcggtccaccactcgcaggaaagctagtggatctcacaggagaatataagtacatgtatatgtcctgcggggccatcgtggtggctgcatctgtctggctgttgatcggcaatgccattaattacagattgctggcaaaggaacgaaaggaggaaaatgctaggcagaagacacgcgagagcgagccgctttccaagtcgaagcacagtgaggacgtgaatgtgaaagtgagcaacgcgcagtcggtgacaagcgaacgcgaaaccaatatatag

SEQ ID NO: 134857 - DNA, 1530 bp, synthetic construct
  misc_feature 1..1530: note = Description of Artificial Sequence: Synthetic coding sequence
  source 1..1530: mol_type = other DNA
atggaactcaagaagtcccctgacggaggttgggggtgggtgattgtgtttgtgtcatttctgacacagttcctgtgttatgggtctcccctggcagtgggagtactctacattgaatggctggacgccttcggcgagggaaagggaaagactgcctgggtcgggtctctggcctccggggtggggctcctcgcctctcctgtctgtagcctctgcgttagcagcttcggcgccaggcctgtgactatcttcagtggctttatggtcgccggcggactgatgctgagttcatttgcgccaaatatctatttcctgtttttttcctacggcattgttgtaggcctgggttgtggactcctgtacacagctacagttacaataacctgccaatactttgacgatcgcagaggattggcgctgggcttgatttctactggatccagtgtcggtctctttatatacgccgccctacagagaatgcttgtagaattttacgggttggatggttgtctcctgatcgtcggggccttagcattgaacatactggcctgcggctccctaatgaggcccctgcaatcaagcgactgtcccttacctaaaaagattgcacccgaagacctaccagataagtatagcatctataacgagaaagggaagaacctagaggagaatatcaacattttagacaagtcatattcaagtgaagaaaaatgtcgcattacattggctaacggcgactggaagcaagacagcctgctccataaaaatcccactgtcacacacacaaaggagcccgagacctacaagaagaaggtcgccgagcagacctacttctgcaagcagctcgctaaaaggaagtggcagctgtacaaaaactattgtggcgaaaccgtggctctttttaagaataaagtttttagcgcactgttcattgccattttgctattcgacattggaggctttccgccgtcactgttaatggaggacgtcgctagatcatccaatgtcaaagaagaggagttcatcatgcctctgatctccattattggcattatgactgccgtcggcaagctgctattaggtatcctcgctgattttaaatggatcaatacactgtatttatacgtcgccacactgatcattatgggcctggctctgtgtgcaatcccctttgccaagagttatgtgacactggccctgttatccggcattctaggatttctgaccggtaactggagcatcttcccatacgttaccacaaaaaccgtgggcatcgaaaagctcgctcacgcctacggaatactaatgttttttgccggactgggtaatagtctaggcccacctatcgttgggtggttttatgactggacgcagacttacgacattgccttttacttcagcgggttttgcgtcctcctcgggggctttatcttgctcctagccgcactgcccagttgggatacctgcaataagcagctcccgaaacccgctccaaccacattcctgtacaaggtggcttctaacgtgtag

SEQ ID NO: 134858 - DNA, 1530 bp, synthetic construct
  misc_feature 1..1530: note = Description of Artificial Sequence: Synthetic coding sequence
  source 1..1530: mol_type = other DNA
atggagttgaagaaatcccctgatggaggctggggctgggtgattgtcttcgtaagtttcctgacacagtttctatgttatgggtccccgctcgcggtaggcgtgctctatattgaatggctggacgcgttcggtgaaggcaagggtaagacagcctgggtagggtcactggcaagcggcgttggcctgctagccagcccggtgtgctctctgtgcgtctcctctttcggggctaggcccgtcaccattttctccggatttatggtggccgggggcctgatgctatcatctttcgcacctaacatctattttttgttcttttcctatggcattgtggttgggttaggatgcggtttactatacaccgcaaccgtgaccatcacctgtcaatactttgacgacagaagagggttggccctggggctgatctctaccggaagcagcgtgggtttgttcatctacgccgctctgcagaggatgctggtggagttctatggactcgatggatgcctgttgatcgtgggggcccttgctctgaacatcctcgcttgtggctcgcttatgcgaccgttgcagtcatccgactgccccctgccaaaaaagatcgctcccgaggatctgccagacaagtactccatttataacgagaagggaaaaaacttggaggagaatataaatatcttggacaagtcttactcctctgaagagaagtgtcgcatcactctggccaacggggattggaaacaggacagtctgttgcacaaaaacccaaccgtgacacataccaaggagcccgaaacatacaaaaagaaagtggccgagcaaacctatttttgtaaacagcttgccaagagaaagtggcagctgtacaagaattattgtggggagactgtggcgctcttcaagaacaaagtcttctctgctctcttcattgccatcctactgttcgacatcgggggctttccaccctctctgctgatggaagacgtcgccagatcgtctaacgtcaaagaggaggaattcatcatgccacttatctcgattattggcatcatgacagcagtcgggaaacttctcctggggatcctggcagatttcaaatggataaatactctgtacctgtacgtggccaccctgataatcatgggcctggccctgtgtgctattcccttcgcaaagtcatacgtgacactggccttactaagtggaattctgggtttcctgaccggtaactggagcatctttccgtatgtcaccacaaaaacggtcggtatcgagaaattggctcacgcctatgggatcctaatgttttttgccggacttgggaactcactcggccctccgatagttgggtggttctatgactggacccagacgtatgacatcgcattttattttagcggattctgtgtgttgctgggtggttttatcttgctattggccgctctcccctcttgggacacgtgcaacaagcaacttcccaaacctgcgcccacaacattcctctacaaggttgcttctaatgtgtag

SEQ ID NO: 134859 - DNA, 198 bp, synthetic construct
  misc_feature 1..198: note = Description of Artificial Sequence: Synthetic coding sequence
  source 1..198: mol_type = other DNA
atggaactcaagaagtcacctgacggcgggtggggatgggttatcgtctttgtgtcatttctgacccagtttctttgctatggttctcctctggccgtgggcgtgctttatatcgagtggttagacgcctttggcgaggggaaagggaagacagcttgggtcggatccctcgcgagtggggtcggactgctagcttag

SEQ ID NO: 134860 - DNA, 1488 bp, synthetic construct
  misc_feature 1..1488: note = Description of Artificial Sequence: Synthetic coding sequence
  source 1..1488: mol_type = other DNA
atgaggtcccctgtgagggacctggcaaggaatgatggtgaggagtccacagaccgaacccctcttctccccggggcgcccagggcggaagccgcaccggtgtgttgtagcgccaggtacaacctcgctatcctggccttctttggattcttcatcgtgtatgcattgcgggtgaaccttagcgttgctttagtcgatatggtggactctaacacgacattagaggataataggactagtaaggcctgcccagaacacagtgctcccatcaaggtgcaccataaccagaccgggaaaaagtatcagtgggatgcagaaacgcagggatggattttgggttccttcttctatggctatattatcacgcagattcctggcggatatgtcgcaagtaaaattggcggtaagatgctgcttggatttggcatccttggtacagctgtgctcaccttattcacccctattgcagcagacttgggagtcggccctttaattgtcctccgggcgctggaagggctgggtgagggtgtcacgttcccggccatgcatgctatgtggagcagctgggcacctcctctggaacgatctaagctcctatctatcagctatgctggcgcccagctagggaccgtcatctctctgcccctaagtggaataatctgttattatatgaactggacttatgtgttctactttttcggcaccataggaatcttttggttcttgctttggatctggctggtctcggacacaccccagaaacataagcgcatcagtcactacgagaaggaatacattttatcatctctgagaaatcagctgagttctcagaagtctgtgccctgggtccctatcctcaagtcgctgcccctttgggccatcgtagtagctcatttttcatacaattggacgttctacacattgctgaccctgctgccaacgtacatgaaggagattctgagattcaatgtccaggagaatggttttctgagctccctgccctacctgggctcttggctgtgcatgatcctatccggccaagcagctgacaaccttcgtgccaagtggaatttcagcaccctctgcgtcaggagaatctttagtctgattggtatgatagggcccgctgtgtttctggtggctgccggattcattggctgtgattactctttggctgtggccttcctgacaatcagtaccacattaggtgggttctgctcttccgggttcagcatcaaccacctggacatagcacctagctacgccggcatactcctgggcatcacaaacacgttcgccacaattccgggaatggtcggtccagtgatcgcaaagagtttgacacctgataacacagtgggcgaatggcagaccgtgttttacatcgccgctgccattaacgtgttcggagcgatctttttcactctgttcgccaagggggaggttcaaaattgggccctgaacgatcaccacggccacagacattag

SEQ ID NO: 134861 - DNA, 546 bp, synthetic construct
  misc_feature 1..546: note = Description of Artificial Sequence: Synthetic coding sequence
  source 1..546: mol_type = other DNA
atgaggtcccccgttcgcgatcttgcaaggaacgacggggaggagagtaccgacaggaccccacttttgcctggcgcgccaagagccgaggcggcacccgtgtgttgctctgcccgttacaacttggccatcctggcttttttcggctttttcattgtgtacgccctccgcgtgaatctctcagtcgcccttgtggatatggtcgattccaataccactttagaagataaccgtacctcaaaagcttgcccggaacactccgccccaatcaaagttcatcacaaccaaacaggcaagaaataccagtgggatgccgaaactcagggctggattctcggaagctttttctacggatatattatcacccaaattcctggcgggtacgtggcaagtaaaatcggtggcaaaatgctgctgggcttcggtattcttggcacggctgtcctgacattgttcacacctatcgcagcagacttaggggtggggccgctcattgtgcttagggccttggagggactgggcgaggaacactccctgggccagtag

SEQ ID NO: 134862 - DNA, 1404 bp, synthetic construct
  misc_feature 1..1404: note = Description of Artificial Sequence: Synthetic coding sequence
  source 1..1404: mol_type = other DNA
atgcagatggacaatcgactacccccaaagaaggttccggggttttgctcttttaggtatggactgagttttctcgtgcattgctgtaatgtcatcatcacagcccagcgcgcctgtctcaatctcactatggttgtgatggtaaatagcaccgacccccatgggctccctaatactagtactaaaaaacttcttgataatataaaaaacccaatgtataactggtcacccgacatccagggaattattctctcctcaacttcttacggagtgatcatcatccaggtccccgtcggctatttctcaggcatttattcaaccaaaaaaatgatagggttcgcactgtgcctctcctccgtcctgtccttgctgataccaccggccgctggaataggcgttgcatgggtagttgtctgccgtgctgtgcaaggtgccgcacaaggaattgtggccactgcccagttcgaaatctatgtgaaatgggctccacctctcgagcgtggtcgcctgacatcaatgtccaccagcggattcctgctgggccctttcatcgtgctgctggttacgggcgtgatatgtgaaagcctgggttggcctatggtgttctatatatttggagcttgtgggtgtgctgtttgcttgctctggttcgtcctgttttacgacgatccgaaggatcatccctgtatatcaatttcggaaaaagagtacatcacttcctcgctcgtgcagcaggtgagcagttcccgccagagcctcccaattaaggccattctcaagagcctgccagtatgggcaatcagtactgggtcctttaccttcttctggtcccataacattatgacactgtacactcctatgtttattaactcaatgctgcatgtaaatattaaagagaatggattcctgagcagcctgccatacctgtttgcatggatctgtggtaatctcgccggccaactgtccgattttttcctaacacgcaatattcttagcgtgatcgccgtgaggaagctattcaccgcagcaggattcctgctgcccgctatattcggagtctgcttaccctatttatcatctacattctactcaatagtgattttcctgattttggccggtgccacaggctcattttgcttagggggcgtgtttattaatggcctggacatcgctccccggtatttcgggttcataaaggcttgtagcaccttaacaggcatgataggtgggttaattgcatctacacttacagggctgatcttgaaacaagaccccgagtctgcatggtttaagaccttcatcctcatggctgcaattaacgtgacaggactgatcttttacctcattgtcgcaactgccgagatccaagattgggccaaggaaaagcaacatacccgattgtag

SEQ ID NO: 134863 - DNA, 630 bp, synthetic construct
  misc_feature 1..630: note = Description of Artificial Sequence: Synthetic coding sequence
  source 1..630: mol_type = other DNA
atgcagatggacaaccggctgcctcctaaaaaagtccctggattctgctcgtttcggtacggactatccttcttagtccactgctgcaacgttattattaccgcccagcgggcttgcctcaatctgacgatggtggtgatggtgaatagtacagacccccatggcctgccaaacaccagtacaaagaaactcctggataacatcaagaaccccatgtacaactggagtccagacattcagggaataattttgtcgagtacttcatatggcgtgatcatcattcaagtgcctgtcggctatttcagtggcatttatagtaccaagaagatgattgggtttgcactctgcctgagctcagtgctgtccctactgatccccccggccgcaggaataggggtggcctgggttgtcgtctgtagagccgtccagggggcagcgcaagggattgtggccaccgcacaattcgaaatctatgtgaagtgggccccacctctcgagcgtggacgtctcacttcaatgagtacgtcgggattcctgctaggtccattcattgttttactggtcactggggtgatatgtgaatcactgggctggcccatggttttttatatcttcggacaattcaaatag

SEQ ID NO: 134864 - DNA, 1242 bp, synthetic construct
  misc_feature 1..1242: note = Description of Artificial Sequence: Synthetic coding sequence
  source 1..1242: mol_type = other DNA
atgcagatggacaataggctgcctcctaaaaaggtgcccgggttctgttcattccggtacggtctttctttcctggtgcactgttgtaacgtgataatcactgcccagagagcttgcctgaacctgacgatggttgtcatggtcaacagcaccgacccccatggacttccaaatacgtccacaaaaaagttgctcgataatatcaagaatcctatgtacaattggagtccagatattcagggcatcattctcagcagtacctcctatggtgtaattatcatccaggtccctgtagggtatttcagtggcatttactctaccaaaaagatgatcggctttgcactgtgcctcagttcagtgttgtctctgttgattccacctgctgcaggaatcggagtggcctgggtcgtggtgtgcagagctgtgcagggggcggctcagggcatcgtcgccaccgcccagttcgagatctatgtgaagtgggcaccaccattagagcgaggacgcctgacaagcatgagtacctcaggcttccttctcggaccctttattgtcttgcttgtgacgggagtgatttgcgagtctctcggctggccaatggttttttatattttcggcgcatgcggatgtgctgtttgtctcctgtggttcgtgcttttctacgacgatcctaaggatcatccttgtattagcatcagcgagaaggaatatattacttccagtctagtgcagcagaacggattcctgagctcccttccgtatctgttcgcgtggatatgtggcaatttggccggtcagctgtcagacttttttctgacaaggaatattctctcagttatcgccgttaggaaacttttcaccgccgccggattcctgctgcccgctattttcggtgtgtgtttgccttatttgtcaagcaccttctacagcatagtcatcttccttatactagccggggcaacaggaagcttttgtctaggaggcgtgttcattaacggattagacattgcaccgagatacttcgggtttattaaggcctgcagcacgctcacaggcatgatcggaggtttaattgcttcaaccctgacggggctgatacttaagcaggaccccgaatcagcttggttcaaaaccttcattctgatggccgctatcaatgtcactggactgatcttttatctcatcgtagctaccgccgagatacaggactgggccaaggagaagcaacacactcgactgtag

SEQ ID NO: 134865 - DNA, 1242 bp, synthetic construct
  misc_feature 1..1242: note = Description of Artificial Sequence: Synthetic coding sequence
  source 1..1242: mol_type = other DNA
atgcaaatggacaatagactgcctcccaaaaaagttcctggattctgttccttccggtatggcctaagtttcctagtacactgctgcaacgtaatcattacagctcagcgggcctgtttgaacctaacaatggttgtgatggtcaacagcaccgacccccatggtttaccaaataccagcaccaaaaaactgctggacaacataaagaaccccatgtacaactggtcccccgacatacagggaattatcttaagcagcacgtcctatggcgtgattataattcaggtacctgtgggatatttcagtggcatatacagcaccaagaaaatgatcggcttcgcattgtgcctctctagcgtgctgagtctgctgatccctcccgcagccggaattggagtggcctgggtggtagtgtgcagggccgtacagggtgctgcccagggaattgtcgctaccgcccaattcgagatctacgtgaaatgggcaccccccctggagaggggtagactcacttccatgtcgacaagcggcttcctcctgggcccttttattgtgctgctcgtaacgggagtgatctgtgaaagcctagggtggcccatggtgttctatatctttggtgcttgtggttgcgcagtgtgcctgctctggttcgttctcttttatgatgatcctaaagatcacccatgtatttctatcagcgagaaagaatatatcacttcctctctggttcaacagaatggattccttagcagtctcccctacctgttcgcttggatatgtggcaatttagctgggcagctctccgactttttcctgactcgcaatattttgagcgtgattgcagtcaggaagttgttcacagccgccggctttctactgcctgcaatcttcggggtttgtctgccatatctaagtagcacattttactcaatcgtcattttcctgatcctggccggagccaccgggtctttctgtctgggaggggtgtttattaatgggctggacatcgcccctcggtattttggtttcatcaaggcctgcagtactctgacaggtatgatagggggcctcatagcctccaccctcacaggtctgatcctcaaacaggaccctgagtcagcgtggtttaaaacattcattctcatggctgccattaatgtgacggggctgatcttttacttgatcgttgctaccgccgagatacaggactgggccaaggagaagcagcatacccgcctctag

SEQ ID NO: 134866 - DNA, 1404 bp, synthetic construct
  misc_feature 1..1404: note = Description of Artificial Sequence: Synthetic coding sequence
  source 1..1404: mol_type = other DNA
atgcagatggacaataggctgccaccgaagaaggtacccggcttttgctcttttcgctatgggctgagtttcctcgtgcattgctgcaacgtcattatcaccgctcagcgggcctgtctcaacctcacgatggtggtcatggtaaactctacagatccgcatgggcttcccaatacaagcaccaaaaaactgctcgacaatatcaaaaacccgatgtataattggtcacctgacatccagggcatcatcctcagttctacgagctacggggtgatcatcattcaggtgcccgtagggtatttttccgggatctatagcaccaaaaagatgattggcttcgctctgtgtctgtcctctgtactgtccctgctaataccaccagcggccggtattggtgttgcttgggtggtggtttgccgcgcagtgcagggagccgcgcaaggcatcgtcgctactgcccagttcgagatctacgttaaatgggccccccctctagagagaggccgacttaccagcatgtctacaagcgggttcctcctgggaccattcattgtgttactcgtgaccggggtgatatgcgagagccttggttggcccatggtgttctacatcttcggagcttgcggttgcgctgtgtgcctactgtggttcgtgctcttttacgatgatccgaaggaccatccttgcattagtatctctgagaaggaatatatcacttcctctctggttcagcaggtgtcatctagtcggcagtccctgcccattaaggccatactaaaatccctccccgtttgggcaatcagtacgggatcctttaccttcttctggtctcacaacattatgactctatatacccctatgtttataaactccatgctgcatgtgaatattaaggaaaacgggttcctgtcctcgcttccttatctcttcgcctggatatgcggcaacctcgctggacagctgtccgactttttcctgacccggaatatcctgtcggtaatagcagtgcgcaagctattcaccgcagccggatttcttcttccagctattttcggcgtttgtttgccatatctcagctcgacgttctacagcatagtgattttccttatcctggcaggcgctaccgggtccttttgccttggcggggtttttatcaacgggttggatatcgcacctcgctattttggtttcattaaagcttgctcaacactcaccggaatgataggtgggcttattgcaagcactctgacagggcttatactgaagcaggacccagagagtgcctggttcaaaacattcattttaatggcggctattaatgtcactgggttgatcttttacctgattgtggccaccgctgagattcaggactgggcgaaggaaaagcagcatacccgactgtag

SEQ ID NO: 134867 - DNA, 1320 bp, synthetic construct
  misc_feature 1..1320: note = Description of Artificial Sequence: Synthetic coding sequence
  source 1..1320: mol_type = other DNA
atggatggcaagcctgccacaaggaaaggcccagacttttgctcactgcgctatggcctggcccttatcatgcacttctcaaactttacgatgatcacacagcgagtgagcctgagcatcgccatcatcgccatggtgaatactacccagcagcaaggcttatcgaacgccagcaccgagggacccgtggcagatgccttcaacaacagtagcatatcaatcaaggaattcgacacaaaggccagcgtataccaatggtcgcccgaaacccaggggattatcttttcgtctataaactacggaatcattctgactctgattccctcaggatacttggccggaatttttggtgcgaaaaagatgctgggagccggactcctaatttctagccttctgaccctcttcacgccacttgcggcagactttggggtcatactggtgatcatggtgaggactgttcagggtatggcccagggaatggcctggactggacagtttaccatctgggccaaatgggcccctccactagagcggtcgaagctgacaacaatagcgggtagcggtagcgctttcggcagcttcatcattctgtgcgtcggagggttgatctctcaggcattatcctggcccttcattttctacatattcggctctaccggttgtgtgtgttgtctgctctggttcactgtgatatatgacgacccaatgcaccatccctgtatctccgttcgagagaaagaacacatactgagctctctagcacaacagccaagctccccgggtcgcgccgtacccattaaggctatggtaacctgcctgcccttgtgggccatatttttaggttttttcagccatttctggctgtgcactattatcctgacctatctgcccacctacatctctaccctcctgcatgtcaacatccgggactccggtgtgctctcttctctgcccttcatcgcagccgcctcctgcaccatcctggggggacagcttgcagatttcctactgtcaaggaacctcctccgcctcattaccgtaaggaagctgtttagtagcctggggctccttctgccatccatttgcgctgtggctctgcctttcgtggccagcagctatgtaattactatcattttgctcatcctgatccctgggacttcaaatctctgcgactctggcttcatcattaacactttggatatagctccaagatacgcttcattcctgatgggtatctctagaggttttggcctgatcgctggcatcattagcagtactgcaactggatttttaattagtcaggttggcccggtctattag

SEQ ID NO: 134868 - DNA, 1311 bp, synthetic construct
  misc_feature 1..1311: note = Description of Artificial Sequence: Synthetic coding sequence
  source 1..1311: mol_type = other DNA
atggacggcaaacctgcaactcggaaaggccctgacttttgtagcttgcggtatgggctcgcactaataatgcacttctcgaatttcaccatgatcacccaaagagtctccttgtccatcgccattatcgccatggtgaacactacccagcagcagggcttaagcaacgctagcaccgaaggtccagtggccgatgcatttaacaacagcagcatttcaatcaaggagtttgacacgaaggccagcgtctaccagtggagccccgaaacacagggtatcattttcagctcaatcaactacgggattatcttgactctgatcccaagcggctatcttgcgggaatatttggcgccaaaaaaatgctcggggctggcttgctcattagttcccttctcacactcttcacaccacttgctgccgattttggggttatcctggttatcatggtgagaacagtgcaggggatggcacagggaatggcctggactgggcaattcacaatttgggctaagtgggctccacccctggagaggtctaaattaactaccatcgctggtagcggatccgcattcggcagctttatcattttatgcgttggcggtctgatttcccaggcactctcctggcccttcatcttttatatttttggtagcacagggtgcgtttgctgtctcctctggtttacagtgatatacgatgatccaatgcatcacccatgcatctctgtgagggagaaggaacacattctgtcaagtctggcccagcagccttcctcccccggtcgcgcagtgcctatcaaggcgatggtgacatgcctgccactgtgggccatttttctggggttcttcagtcatttctggctgtgcacaataatcctcacttacctgcctacctatattagcactcttttacacgtcaacattcgcgattccggcgtcctcagcagccttccattcattgccgccgctagttgtaccatcctgggtgggcagctcgctgattttttgttgagccggaaccttcttcggctcataacggtccgaaagctcttctcctccctggatatgcaggtttccagctgggaatcacagggcgatctcggaagcagccaggaatcttcgctgcccttacctctggacagctcctcagttagaattctcagcttggttggaggcatgagcttttcctgtctcctccagagcacatgcttggcttggtcctttacaagcaggctcgataagcagaattttaagaccggacccaaacgaggccccctgcctgcatcagaggacatcaaactgcaaacctag

SEQ ID NO: 134869 - DNA, 1437 bp, synthetic construct
  misc_feature 1..1437: note = Description of Artificial Sequence: Synthetic coding sequence
  source 1..1437: mol_type = other DNA
atggacggcaaaccggccactcgtaagggccccgatttctgctccctgcgctacgggcttgcactgattatgcacttctctaattttaccatgatcactcagcgtgtatccctgagcattgccattatcgctatggttaatacaacacagcagcaaggtctctccaatgcttccacagaggggccagtcgctgacgcctttaacaattcctctatttctatcaaagagttcgatacaaaggcttctgtgtatcagtggtctccagaaacacaagggatcattttcagctccatcaactatggaatcatcctgacgctaatccccagcggatacctggctgggatttttggcgctaaaaagatgctgggagccgggctcctgatctccagcttattgacactctttaccccgctggcagcggacttcggggttatactggtaatcatggttcggacggtgcagggaatggcccagggcatggcctggaccggccagttcactatttgggccaagtgggccccccctttggaaaggagtaagctgactactatcgccggaagcggctcagcttttggctctttcatcatactgtgcgttggggggctcattagccaagcactgagttggccgttcattttctatatctttggctccactggatgtgtctgttgtttgctctggtttacagtgatatacgacgatcctatgcatcatccttgcatttctgtcagggagaaagagcacattctcagctccttggcccagcaaccgtcaagtcctgggagggccgtcccgattaaagcgatggtgacttgtttgcccctttgggctatcttccttggattcttttctcatttttggctttgcaccatcatactaacctaccttcccacgtacattagcaccttgttacatgtgaacattcgggattcaggcgttctctctagccttcctttcatcgctgctgcttcgtgtaccatccttggaggacagctggccgatttcctcctcagtcgcaacttactgcggctgataacagtgcgcaagctatttagcagtctgggactgttactgccttcaatctgtgctgtggcccttccgtttgtggccagctcctacgtcattacaattattctgttgatcctaatacctggtacttcaaacctttgtgatagcggcttcattattaacaccctggatatcgcaccaagatatgcatcatttctcatggggatctcgaggggctttggactgatcgctgggattataagcagcacagccacaggcttcctgattagtcaagactttgaaagtgggtggcgaaacgtcttttttctgtcggcagcggtgaacatgtttggactggtgttttatttgaccttcggtcaggccgaactgcaggattgggcaaaagagaggaccctcacccgtctctag

SEQ ID NO: 134870 - DNA, 1263 bp, synthetic construct
  misc_feature 1..1263: note = Description of Artificial Sequence: Synthetic coding sequence
  source 1..1263: mol_type = other DNA
atggccactaaaaccgagctatctcccaccgctagagagtctaaaaatgcccaagatatgcaggttgatgaaactttaattcctaggaaagtcccatccctctgctcagccaggtatggcatcgccctcgtcttgcatttttgcaactttactaccatcgctcaaaatgttattatgaatattaccatggtcgcaatggtaaattcgactagtccgcaaagtcagttaaatgactccagtgaggttctgcccgtagactccttcggcggcttgtctaaagcccctaagagcctacctgccaaatcttctatcctgggtggacaatttgcaatctgggaaaagtgggggcccccccaggaaaggagtcgcctctgttccattgctctttcaggcatgctacttggctgtttcaccgcaattctcatcgggggtttcatctctgagactcttgggtggcctttcgtattctacatatttggcggagtgggatgtgtttgctgtctgctgtggttcgtggtgatttacgacgaccctgtgagctacccgtggatctccacttcagaaaaagagtatattatcagtagcctgaagcaacaggtcggatctagcaagcagccgctgcctatcaaagcaatgcttaggtccttgcctatctggtcaatatgtctcggctgctttagccatcagtggttggtgtcaactatggttgtgtacatccccacatacatctcaagtgtgtaccatgtcaatatcagagacaacggattacttagtgccttaccgttcatcgtcgcatgggtgataggcatggttgggggttacctcgccgattttctcttgactaaaaagtttcgtttaattaccgttagaaaaattgctaccatcttgggcagtttaccatccagcgcccttattgtttcccttccctacttgaactcaggttatattactgccacagctctgcttactctgagctgcggtttgagcacattatgtcagagtggaatatacattaatgtgctagatatcgcaccaaggtactcctcgtttttaatgggagcctctcgcggctttagctctatcgctccagttatcgttccaaccgtatcaggattcctcctgagccaggaccccgagttcggctggcgcaacgtgtttttcttactgtttgcggtgaatttgctcggactcctattttatcttatttttggggaagctgacgtgcaggaatgggccaaggaaaggaagctgaccaggctttag

SEQ ID NO: 134871 - DNA, 1263 bp, synthetic construct
  misc_feature 1..1263: note = Description of Artificial Sequence: Synthetic coding sequence
  source 1..1263: mol_type = other DNA
atggctacaaagactgagctttcaccaactgctcgtgagtccaagaacgcgcaagacatgcaggtggatgagaccctgattccgcgaaaagtcccatcactttgctccgcccgctacggcattgctctggtcttgcacttctgtaacttcactacaatagcccagaatgttattatgaatattacaatggtggcgatggtcaactctactagcccccagtctcagttaaatgactcaagtgaagttttacctgttgactcttttggaggactttctaaggccccgaaatctctgcccgctaaatcctcaatattggggggccagttcgcaatttgggagaagtggggcccaccccaggagagatctaggctgtgtagcattgccctgtccggtatgctgttaggatgtttcacagctatcctgattggaggtttcatctccgagacactgggctggccttttgtattttacatttttggcggagtcggctgtgtctgctgcttgctgtggttcgtcgttatttatgatgacccagtcagttacccttggatctccacctccgaaaaggaatatataatctccagcttgaagcagcaggttggttcatccaagcagccacttcccataaaggctatgctgcgcagtctgccaatctggagcatctgcctgggctgttttagccatcaatggctcgtgtctacaatggtggtgtatatccccacatacattagctctgtgtaccatgtgaacattagagacaatggtctgctgtctgcgttgccatttattgttgcctgggtcataggaatggtcggagggtacttagctgacttcctgctgaccaagaaattccgcctgataactgtccggaagattgccactattctggggtctctccccagtagtgccctgatagtcagcctaccctacctgaattccggctatatcactgctacagcccttctcacactctcatgtggactctcaaccctatgtcagagcggtatctacattaatgtactcgacatagccccccgatacagcagcttcctcatgggagcctctcgcggattctccagtattgctccagtcattgtgcctaccgtctccgggtttctattgtcgcaggatccagagtttggttggcggaacgtgttcttcctcctttttgccgtgaatctactcggattgctgttttatctcatctttggtgaagcagacgtccaggagtgggccaaagagaggaaattaacccgcctttag

SEQ ID NO: 134872 - DNA, 1497 bp, synthetic construct
  misc_feature 1..1497: note = Description of Artificial Sequence: Synthetic coding sequence
  source 1..1497: mol_type = other DNA
atggctactaagaccgaactgtcgccgaccgctagggagagcaaaaatgcccaggacatgcaggtggacgaaaccctcatccccagaaaagtacctagtctttgttctgcccggtacggcatcgccctcgttttgcacttttgtaacttcactaccatcgctcagaacgtaattatgaacatcacaatggtggcaatggtgaactctacgagtccacagtcacaactcaatgattcttctgaggtccttccagtggattctttcggaggtctgagcaaggcacccaaatccctgccagctaaagccccggtctatgattggtctccacagatccagggcattatattcggcgctgtaggttatggggggatcctcaccatggcaccaagcggttatcttgctggcagggtgggtactaagagggtcgtcggcattagtctgtttgccaccagcttccttaccctctgcattccgcttgccacggattttggcatcgtcttgctgatagtgacgcggattgtgcaaggcctctctcagtcctctatactaggcggtcaattcgccatatgggaaaaatggggccccccacaggagcggtcccgtctatgctccatcgctctgtctgggatgttactagggtgttttacggctattctgattggtggattcatctctgagactctgggctggcccttcgttttctatatcttcgggggtgtgggctgtgtgtgttgtctgctgtggttcgttgtaatctacgacgacccagtgagctatccctggatcagtacttcggagaaggagtatatcattagttctttgaagcagcaggtgggatctagcaagcagccactgcctatcaaagcaatgttgcgctctcttccaatctggtccatctgtttaggctgtttctcacaccagtggctcgtgagcacaatggtggtgtatatacctacttacatctcaagtgtgtatcacgtaaacattagggataatggcttgctaagcgctctcccatttatcgtggcgtgggtaatcggcatggttggcgggtacctggccgacttccttctgaccaagaagttccgccttattacagtccggaagatcgctactatcttgggctctcttccctcttccgccttgatcgtgtctttaccctatctaaacagtggatatatcacagcgaccgcgttactcacactgtcctgcggcctctctactctctgccagtctggtatctatattaacgtgctggacattgcgcccaggtactcttctttcttgatgggcgcttctcgcggcttctcgtctatcgcccctgtgatcgtgcctaccgtgtcaggtttcttactgtcccaggatcctgagttcgggtggagaaacgttttttttcttctcttcgccgtgaatctgcttggcctccttttttatctgatcttcggcgaggcggacgtgcaggaatgggcaaaagaacgaaagctaacccggctctag

SEQ ID NO: 134873 - DNA, 300 bp, synthetic construct
  misc_feature 1..300: note = Description of Artificial Sequence: Synthetic coding sequence
  source 1..300: mol_type = other DNA
tgaactttgtcttgcggattaagcacactctgtcagagcggtatctacatcaatgtgctggacattgcccctaggtatagcagtttcctgatgggtgcctcaagagggttctccagcatcgcgcccgtcattgtacctactgtttccgggttcctgctatctcaggaccctgaatttggatggagaaatgtttttttcttactgttcgctgtgaacctgctcgggctgctgttctacctgatcttcggcgaggctgacgtgcaagagtgggccaaggagcgaaaattgacaaggctatag

SEQ ID NO: 134874 - DNA, 156 bp, synthetic construct
  misc_feature 1..156: note = Description of Artificial Sequence: Synthetic coding sequence
  source 1..156: mol_type = other DNA
tctggattcctactctctcaagatccagaattcggctggaggaacgtcttctttttgcttttcgcagtgaatctgctgggactcctgttctacttaattttcggtgaagctgacgtccaagagtgggccaaagaacggaagcttacaaggctctag

SEQ ID NO: 134875 - DNA, 1494 bp, synthetic construct
  misc_feature 1..1494: note = Description of Artificial Sequence: Synthetic coding sequence
  source 1..1494: mol_type = other DNA
atgtcaaccgggcccgatgtgaaagcaaccgtgggcgatattagcagtgatggtaacctgaacgtggctcaagaggaatgtagcagaaaaggattttgctcggtccgacacgggttggctttgattttacaactgtgcaacttttccatctacacacagcagatgaacttaagtatcgcgatcccagccatggttaacaacacagctcctccctctcagccgaacgcgtccacagagcgccctagcaccgattcccagggctattggaacgaaaccctgaaagaatttaaggcaatggcccccgcttacgactggtcccccgaaatacagggaataattctcagctcactcaactacggctcctttctggcccctatcccgagcggctatgttgctggaattttcggagctaagtatgtggtgggggctgggctgttcatcagttcttttttaactctgttcatcccacttgccgccaatgccggcgtggctcttctgattgtcctgagaatagtgcagggcatcgcacaggtgatggttctcactggccagtatagtatctgggtgaagtgggcccctccactggagaggtcccagctgacaaccatagctgggagcggcagtatgctcggctcttttatagtgctacttgctgggggactgctgtgccaaactatcggatggccctacgtgttttacatatttggcggaattggttgtgcctgttgccctctgtggtttcccctcatctacgacgatcccgtgaatcatccttttatctcagccggcgagaagcgatacatagtgtgtagtttagcccaacaagattgcagccctggatggagcctgcccatacgcgccatgattaagagtttgcccctgtgggccattctggtcagctacttctgtgaatactggctgttctacaccattatggcgtatacccccacctacatttcaagcgtactccaggctaacctgagagatagcggcatcctcagcgcccttccctttgtcgtaggctgtatttgcattatactgggaggcctgcttgcagattttctgttgagtcgtaagattcttcggcttattacgattcgcaagctctttactgccatcggcgtgctgtttccttcagtcattctggtgagcctgccatgggtgcggtccagtcacagcatgacaatgacatttctcgtactgagcagtgcgatttcatcattctgcgaatccggtgctctcgtgaacttcctggacatagccccaaggtatacaggcttcctgaagggcttgctgcaagttttcgcacacattgccggcgccatcagtcccactgccgccggattcttcatctcacaagacagcgagtttggttggcgcaatgtgtttctgcttagtgcagctgtgaacatttccggtctggtcttttacctgatttttggtcgggcggacgtccaggactgggctaaggagcagactttcacgcacttgtag

SEQ ID NO: 134876 - DNA, 666 bp, synthetic construct
  misc_feature 1..666: note = Description of Artificial Sequence: Synthetic coding sequence
  source 1..666: mol_type = other DNA
atgaatctctctattgctatacctgcgatggttaataacaccgctcctccgagccagccgaacgcctctaccgagaggcctagtacagacagtcaggggtattggaacgagacgcttaaggaattcaaagctatggactgctccccaggctggtcactgcctatccgcgccatgatcaaaagcttgcccctgtgggcaatcctggtgagctacttctgcgagtattggcttttctacacaataatggcctatacgcctacttacatttcatctgttctgcaagctaacctccgcgattccgggattctgtccgcacttcccttcgtcgtcggttgtatttgtattatcttggggggtctgctggccgactttctgttgtcacgtaagatactcaggctgattacaattagaaagctgtttaccgcgatcgggaagggagagaccggacaccgaggagaacgagggaagctgagagcagccttcagcctcttgtgcgtatgtccaccaacccctggtgtgctgtttcctagcgttattctggtatctttgccttgggtacgttctagccatagcatgacaatgacatttctcgtgctcagctcagccatttcctctttttgcgaatctggggccctcgtgaactttcttgatattgctccacgctag

SEQ ID NO: 134877 - DNA, 804 bp, synthetic construct
  misc_feature 1..804: note = Description of Artificial Sequence: Synthetic coding sequence
  source 1..804: mol_type = other DNA
atgtccaccgggcccgacgtgaaggcaaccgtaggcgacatcagttcagacggcaacctgaatgttgctcaggaggaatgcagtcgcaagggcttctgcagtgttcggcacgggttagcccttatattacaactgtgtaacttttccatatacacccagcaaatgaatctgtcgatcgccattcccgcaatggttaacaacaccgcaccaccttcccagcccaacgcttcaaccgaaaggccatctacagactcgcagggttactggaatgagacactgaaagaattcaaggcaatgtccggtattctgagcgctctgcctttcgttgttgggtgtatttgtattatcttgggtggattgctggcagattttctgctgagtcgcaaaatactccgcctgattactattcggaagctcttcacagcaatcggcgttctctttccatccgttattctggtgagtctgccctgggttcggagcagccattctatgacaatgaccttccttgtgctatcaagcgcgataagttctttctgcgaaagtggcgccctcgtgaactttctggacattgcaccccgctacactggttttttgaagggactgctgcaggtcttcgcccacattgctggcgcaatttccccgactgcagccggcttttttatctcacaggatagcgagttcggctggcgaaacgtgtttctgttaagcgctgccgtgaatatcagcggcctggttttttaccttatcttcggtcgcgccgacgtacaagattgggccaaagagcagacttttacccatttatag

SEQ ID NO: 134878 - DNA, 1749 bp, synthetic construct
  misc_feature 1..1749: note = Description of Artificial Sequence: Synthetic coding sequence
  source 1..1749: mol_type = other DNA
atggagtcagtgaagcagcggattctcgcccctggcaaggagggcctaaagaacttcgctggaaagtcgttgggccagatttatcgggtgttggaaaagaagcaggatactggggaaactatcgagcttacagaagatggaaaaccgctggaagtgccagagcgaaaagctccgctgtgtgactgtacctgctttggcctgccccgacggtacatcattgcaataatgtctgggcttggcttttgtatttcatttgggatccggtgcaacctgggggtagctatcgtggatatggtcaacaattcaacaatccaccgcggcggaaaagtgataaaggaaaaagccaagttcaactgggacccagaaactgtcggcatgatccacggcagcttcttctggggctatataatcacacagatacccggaggctatatcgcctcacgactggcagctaacagggtgtttggcgccgcaatcctacttacgtccacactgaatatgcttattccttctgcagctcgggtgcactacggctgcgtgatatttgtgcgtatcctgcagggcctggtggaaggtgtgacctaccctgcctgccacgggatatggtcaaagtgggcacctccactggagcggtctcgactggcaaccacctctttttgtggcagctacgcaggtgcggtcattgccatgcccctcgccggaatactcgtgcagtacaccggatggagctctgttttctatgtgtacggctcctttggcatggtttggtacatgttctggttgctggtgagctacgaatctcctgcaaaacatccgactattacagacgaagagcggcggtacattgaggaaagcattggagaatcagccaatttactcggcgccatggaaaaatttaaaaccccttggcgaaagttctttacaagcatgcccgtgtacgccatcattgtggccaacttctgtcgctcatggactttctatctcctgttaatttcccaacccgcatactttgaagaagtgttcggattcgagatctccaaggtgggcatgttatcagcagtcccccacctggtaatgaccataatcgttccaattggaggccagattgccgatttcttaaggtcgaagcagatcctcagcactaccaccgtgcgcaagatcatgaactgcggcggttttggtatggaggctacactgctgttagtggtgggctacagccatacccgcggcgtggcaatttcattcctggtgctggcagtcggctttagcggctttgcaatttcaggtttcaatgtcaatcatctggacattgccccgcgctatgcctccatcttaatgggtatctcaaatggggttggaaccctgagtggcatggtatgtccaattatcgtgggggcaatgaccaaaaacaagtctagagaagaatggcagtacgtcttccttatcgcagccctcgtgcattatggaggcgtcattttctacgccatttttgctagtggggaaaagcagccttgggcagacccagaggagacctccgaagaaaaatgtggattcatacacgaagacgagttggatgaggagacgggcgacataactcaaaattacatcaactacggtaccactaagagttatggcgccacgacgcaagccaacggaggatggccatctgggtgggaaaagaaagaggagttcgtgcagggcgaggtgcaagactctcatagttacaaggaccgcgtagattactcatag

SEQ ID NO: 134879 - DNA, 1413 bp, synthetic construct
  misc_feature 1..1413: note = Description of Artificial Sequence: Synthetic coding sequence
  source 1..1413: mol_type = other DNA
atgaaggcaaagttcaattgggaccccgagactgtgggcatgatccatggcagctttttctggggctatattatcacacagatcccagggggctatatcgcttcacgactggccgcaaatagggtgttcggggccgctatccttctcacaagcaccctcaacatgctgattcctagcgcagcaagagtgcactacgggtgcgtgatcttcgtgcgcatactgcagggactggtggagggtgtgacgtacccagcatgccacggcatctggtccaagtgggctccccctctggaacgcagccgcctggcaactacctcattttgcgggtcctacgccggagcagttatagcaatgccactggctggaatcctggtgcagtacaccggctggtcttcagtgttttacgtgtacggatccttcgggatggtgtggtacatgttttggcttttggtgtcctacgagagccccgccaagcatcccacaatcactgacgaggaaaggagatacatcgaggaatccataggcgaatcggcaaatcttttgggagctatggagaagttcaaaaccccttggcgcaagttttttacttccatgcccgtgtatgccatcattgtggccaacttttgtcgatcgtggaccttctacctgctgttaatatcccagccagcgtattttgaggaggtctttgggttcgagattagtaaagttggtatgttgtctgctgtaccccacctggttatgacaattatcgtcccaattgggggccagattgccgactttttacggtcaaagcagatcctgagtactactacggtcaggaagatcatgaactgtggaggatttggcatggaggcgactttgctgctggtcgtcgggtactcccatacacgaggggtggctatttccttcctagtacttgctgtggggttctcaggcttcgccataagcggatttaatgtgaaccatcttgatattgctccacgatatgcaagcatacttatggggattagcaacggcgtcgggactctttccggcatggtgtgcccaattatagtcggagccatgacaaagaacaaatcacgggaggaatggcagtatgtatttttaatcgccgcccttgtacactatgggggcgtgatcttctacgcgatttttgcatcaggcgagaagcaaccgtgggccgatcctgaagaaacctccgaggaaaaatgcgggttcatacatgaagatgaactggatgaggagacgggcgacataacccagaattacatcaattatgggactacaaaaagttatggcgcgaccactcaggcaaacggcggctggccatccgggtgggaaaaaaaagaggaatttgtgcagggcgaagtacaggattcccatagttataaagatcgcgtagattactcctag

SEQ ID NO: 134880 - DNA, 5223 bp, synthetic construct
  misc_feature 1..5223: note = Description of Artificial Sequence: Synthetic coding sequence
  source 1..5223: mol_type = other DNA
atgggagagaagctggagctgcgcttgaaaagtccggtaggggctgaacccgctgtttatccatggcccctgcctgtgtacgacaaacatcatgacgctgcacacgagattatcgagacaatacgatgggtgtgtgaggagatacccgacctgaagctggccatggagaattacgttctgattgactacgacacgaagtcattcgagtccatgcagcggttgtgtgacaagtataatcgcgccatcgattctatacatcagttatggaaaggtacaacacaaccaatgaagttaaacactagaccatctactggactgctgcgccacatcctccagcaggtctacaatcactccgtgacagaccctgagaagttgaataattacgagccattctccccagaggtatatggggagacttcatttgatcttgtggcacagatgattgatgaaatcaagatgacagacgatgacttatttgtggacctgggttctggcgtcgggcaggtggttcttcaggtcgcggctgccaccaactgcaagcatcattatggagtcgaaaaggcagacattcctgctaaatatgccgagaccatggatagagagtttcgtaagtggatgaagtggtatgggaagaagcatgccgagtacacacttgaacgaggagattttcttagcgaagagtggagggagaggatcgccaatacttctgttatctttgtgaacaacttcgccttcggaccagaagtggatcaccaattgaaggagcgtttcgccaatatgaaggaaggtggaagaatcgtctcttccaagccgtttgcacctctgaattttagaatcaacagccgcaatttaagcgacataggcactatcatgcgggtagtggaactgtctcctctcaagggctcagtatcatggaccggcaagccagtgtcatattatttgcacactattgaccgtactattctagagaattatttttctagcttgaaaaaccccaagcttcgggaagaacaggaggctgccagaaggcgtcaacaaagagaatctaagtccaacgccgctacccctaccaaaggtcccgagggcaaagtagccggacccgcagacgctcctatggattcaggagccgaagaagaaaaagctggcgccgcgactgtgaaaaaaccttcaccctctaaagcccgcaagaagaagctgaacaagaaagggcgaaagatggcgggccgtaagcgagggcggccaaagaaaatgaacaccgcaaacccagagcgcaagcccaaaaagaaccagacagctctggacgcattgcacgcccaaaccgttagtcaaacagcggcgtccagccctcaggacgcttaccgaagcccccacagtcctttctaccaactgccaccaagcgttcagcgccacagcccgaatccgctgttggtcgcccctacacccccggcattgcagaaactgcttgagtccttcaaaatccagtatctgcagttcctggcatacacaaagacacctcaatataaagcgagtctccaggaactcttagggcaggagaaagagaaaaatgcacaactgttgggagctgcccaacaactcctaagccactgtcaagcccagaaggaggaaatccgccggctgtttcaacagaagctggacgagctgggcgtgaaagcattgacctacaatgacctcatccaggcccaaaaagaaatcagcgcacacaatcagcaactgcgagagcagtctgagcagcttgagcaagacaatcgcgcattacgtggtcagagcctgcagctgcttaaggcacggtgtgaggagttgcagctggattgggcaactctgagcctggaaaagctgcttaaggaaaagcaggccctgaaatcccaaatcagtgagaagcagcgacactgcctggagcttcagatctccatcgtggaactggagaaatcccagagacagcaggaactgctgcagcttaagagttgtgtgcctccggacgatgcactgtcactgcaccttcgggggaagggcgcactgggacgagaactggagccagacgccagcagattgcacctcgaactggactgcacaaaattcagtctccctcatctcagcagcatgagtcctgagctgagcatgaatggacaggcagccgggtacgagctgtgcggggtcctgtcacgaccgtcatccaaacagaatacccctcagtatttggcctccccactcgatcaggaggttgtgccgtgcactccctcccacgtggggcgcccccgattagagaaacttagtggcctggctgctcccgattacacccgattatctcccgcgaagatcgtcctgcgtcgccaccttagccaggaccacactgtgccaggccgaccagcggccagtgaactccacagccgcgcagaacacactaaggaaaacggcctcccataccagagcccaagcgtgcctgggagcatgaaattgtctccccaggaccctcgtcctctgtcccctggagcacttcaattggccggggagaagagcagtgagaaaggactgagagagagggcatacggaagcagcggcgagctcatcacatccctacctatctccatcccgctaagtactgtgcagcccaataagttgcccgtcagcattcctctggcatctgtcgtcttaccgtcgcgcgctgagcgggctcgaagcactccatctccagtgctgcaaccacgtgacccttcctcaactttagaaaagcagattggcgcgaacgctcacggagccggaagcaggagcctggcactggcccctgcaggtttttcctatgcgggttccgtggcgatttccggggctctcgccggttcaccagccagcctgacaccaggcgcagagcccgctaccctcgatgagagctcctcttcagggtctctcttcgcaacggttgggtccaggtcatccacaccccagcacccattactcctggctcagccacgaaactccctaccagcctcacctgcccaccagctgagcagcagcccgagattaggcggggctgctcagggaccgctgcccgaggcatccaagggagatctcccaagcgatagtgggttctccgatcctgagagcgaggctaagaggagaattgtgtttactatcaccaccggcgcgggatctgcgaaacagtctccctccagtaagcactctccgcttactgcctccgcccgcggagactgtgtgcccagtcatggtcaggatagtagacgcaggggcaggagaaagagagcctctgccgggaccccctccctgtccgctggcgtgagtccaaagcgccgggcccttccttccgttgctggtttgtttactcaacccagcggatctccattaaatcttaactcaatggtgtccaacattaaccagccgctggaaatcacagctatttccagtcctgagacctcattaaaatcctcaccagtgccttaccaggaccacgaccaaccccccgtgctgaagaaggaacgccccctgtcacagacgaacggcgctcactattcaccactgaccagtgacgaggagcccgggtccgaggacgaaccctcaagtgcgagaatagaaaggaaaatcgccactattagtcttgaatccaaatcacctccgaaaaccctggaaaacggcggaggcctggcaggccgaaaaccggcacccgctggggagcctgttaattcctcaaaatggaagagcacattttcacccatttctgacatagggctggcgaagagtgccgattcacctctccaggcgtccagtgccctttcacaaaacagcctcttcacttttagaccagctttagaggaaccgtccgccgatgccaaacttgccgctcaccctagaaaggggttcccagggagcttatcgggagccgacgggctctcaccaggcactaatcctgctaacggatgtacctttggaggaggcttggccgcagacttgtcgctacactccttctccgacggagccagcctgccccataagggacctgaggccgccggcctgagctctcccctgtcgtttccgagccagcgtggaaaggaaggctctgacgcaaacccgttcctgagtaagcggcagttggacggtctggctgggctcaaaggagagggcagcagagggaaggaagccggggagggaggactgcccctgtgtgggcctacagataaaacaccactcctgagtgggaaagccgccaaagcaagagacagagaggtcgatctgaaaaatgggcacaacctcttcattagcgcagccgcggtgcctcccggttctctgctctcaggccccggactcgcccctgccgcctccagcgccggcggcgctgcaagctccgcccagacacatcgcagtttcctcggcccgttccctccaggtcctcagttcgcgctcgggcccatgtcactgcaagctaacctggggtccgtggctggctcatctgtgctccagagccttttcagctccgttccagccgcagctggtttggtgcacgtgagtagtgcggcaacccggctcaccaattctcatgccatggggagtttcagtggggttgcaggtggcaccgtcggggctggtggcgtgtttaaccacgccgtcccatccgccagcgcccatccttttggagcgagggtgggtcgaggcgccgcgtgtgggagcgctaccctggggccaagtcctctgcaggctgcagccagcgcttccgccagctcgttccaagctcccgcctctgtggagacgcgtcccccgcccccaccccccccccccccacctcctctgccaccgccggcacacctcggtcggtcccctgccggcccgccagttctgcacgcaccaccgccacccaacgcggctctgccacctccaccgactctgctggcatccaacccagaaccagctttgctgcagagtctggcctcactcccaccaaaccaagctttcttgccccccacatccgctgcctcactgcctccggccaacgcgtcactgtccatcaagctgacctccctgcctcacaagggggcccgcccgtcatttacagtccatcaccaaccactcccacgtctggctctggctcaggcagcccccggaattccgcaggcgtcagcgaccggaccctccgccgtatgggtctcattagggatgcctccaccttatgctgcacatcttagcggcgtgaagcctcggtag

SEQ ID NO: 134881 - DNA, 1647 bp, synthetic construct
  misc_feature 1..1647: note = Description of Artificial Sequence: Synthetic coding sequence
  source 1..1647: mol_type = other DNA
atgggttctcagctggcacttgccggacttctagaaaaaaggcaggagggggccgagactttggagctgtcagccgacggaaggccagtaacaactcagacccgggacccccctgtcgtggattgtacctgctttgggctgccccggcgctacatcatcgcaataatgagtggtcttggtttctgcataagcttcggaatccgctgtaacctgggggtcgccattgttagcatggtcaacaactctacaacccatagaggagggcacgtcgttgttcaaaaagcacagttctcatgggaccccgagaccgtaggactgatccatgggagcttcttttggggttacattgtgacacagattcccgggggatttatctgccagaagtttgccgccaatcgggttttcgggtttgccatcgtggctacctcaacacttaatatgttgattccttccgccgcacgcgttcactacgggtgtgttatctttgtgagaatcctccaaggactagtcgagggagtgacctacccagcttgtcatggtatttggtcaaagtgggcccctcccctggaaaggtctagacttgcgactaccgccttttgtggatcctatgccggagctgtggtggctatgcccctcgctggagtcttagtccagtatagcgggtggagctcagtgttctacgtttacgggtccttcggcatcttctggtacctcttttggctgctggtgtcatatgagtcccctgcgctgcacccaagcatcagtgaggaggagcgcaagtatattgaggatgccataggagagagcgcaaaacttatgaacccattaaccaagttcagcactccctggaggcgtttctttactagtatgcccgtctacgctattatcgtcgctaatttctgtcgaagttggaccttctacctcctccttatcagccagcccgcctattttgaagaagtattcgggttcgagatatcaaaagtggggctggtgagtgcactgccgcacctggtgatgactattattgtgccgatcggtggccaaatcgcagatttcctgcgatcacgacggattatgtccacgactaatgtgcgaaagttgatgaactgcggcggatttggcatggaagcgacgctgcttctggtggtcgggtactcgcattctaagggcgtggccatatcttttctggtgttggctgtgggattcagcggttttgccatctctgggttcaatgtgaatcaccttgatatcgctcccaggtatgcctctattctcatgggcatctcgaacggggtcggcacgctcagcggcatggtgtgccccatcatagtcggggcaatgacaaaacacaagactcgggaagaatggcagtacgtgttcctgatcgcctctttggtacactatgggggcgtcatcttctatggtgtctttgcctcaggagagaaacaaccctgggccgagcctgaagaaatgagtgaagaaaagtgtggcttcgtgggccatgatcagctggcgggctcagatgactcagaaatggaagatgaggcagagccaccaggtgccccgcctgctcctcccccttcttatggagcaactcattctacattccagcccccgcgtccccctccgcccgtaagagattattag

SEQ ID NO: 134882 - DNA, 1770 bp, synthetic construct
  misc_feature 1..1770: note = Description of Artificial Sequence: Synthetic coding sequence
  source 1..1770: mol_type = other DNA
atgccctttaaggccttcgacactttcaaagagaagattctgaaaccaggaaaagagggggtcaagaacgcagtcggggatagcctcggtattctgcagagaaagatcgatggaactacagaagaggaggataatattgagttgaatgaggagggaagacctgtgcagacctctagaccatctcctcccctttgcgactgtcattgttgtggcttgccaaaacgctatattattgctataatgtcaggactgggtttctgtataagtttcgggatacgatgcaacctgggcgttgccatcgttgaaatggtaaacaacagcaccgtgtatgtggacggaaaaccggagattcagactgctcagtttaattgggaccctgagacagtcggtctgattcatggaagcttcttctggggttatatcatgacgcagattccagggggctttatcagcaacaaattcgccgctaatcgcgtgtttggagccgctatctttctgacaagcacactgaacatgttcattccttctgccgcccgagtgcactacggctgcgtgatgtgtgtgaggatcttgcaagggcttgtcgagggggtgacctaccccgcttgtcacggtatgtggtccaagtgggcaccgccactggagcggtctcgcctggcaacaacctcattctgcgggtcttatgccggcgccgtggtggctatgcctctggcgggcgtcttggtgcagtacatcgggtggagctccgtgttctatatatatggcatgttcgggatcatctggtacatgttttggctcctgcaagcttacgagtgtccggcagcacacccaactatttccaacgaggaaaagacgtatatagaaacaagtataggcgagggagccaatgtggtttcgttatccaaatttagtaccccatggaaacgtttttttacatccctccccgtttacgctataattgtcgctaatttctgcagatcctggacattttatctgctcctgatctcacagcccgcctactttgaagaagttttcggttttgctatctccaaggtcggcctactctccgcagtaccccacatggtgatgaccatcgtggttcccatcggcgggcagttggcggattacctgagatcaagacagattcttaccacaacggcggtgaggaagatcatgaactgcggcggcttcggcatggaggccactttattgttggtggtgggctttagccatacaaagggtgtggcaatctcattcctcgtgttggccgtgggcttctctgggtttgctattagcggattcaacgtcaatcacctagatatcgctccacggtacgcctccattctcatgggaatctctaatggcgttggcaccctctcaggaatggtgtgccccttaatagtgggggctatgacccgccataagaccagagaagaatggcaaaatgtttttctcattgccgccctcgtacactattctggtgtgatattctacggagtgtttgccagtggcgagaagcaagagtgggccgatcctgagaatctgagcgaggaaaagtgtggcatcatcgaccaggacgaacttgctgaggagatcgaactaaatcatgagtccttcgccagcccaaagaaaaagatgagttatggagcaacatctcaaaattgcgaggtccagaagaaagaatggaagggacaacgtggggctactctggacgaggaagagctgactagctatcaaaatgaggagcgaaacttttcgactatcagctag

SEQ ID NO: 134883 - DNA, 1620 bp, synthetic construct
  misc_feature 1..1620: note = Description of Artificial Sequence: Synthetic coding sequence
  source 1..1620: mol_type = other DNA
atgccatttaaagctttcgacacattcaaggaaaaaatccttaagcccgggaaggaaggggtgaagaatgccgtcggcgatagcctcgggatattacagaggaagatagacggtacgactgaagaagaggataatatcgagctgaacgaagagggccgcccggtgcagacgtcacggccctcacctcctctgtgtgactgccattgttgcgggctgccgaagcggtacatcattgcgataatgtcaggtctggggttttgcatctcatttggaatacggtgcaatctcggcgtggctatcgtagagatggtgaacaactctaccgtgtacgtcgacgggaaacctgaaattcagactgcacagttcaattgggacccagaaacagtgggccttatccacggcagttttttttgggggtacattatgacacagattccaggcggattcatatctaacaagtttgccgcaaatagagtttttggcgccgcaatctttcttacctcaactctgaacatgttcattccgagtgccgcaagggtccattacggttgcgtaatgtgtgtgcggattctgcagggtctggtcgaaggagttacttatccggcctgtcatggaatgtggtctaaatgggcccctcctctggaaagatctagactggccacaaccagcttttgcgggtcctacgcaggtgcagtggtggcaatgcctctcgcaggagtactggtccagtatattggatggtcaagtgtattttatatctacggtatgtttggaattatctggtatatgttttggctcctgcaggcgtacgagtgtcctgccgcacaccctaccatttctaacgaagagaaaacttatattgaaacgtctatcggagagggcgccaacgttgttagtttaagcgtgggcttactgtccgctgtgccccatatggtcatgactatcgtggtgcctattggcggacagctcgcagactatctgaggagtcgccaaattctcactacaactgcggtcagaaaaattatgaattgcggcggctttggtatggaagccacgcttcttttggtggtcggcttcagccacacgaaaggcgttgctattagcttcctcgttctcgccgtgggctttagcggcttcgctatcagcggctttaacgtgaaccatctggacattgcccctaggtacgcgtcaatcctcatgggtatttccaatggggtgggcacgctcagtgggatggtgtgccccctcatagtgggcgccatgacgaggcacaagacgagggaagagtggcaaaatgtctttttaatagccgcactggttcactactcgggtgtaattttctacggagtcttcgcctccggtgaaaaacaggagtgggctgaccctgagaatctgagtgaagaaaaatgtggcatcattgatcaagacgaattggctgaagagatagaacttaaccacgaaagctttgcttctcccaagaaaaagatgtcctatggtgctacatcccagaactgtgaggttcaaaagaaagagtggaagggccagaggggagcgactctagatgaagaagagttgacaagttatcagaatgaagagcgtaatttctctactatctcctag

SEQ ID NO: 134884 - DNA, 1293 bp, synthetic construct
  misc_feature 1..1293: note = Description of Artificial Sequence: Synthetic coding sequence
  source 1..1293: mol_type = other DNA
atgactctgacaagtcgccgccaggactctcaagaagcaagacccgagtgtcaggcctggacaggaaccttgttgctgggcacttgcctgctttattgtgctaggagttccatgcctatctgtaccgtatccatgagtcaggactttgggtggaataagaaagaggctggtatcgtgttgtcgtctttcttctggggatactgccttactcaggttgtggggggccacctcggcgataggattggaggcgagaaagttatccttttgagcgcttcagcgtggggttccattacggctgtgaccccccttttggctcacctgtcctctgcgcaccttgctttcatgaccttttccagaatcctgatgggcttgttacaaggcgtgtatttccctgccctgacatctttgctgtctcagaaagttcgagagtctgagagagccttcacttacagcatcgttggagccggaagccagttcgggactctacttacaggcgccgtgggcagtctgctactcgagtggtacggctggcagtctatcttttacttttctggagggttgacgctcttgtgggtgtggtacgtgtacagatacttgctctccgagaaagacctgattcttgcgcttggggtattggcccagtcccgtcccgttagccgccataatagggtgccatggcggaggctgttcaggaagccggctgtttgggccgccgttgtttcccagctgtccgcggcatgttccttcttcattctcctaagctggctcccaactttctttgaggaaacattccccgacgccaagggttggatttttaatgtggtgccatggcttgttgcgatcccagctagcctattttctggcttcctttcagaccatctgatcaaccaaggatatcgtgccattaccgtgcggaagctgatgcaaggaatggggttaggcctgagctccgtttttgccttatgcctcggccatacctccagcttttgtgagtccgttgtgtttgcgtccgcatccatcgggctacagaccttcaaccactctggcatctccgtgaatattcaggacctggcgccctcctgcgcaggcttcctgtttggcgtggccaacacggcgggcgccctcgcaggggttgtgggagtgtgcctgggcggctatctgatggagaccaccggaagctggacgtgtcttttcaatctggtcgctatcatctctaatctgggcctatgtaccttcttggtgtttggtcaggcccaaagggtggatctgtccagcacacacgaagatctctag

SEQ ID NO: 134885 - DNA, 1311 bp, synthetic construct
  misc_feature 1..1311: note = Description of Artificial Sequence: Synthetic coding sequence
  source 1..1311: mol_type = other DNA
atgcagccaccacctgacgaagcaaggagggacatggcaggagatacacagtggagtagacctgaatgtcaggcctggacggggaccctcctgcttgggacatgcctgctgtattgtgcccgttcgagcatgcctatttgtacagtgtctatgtcccaggacttcggctggaacaagaaggaagccggaattgtcctaagcagtttcttctggggatactgtcttacacaagttgtgggaggccacctgggcgaccggattggaggggagaaggtaatcctcctgagcgcatccgcatgggggtcaatcacggcagttacacctctcctggcacatttatcaagcgcccacctcgctttcatgacgttttcacgaattcttatgggtctacttcagggcgtttattttcccgccctgacttcgttattatcgcagaaggtcagggaatctgagcgcgctttcacctacagtattgtgggcgcagggtctcaattcggtactctgctaactggtgccgtcggctctctgctgctggagtggtatggctggcagtctattttctatttcagtggaggactgactctgctctgggtctggtacgtgtacaggtatctgctctctgagaaggatttgatcttggctctgggagtactcgcgcagtctagaccagtttcccgccacaaccgggttccgtggcggaggctgtttcgcaagccagccgtttgggctgccgttgtgtcccagctgtcagctgcttgcagtttttttatcctgctcagttggcttcccaccttcttcgaagagacttttccagatgcaaaaggctggattttcaacgtggtcccctggctggtcgcgatcccagcgagtcttttttctggatttttgagcgaccatctgatcaatcagggctaccgggccatcacagtgagaaaactgatgcaaggcatgggactcggccttagttccgtcttcgcactgtgtctaggccatacttctagtttctgtgaatcagtggtgttcgcctccgccagcatcggacttcagacattcaaccactcaggtatctccgtgaatatacaagatctggcgccatcctgcgcgggttttctgttcggtgtggcgaatacggccggggcccttgctggagtggtgggagtgtgcctaggaggataccttatggagactactggttcctggacttgtctcttcaacctcgtggccatcattagcaatcttgggctctgcacctttctcgtttttgggcaagcccagcgggtcgacttgtcaagtacgcatgaggacctatag

SEQ ID NO: 134886 - DNA, 459 bp, synthetic construct
  misc_feature 1..459: note = Description of Artificial Sequence: Synthetic coding sequence
  source 1..459: mol_type = other DNA
atgttcccaaggcctggagctcttagctggacagtgagaaggcatacacctagacaagtcgaaccgccatgtgtctgtatgactctgacctcgagaagacaggactcacaggaggcccgccccgaatgccaggcatggaccgggaccctattgctgggcacatgcctactgtactgcgcacggagttcaatgccaatctgcacagtgagcatgtcgcaggacttcggatggaacaagaaggaggccggaatagtgctgtcttcctttttctggggttactgcttgacccaggtcgtggggggccatctcggcgaccgtatcggcggcgagaaggttattctgttgtccgcgagtgcctgggggagcattaccgcagtaacacctctccttgctcatttgagtagcgcccatttagccttcatgaccttctcccgtatcttaatgggattgttgcagtag

SEQ ID NO: 134887 - DNA, 1599 bp, synthetic construct
  misc_feature 1..1599: note = Description of Artificial Sequence: Synthetic coding sequence
  source 1..1599: mol_type = other DNA
atggaatctgccgaacccgcggggcaagcccgtgcagctgccacaaagctgtcagaggctgttggcgccgccctgcaagaacctagaaggcagagacggttagtgctcgtgattgtttgtgtggctctcttgctcgacaacatgctttacatggtcattgtccccattgttcccgactatatcgctcacatgcgggggggcggcgagggccccacaaggactcccgaggtttgggaacctaccctacccctccctaccccagctaatgcctctgcgtataccgctaacaccagcgcatcaccgacagcagcttggcctgctggctcagcactcagaccccgctatccgacagaaagcgaggacgttaagatcggagtgcttttcgcaagcaaagccatacttcagctgctggtaaaccctttaagtggtccgttcattgatcgcatgagttacgatgtgcccctgcttatcggcctgggcgtgatgttcgccagtactgtgctcttcgccttcgccgaggactacgctacacttttcgctgctcggagcttgcagggcctgggttctgcgttcgccgatacatccgggattgccatgatagcagataagtaccccgaggagcccgaacggtccagagctcttggggtcgcactcgccttcatctcttttggcagcttagtggctcctcccttcggaggaatactgtacgagtttgccggcaagagagtccccttcctggtgctggccgcagtgtcccttttcgacgctctgctcctgctggctgtggccaaaccattctccgccgcagctcgggcacgcgccaacctgcctgtcgggactccaatccataggctgatgctcgacccctacattgccgtcgtcgccggggctctcactacttgtaacatccctctcgcgtttcttgagcctaccatcgcaacttggatgaagcatactatggcggcttcagagtgggagatgggaatggcctggctccctgcatttgtgcctcacgtgttaggtgtgtatctgaccgtgcgcctagcggccaggtacccccacttacaatggctgtacggcgcgttaggactagccgtgatcggtgcctcctcctgcattgtccctgcttgtagatcgttcgcaccactcgtggtctctctctgcggcctgtgcttcggaattgccctcgttgacactgctctgctccctactctggcctttctggtcgatgttagacacgtgtcagtctatggctcagtgtacgcaattgcggacattagctacagcgtagcttatgcgttaggaccaatagtcgctggtcatatcgtgcacagtctgggctttgaacagctatccttagggatggggctcgccaacctgctgtatgcgcccgtgctacttttgttgcgaaatgtgggattgttgacgagatcacggtcggaaagggacgtgctcctggacgagcccccacagggcctctacgacgcagtccggctgcgggagcgacccgtgtccggccaggacggcgagccacggtctcctcccggcccctttgatgcctgtgaagacgactataattactattatacccggtcctag

SEQ ID NO: 134888 - DNA, 1482 bp, synthetic construct
  misc_feature 1..1482: note = Description of Artificial Sequence: Synthetic coding sequence
  source 1..1482: mol_type = other DNA
atgcttagaaccatccttgatgccccccagaggcttctgaaggaaggcagggcctctagacagttggtgttggtggtagtgtttgtggcactgctcctggataacatgctgttcaccgtggtcgtgcccatcgtgcccacatttctgtatgatatggagtttaaggaagtgaattcttccctccaccttggtcacgcgggatcctctccgcatgcactcgcatctccagcattttctacaatattctctttctttaataataatactgttgcagtggaggagtcggtgcctagcggaatcgcttggatgaatgacacagcttctaccatcccaccacctgccaccgaggcaatttctgcccataagaataactgtctgcagggcacaggcttcttggaggaagaaattacccgggttggagtcctcttcgcaagtaaggctgtcatgcagctcctcgtcaatccatttgtcggccccttaacaaataggattggctaccatattcctatgttcgctgggttcgtgattatgtttctgtccactgtaatgtttgccttcagcgggacctacactctgctctttgtcgctcgaacccttcaaggaattggttcctccttttcgtcagtggctgggctggggatgctcgcatctgtgtatacagacgaccacgaacggggtcgggcgatgggaactgcacttggaggacttgcccttggccttctcgtgggagcgccattcggaagtgttatgtacgaatttgtgggcaagagcgctccattccttattctagcattccttgccctgctcgatggtgcgttgcagttatgcatcttgcagcccagtaaagtgtcccccgagtctgccaagggtactccactgtttatgttattgaaagatccttatatactggtggcggccggactggcatttcttccagccagcgtgtcctatctcatcgggacaaacttgttcggggttctggccaacaagatgggccgctggctttgtagtttaatcggcatgttggtggtaggtactagtctgctctgtgtgcccctcgcccacaacatcttcggcttaattgggccgaacgctgggctcggtctagccatcggcatggttgacagctccatgatgccaatcatgggccacctagtggacctccggcacacatccgtgtatggctccgtttacgctatcgcggacgtagccttttgcatgggattcgccatcggcccgtcaactggcggggccatcgtgaaggcaattggctttccttggctcatggtaataacgggcgttataaatatcgtctatgccccactgtgctactacctcaggagcccaccagccaaagaagagaagttagccatcttgtctcaggattgcccgatggagacacggatgtacgcaactcagaagccgaccaaagaatttcccctcggggaagacagtgatgaggagcccgaccatgaggaatag

SEQ ID NO: 134889 - DNA, 1578 bp, synthetic construct
  misc_feature 1..1578: note = Description of Artificial Sequence: Synthetic coding sequence
  source 1..1578: mol_type = other DNA
atgcttcgcacgatcctcgacgctccacagagacttctcaaagagggtcgtgcatcacgccaacttgttctcgtcgtcgtcttcgtcgccttgttactggataacatgctctttacagttgtcgtgccgatcgttcccaccttcctgtacgatatggaattcaaagaggtgaacagttctctgcatctggggcacgcaggctcctccccccatgccctggcgagccctgccttttcgaccattttttccttctttaataataacaccgtggccgtggaggaatcagttcctagcggcatcgcctggatgaatgataccgcttctaccatccctccaccagccacagaggccatctctgctcataaaaataactgcctgcagggaacaggatttctcgaagaggaaattactagggtaggcgtactgttcgctagcaaagctgtcatgcagctgctggttaaccctttcgttgggcccctaacgaatcggatcgggtaccacattccgatgtttgccggttttgtgatcatgttcctgagcactgttatgttcgctttttctgggacctatacccttctgttcgtggctcgtacactgcagggaatcggtagctcattttcttctgtggccggcctggggatgttggcaagcgtgtatacagatgatcacgagcggggccgcgccatgggtacagcccttgggggtttagccctgggcctcttagtgggcgcgcccttcgggagtgtcatgtacgaatttgtcggcaagagtgcccctttcctcatactggccttcctcgcgctcttggacggcgccctgcaattatgcatattgcaaccctccaaggtgtcaccagaatccgcgaaggggacccctctgttcatgctcctgaaagatccttatattctggtggccgcaggcagcatatgctttgccaatatgggcgtcgcaatccttgagcctacattgcctatttggatgatgcagacaatgtgttctcccaagtggcaactgggtttggcctttttgccagcgtctgtgagctacctcatcgggaccaacctcttcggcgttctggcaaacaaaatgggacgttggctgtgttcccttatcggaatgcttgtggttgggacctctctcctgtgcgttccactggcacacaatatctttggactgattggacctaatgctggcctgggattagctattggcatggttgatagctccatgatgcctatcatggggcatctggtggacctcaggcacactagtgtttatggtagcgtttacgccattgccgacgtagccttttgcatggggtttgccattggcccaagcactggtggcgcaattgtcaaggcgattggatttccatggctgatggtgataaccggtgttattaacatcgtatatgcccccctatgctattacctccggtcacctcccgccaaggaggaaaaattggccattctctcacaggattgcccaatggagacaaggatgtatgcaacacaaaagcctacaaaagagttcccgctgggagaggattctgatgaagagcctgatcacgaggagtag

SEQ ID NO: 134890 - DNA, 1419 bp, synthetic construct
  misc_feature 1..1419: note = Description of Artificial Sequence: Synthetic coding sequence
  source 1..1419: mol_type = other DNA
atgttacgaacaatcttagatgctccccagaggttgctaaaagagggcagggcctctcggcagctggttcttgtggtggtcttcgtggcccttctacttgacaacatgttgttcaccgttgtggtgccaattgtgcccacctttctctacgacatggaatttaaggaggttaactcctcactgcatttgggacacgccggctccagcccccacgccttggctagtccagctttctccaccatcttttctttcttcaataacaacaccgtcgccgtcgaagagagtgtcccttcggggatcgcctggatgaacgacacagcctccactattccccctccagcaaccgaagccattagtgcacataaaaataattgtttgcaaggaacagggtttttagaagaggagattactcgagtgggagtgctgttcgccagcaaagctgtcatgcaattactggtcaacccatttgttggccctctgacgaatcgcatcggctatcacatccctatgtttgccggcttcgtgatcatgttcttgagcactgtgatgtttgctttcagtggtacctacaccctcctattcgtggcgcgaacacttcagggaattggctcctccttctcttccgttgcaggactagggatgctggcatccgtctatacagatgaccacgaacgggggagagctatgggtactgcactggggggactggcattggggcttctcgtcggcgcgcccttcggctctgtcatgtacgagtttgttggcaagtccgcaccatttttgatcctagccttcctggcgctgctggacggcgcacttcaattatgcattctacagcccagcaaagtgtcccctgaatctgcaaagggaacccccctgttcatgttgctgaaagatccttacatccttgtggctgccggaagcatttgtttcgccaatatgggggtcgctattctcgaaccaaccctgcccatctggatgatgcagaccatgtgttcaccaaagtggcagctgggcctcgccttcctacctgcatctgtgtcctacctgatcggcacaaacctttttggtgtcctggcgaataagatgggcaggtggttatgttcactaattggcatgctggttgtggggacctcactcctctgcgtgccactcgctcacaatattttcggcctaatcgggcctaacgccggcctcggacttgctatagggatggtggattcatcaatgatgcctataatgggccacctggtcgacctgcgacacactagcgtctacggctccgtgtatgcaatcgccgatgtcgcattttgcatgggttttgcaatcgggtactcagagagcggtctgccccatggggatcccgatgtatgtaatcccgaagctcacgaagggatttccagtgggggaggacagtag

SEQ ID NO: 134891 - DNA, 1578 bp, synthetic construct
  misc_feature 1..1578: note = Description of Artificial Sequence: Synthetic coding sequence
  source 1..1578: mol_type = other DNA
atgttacgtaccattctggacgcgccccagcggcttctcaaggaagggcgtgccagtagacagctagttctcgtggtggtgtttgtggcactgctcctcgataatatgttattcaccgttgtggtcccgattgtacctacgtttctctacgacatggagttcaaagaggttaacagctccctgcatttgggccacgcgggatcatcaccccatgcccttgccagcccggccttctctaccattttcagtttctttaacaacaatacagtcgcagtggaggaatccgtgccttcgggcatcgcctggatgaacgacaccgcctccacgataccccctccagcaacagaagccatttccgctcacaaaaacaattgcttgcagggtaccggattcctggaagaggaaattacaagagtgggagtgctgtttgcttccaaagcagtgatgcagctgctggttaatcccttcgtaggacccctgacgaatcgaatcggctaccatataccaatgttcgccgggtttgtgattatgttcttaagtactgtcatgtttgcttttagcgggacttacaccctgttgtttgtggccaggactctgcagggaattggaagttccttcagctccgtggcaggtttgggcatgttggccagtgtctacactgatgaccacgaacggggtagagccatgggaaccgctctcggcggtctcgcgctgggccttctggttggcgccccgtttggttcagtcatgtatgaattcgttggaaaatcagccccctttctgattctggcattcctggctctgctggatggggccttgcagttgtgtattctgcagccttcgaaagtgtcgcccgaatcggccaaagggactccgctctttatgcttttaaaggacccctacattctggtcgctgccggaagcatctgttttgctaacatgggcgtcgcaatcttagagccaaccttgcccatctggatgatgcagaccatgtgctcaccgaagtggcaactgggattggccttcctgcccgcaagcgttagttacctaattggaacgaatctgtttggggtcctggccaacaagatgggacgctggctttgcagcttgatagggatgctcgtagtcggcacttcgctgctgtgcgtgcccttggcccacaatattttcggattaatcggaccaaacgccggtttgggtctggccatcggaatggtagactcctccatgatgcccattatgggtcatcttgtcgatctcaggcatacctccgtatacggatctgtgtatgcaatcgcagacgttgccttctgtatgggatttgcaattggccctagcaccggtggcgccattgttaaagccatcggctttccttggctcatggttatcacgggcgtgatcaatattgtatatgctccgttgtgctattatctaaggtctcctccggccaaagaagaaaagctcgctattctcagccaggattgccccatggaaacccgcatgtatgccacccagaagccaactaaggagttccctcttggcgaggatagtgacgaggaacccgatcacgaggaatag

SEQ ID NO: 134892 - DNA, 1158 bp, synthetic construct
  misc_feature 1..1158: note = Description of Artificial Sequence: Synthetic coding sequence
  source 1..1158: mol_type = other DNA
atgcttagaacgatactcgatgcaccacaaagactgctgaaggaaggacgagccagccgacagctggtgttagtggtggtcttcgtagcccttcttcttgataacatgctgttcacggtagtggtgcctatcgtcccaactttcttgtatgatatggagttcaaggaggtaaactcatcactccacctgggccacgccggttcttcccctcacgcccttgcttcaccagcattctcaactattttttccttcttcaataataacaccgtggctgttgaagagagcgtgccgtctgggattgcctggatgaatgataccgcttcaaccattcctccccctgcaacagaggccatctctgcacacaaaaacaattgtctgcagggtaccggctttttagaagaggaaatcactagggtcggggttctttttgcttcgaaagctgtaatgcaattacttgtcaaccccttcgtaggacccctcactaatcggattgggtatcatattccaatgtttgcaggattcgtcatcatgttcctgtcaactgttatgttcgcattctccgggacatacactctgctgtttgtggcccgtactcttcagggaatcggaagcagctttagtagtgtagccgggttaggcatgcttgcaagcgtttacactgacgatcacgagcgcggccgcgccatgggcaccgcgcttggaggcttggcgctgggactgctcgtaggtgcgccttttgggtcagtcatgtacgagtttgtgggaaaaagtgcccccttcctgattttggcattccttgctctgcttgacggcgctcttcaactatgcatccttcaaccttctaaagtttctcccgagagtgcaaaggggactccactctttatgttgttaaaggatccttacatcctcgtggctgcggggagcatctgtttcgccaacatgggcgtggccattcttgagcccactcttccaatatggatgatgcagacaatgtgtagcccgaaatggcaactcggtttggcttttctacccgcatcagtaagttaccttattgggaccaatctcttcggcgtcctggctaataagatggggcgttggctttgttcccttatcggaatgctggttgttgggaccagcctgctctgtctgccatcctag

SEQ ID NO: 134893 - DNA, 1482 bp, synthetic construct
  misc_feature 1..1482: note = Description of Artificial Sequence: Synthetic coding sequence
  source 1..1482: mol_type = other DNA
atgttgagaacaattctcgatgcccctcagcggctcctgaaagagggcagggccagcaggcaactggtgctcgtcgtggtatttgttgcattactgttagacaatatgttgtttacagttgtcgtgcccatcgttccaactttcctatatgacatggagtttaaggaagtaaattcctcccttcacctgggtcacgccgggtcatctcctcacgcgttggctagccccgcgttcagcacgatctttagcttttttaacaataatacagtggctgtggaagagagcgtgcccagtggtatcgcatggatgaacgacactgccagcacgatccctccacccgccactgaggccatctctgcccacaagaacaactgcctgcagggcaccgggttcctggaagaggaaatcactcgcgttggagtacttttcgcctccaaggccgtcatgcagttactggtgaatccatttgttggccctctgacgaatagaattgggtaccacattccaatgttcgcagggtttgtgatcatgttcctgtccacagtcatgttcgccttcagtggcacctataccctgctttttgtggccagaacactacaggggataggatcatccttcagctccgtggccggtctggggatgctggcctccgtgtacaccgacgaccacgagcgtgggagggccatggggaccgctcttggtgggctagcactgggtctgctcgtaggcgctccattcgggtcagtcatgtatgagtttgtgggaaagagtgctccattcttaatattagcctttttggcactgctggacggtgcgctgcagctatgtatattacagccatctaaagtctctcccgagagcgccaagggaacccccctcttcatgctgcttaaggatccctacatcctggttgccgcggggctcgcgttcttgcctgccagcgtctcctacctgattggcactaatctttttggcgttctggctaataagatgggcagatggctgtgctctcttattggcatgctggtcgtgggcacttccctgttgtgtgtacccctggcacacaacatattcggcctgatcggacctaatgcgggactcggacttgctattggcatggttgacagcagtatgatgcccattatgggacacctggtggatctgcgtcataccagcgtctatggatcggtgtatgccattgcagatgtggccttttgtatgggctttgctatcggacccagcaccggtggagctattgtgaaggccattgggttcccatggctcatggttataacgggagtgatcaacattgtgtatgcccctctctgttattacctgcgtagcccaccggcgaaagaagagaagctcgctattctctcccaggattgcccaatggagacaaggatgtacgcaacccagaaacccacaaaagagttccctcttggcgaggactccgacgaggaacccgatcatgaggagtag

SEQ ID NO: 134894 - DNA, 1545 bp, synthetic construct
  misc_feature 1..1545: note = Description of Artificial Sequence: Synthetic coding sequence
  source 1..1545: mol_type = other DNA
atggcgctttccgagctagccctcgtgcgctggctgcaggaatcacggaggtctaggaagctgattctgtttattgtcttcctggccctgttactggataacatgctactcacagtcgttgtgcctatcataccttcttatctatactccattaaacatgagaagaacgcgacagaaatccagacagctagacctgtgcacaccgcaagcattagcgactcattccagagtattttttcctactatgacaactcgacaatggtgacaggcaatgcaacaagggatctgactctccatcaaaccgctacccagcatatggtgacaaacgcttctgctgtgccctccgattgcccctccgaggataaagatctcctcaatgaaaacgtccaggttgggctgcttttcgccagtaaggcaacagtccagctgatcactaatcccttcatcggactgcttacaaatcggattgggtacccaatacccatcttcgctgggttctgcatcatgttcgtgtccaccataatgtttgctttcagcagtagctatgccttcctgctcatcgccaggagcctacagggaatcggttccagttgtagtagtgtggctggtatgggaatgctggccagcgtgtacacagacgatgaggagagaggtaacgtcatgggcatcgccttgggcggcctggccatgggggtccttgtcggacctccattcggtagcgtgctatacgaattcgtcggtaagacagcccccttcttagtgctggcagctctggtactgttagacggcgccatccaactctttgtgctgcagccttccagagtccaacctgaatcacagaagggaaccccacttacaaccctactgaaggacccttatatcttgatagcggcaggctccatatgtttcgctaacatgggcattgccatgctcgagcctgcactgccaatatggatgatggaaacaatgtgctctagaaaatggcagttgggtgtcgcctttcttccagctagcatctcctatctgatcggaactaacatctttgggatactagcccacaaaatgggacgttggctttgtgccctgctggggatgatcattgttggggtcagcattctgtgcatccctttcgccaaaaatatttacgggcttattgctcccaactttggcgtcggctttgcaatcggaatggtggactcgtctatgatgccaattatgggctatttggtagacttgcggcatgtgagcgtctacggctcagtgtacgctattgccgatgttgccttctgcatggggtatgcaatcggaccctccgcgggcggggcgatagctaaggcaatcgggtttccttggctgatgacaatcatcggcattattgatatcctgttcgcccctctgtgtttttttctgcgtagtccgccagccaaggaggaaaagatggccatcctgatggaccataactgccccattaaaaccaaaatgtatacgcagaataatattcaaagctaccccatcggggaggatgaggaatccgaatctgactag

SEQ ID NO: 134895 - DNA, 1494 bp, synthetic construct
  misc_feature 1..1494: note = Description of Artificial Sequence: Synthetic coding sequence
  source 1..1494: mol_type = other DNA
atggatgtgcccgggcctgtgagtagacgcgctgccgcagccgcggctactgttctgctgcgcactgccagggttaggcgagagtgctggttcctcccaacggcgctattgtgtgcttacggattttttgcctccctgcgtccatcagagccttttttgactccgtatctgctgggccccgacaagaatctgaccgaacgagaagtgttcaacgagatctacccggtctggacctacagttacctggtcttgttgtttccagtatttctcgcaaccgattacctgcgctacaaacccgtagtgcttctgcagggtctgagcctcatcgtgacatggttcatgctgttgtatgcccagggactactggccatacagtttcttgagttcttctatggcatagccaccgcaactgagatcgcctattattcttacatttatagtgtggtggatctcggcatgtatcagaaagtgacctcttactgcaggagtgcgacattggtcgggttcaccgtcggctcggtccttggccagattctcgtaagtgtagccggatggagtctgtttagcctgaacgtaatctccctgacctgtgtgtccgtggcttttgccgtggcctggttcctgcccatgccccagaagtcccttttctttcaccacattccatctacctgccagcgggtgaacggtatcaaagtgcagaacggcggcattgtcactgacaccccagcgagcaaccatttgcccggttgggaggacattgaaagcaaaataccattgaatatggaggaaccccctgtggaagagccggaaccaaaaccggaccgtctcctcgttttgaaagtgctgtggaacgatttcctaatgtgttattcgagtcgccccttgttgtgctggagcgtttggtgggccctctccacatgtggatacttccaggtggtcaactacacacaaggcctctgggagaaggtcatgcctagtcgctatgccgcgatttataatggcggagtggaggcagtctccacactgctgggcgccgtggccgtcttcgcggtcgggtacattaagatcagttggtccacgtggggggagatgaccctctccctgttcagtctcctaatcgcagccgcagtgtatataatggatacggtggggaatatctgggtgtgctatgctagctatgtggtgtttcgaatcatctacatgctgttgatcacaatcgctacctttcagattgctgccaacctgtctatggagcgatatgcactagtcttcggcgtgaatactttcatcgccctggcccttcagacactactaacacttattgtcgttgacgcttcagggctggggctggaaattactacccagtttcttatctacgcctcctactttgctctgatagccgtggtcttcctggcctccggagcggtgtccgtgatgaagaagtgcaggaagctggaagaccctcagagcagcagccaggtgacaaccagctag

SEQ ID NO: 134896 - DNA, 1380 bp, synthetic construct
  misc_feature 1..1380: note = Description of Artificial Sequence: Synthetic coding sequence
  source 1..1380: mol_type = other DNA
atggacgttcctggtccagtatcccgcagagccgctgctgccgccgctactgtgctactgcggaccgctagggtgagaagggaatgctggttcctccccactgccttactttgtgcttacggcttttttgcatccctgcgcccatccgaaccatttctgaccccttatctgttgggtcccgataagaacctgacggagagagaagtcttcaacgagatatacccagtctggacttattcctacctggtgttactgttcccagtattcttggctaccgattatctgcgctataaacctgtcgtgctcctgcaaggtctgtccctcatcgtcacatggttcatgctgttatacgcccaggggcttctcgcaattcagttcctggaatttttttatggaatcgcaaccgcgaccgagatcgcctattattcctacatttattcagtggtcgatctcgggatgtatcagaaggtgactagctactgtaggagtgcaacactcgttggcttcactgtgggctccgtattaggccaaattctcgtgagcgtcgctggttggagtttattctctttgaatgtcatctctctgacgtgtgtcagtgtcgcatttgcagtggcttggttcctgcccatgcctcagaagagcctgttcttccatcacatcccttctacctgtcagagggtgaacggtattaaggagcctaagcccgatcggctgttggtccttaaagtgctgtggaacgattttctaatgtgttacagttctcgccccctgctgtgctggagtgtttggtgggcgctgagcacatgcggctattttcaggtggtcaactatactcagggcctttgggaaaaggtgatgccgagtcggtacgcggctatttataatgggggggtcgaagcagtgtctaccctgcttggggccgtggctgtgttcgcagtgggatacattaaaatctcttggtctacctggggtgagatgacactcagcttgttctctctcctgattgctgccgccgtgtacataatggatacagtgggtaacatatgggtgtgttacgcatcttatgtggtcttccgaattatttacatgctcctgataacaattgcaacctttcagatcgccgcgaacctttctatggagaggtatgcccttgtgtttggcgtcaacacatttatagctctcgctctgcagacactgctgactctcatagtcgtggatgcctctgggttaggactcgagattacgacacagtttcttatctacgcaagctactttgcgttgatagccgtggtgttcctggcgtccggcgcagtaagcgtgatgaagaagtgtcggaaactcgaggatccccagtccagttcgcaggtgaccacctcctag

SEQ ID NO: 134897 - DNA, 891 bp, synthetic construct
  misc_feature 1..891: note = Description of Artificial Sequence: Synthetic coding sequence
  source 1..891: mol_type = other DNA
atggatgtcccgggacccgtctcaaggcgggcggctgccgccgccgcaaccgtgctgctgcgcaccgcaagggtgaggcgcgagtgctggtttctcccgacagccttgctgtgcgcctacgggtttttcgccagcctgcggccctccgagcccttcctgactccttacctcttgggtcccgacaaaaacttgactgagagagaggagccaaaaccggacagacttctggtcttgaaggttctgtggaatgatttcctcatgtgttactctagcaggcccctgctctgttggagcgtgtggtgggcactgagcacctgtggctactttcaggtggtgaactacacacagggcctctgggagaaggtgatgccatctcgatatgccgccatttacaacggaggagtggaagctgtcagcacactcctcggagctgtagcagtatttgcagtcgggtacatcaagatttcctggtccacatggggcgagatgacgttatccttgttttccctgctgattgccgccgcagtgtacataatggacaccgttggtaatatctgggtttgctacgcctcttatgtagtctttaggatcatctacatgctgcttatcaccattgccaccttccaaatcgccgccaatctgagcatggagcgctacgccttagtcttcggtgttaacaccttcatcgcgctcgcgcttcagacactgctgactctgattgtggtcgacgcctccggattaggcctggaaattacaacgcagttcctgatctacgcctcttattttgccctgatcgctgtagtgttcctggcaagcggggcagtaagcgtgatgaagaagtgtcgaaaactggaggacccacagagtagctctcaagtcaccacatcctag

SEQ ID NO: 134898 - DNA, 1491 bp, synthetic construct
  misc_feature 1..1491: note = Description of Artificial Sequence: Synthetic coding sequence
  source 1..1491: mol_type = other DNA
atggactgctatcgcacatctttgtcaagctcctggatttatcctacagttattctgtgcttgtttggcttcttttccatgatgcgcccaagtgaaccgttcctaattccatacctgtcaggccccgataagaacctgacctccgcagagatcacaaacgagatattccccgtgtggacttatagttatctggttctcttgcttcctgtgttcgtacttaccgattacgtacgctacaagcccgtcattatcctacagggaatctcgttcatcatcacgtggctgcttctcttgtttggtcagggagttaaaaccatgcaggtcgtggagtttttttacggaatggttacagccgccgaagtcgcttactacgcctatatctactctgttgtgtcccccgaacattaccaacgtgtgtcgggctactgccgaagtgtcaccctggccgcctatacagccggctcagtgttggctcagctgctagttagcctggctaacatgtcttatttctatttaaatgtcatcagccttgcttccgtctctgtcgcatttcttttcagcttattcctgccaatgcccaaaaagagtatgttctttcacgctaagccctcacgcgaaataaaaaagtcgagtagtgtgaatccagttctcgaagagacacacgaaggcgaagcccctggatgcgaggagcagaagcccaccagtgaaatactgagtacatctggtaaactcaacaaaggccagttaaatagcctgaagccttcaaacgtgaccgtggatgtcttcgtccagtggttccaggacttgaaggaatgctactcctccaagcgtctgttctattggagcctgtggtgggcgttcgccacagccggattcaaccaggttttgaattatgtgcagattctctgggattacaaagccccctcccaggactcctcaatctataacggagccgtcgaggctatcgccacctttggcggtgccgtggctgcattcgcagtgggctacgtcaaggtaaactgggatctgctcggagagcttgccctcgtggtctttagtgttgttaacgcaggctccctgtttctaatgcactacaccgctaacatatgggcgtgctacgccggctacctgattttcaaatcatcgtacatgctattgattaccatcgctgttttccagatagctgtaaatttgaacgtggaacggtacgctttggtgtttggcattaataccttcattgctctggtgattcagactattatgaccgtgatagtagtggatcagcgtggcttaaacctgcccgtgtctatacagtttctggtgtatggctcctatttcgccgtcatagccggcatcttcctcatgaggtccatgtatattacatattccacgaagtcccagaaggacgtccaatccccagcgcccagcgagaacccagacgtaagccacccagaagaagaatccaatatcataatgagtaccaagttatag

SEQ ID NO: 134899 - DNA, 165 bp, synthetic construct
  misc_feature 1..165: note = Description of Artificial Sequence: Synthetic coding sequence
  source 1..165: mol_type = other DNA
atggactgttaccggacatccctgtcttccagctggatttaccccaccgtgattctttgccttttcggatttttttctatgatgaggcccagcgaaccctttcttatcccctacctgtccggacctgataagaatctgacctcagcggagattaccaatgagtag

SEQ ID NO: 134900 - DNA, 195 bp, synthetic construct
  misc_feature 1..195: note = Description of Artificial Sequence: Synthetic coding sequence
  source 1..195: mol_type = other DNA
atggattgctaccgaacttcactgtcctctagttggatttaccctactgttatcctttgtctgtttgggtttttctcaatgatgcgcccatccgaaccatttctcattccctacctcagcggccctgacaaaaatttaacttccgccgagatcacaaacgagatattccccgtctggacgtattcatacctttag

SEQ ID NO: 134901 - DNA, 1491 bp, synthetic construct
  misc_feature 1..1491: note = Description of Artificial Sequence: Synthetic coding sequence
  source 1..1491: mol_type = other DNA
atggactgctaccggacttctctgagcagttcatggatctaccctactgtaatcctttgtctttttggctttttctccatgatgcggcccagcgagcccttcttgatcccctacctctccggtcccgataaaaatctgactagtgctgaaatcaccaacgagattttccctgtctggacttactcttacctggttttgctcttgcctgtgtttgtcttaaccgactatgttagatacaagccagtgatcattctccaggggatctcttttataattacatggctgctgctgctttttggacagggagtgaaaaccatgcaggtagtggaattcttctacggcatggtgaccgccgcagaggtcgcatactacgcctacatctacagtgtggtatctccagaacactaccagcgggtttcagggtattgccggagtgttacactggctgcctacactgccggaagcgtgcttgcgcagctcctggtgagccttgctaatatgtcttacttttacctgaatgttatcagcctcgcatccgtctcggttgcgtttctattctccctcttcctgcctatgcccaagaagagtatgttcttccacgcgaagccttcgagggagattaagaagtctagctcagtgaaccctgtgttggaggagacccacgagggggaggcgcccggctgcgaggaacaaaagcccactagcgaaattttaagcactagcggcaagctgaacaagggacaactcaactccctcaaaccttccaacgtgactgtggacgtgtttgttcagtggttccaggatctgaaagaatgttattctagtaaaagattattctattggagcctgtggtgggcctttgccactgctggattcaatcaggtcctgaattatgtgcagattctatgggattacaaagctccgtcacaggactcaagtatatacaatggcgccgttgaggccatcgccaccttcggtggagctgttgccgcgtttgcagttgggtacgtgaaagtgaattgggatctcctgggcgaactggccctggtcgttttctccgtagtgaacgctggctctctgtttctcatgcactacaccgctaatatatgggcttgttatgcgggctacctgatatttaaatcatcctacatgctcctgattacaatcgcagtgttccagatcgccgtgaacctcaatgtggaacgatacgcgctggtgttcggaatcaacacttttatcgccctggtgattcaaacaattatgaccgtgattgtcgtggatcagaggggtctcaatctcccagtttccatacagttcctggtctatggtagctatttcgctgttatcgcgggcattttcctcatgcgttcaatgtatataacctactcaactaaatcacagaaagacgtgcagtctcctgccccttccgagaatcccgatgtgtcccatcctgaggaggagtctaacatcatcatgagcaccaaactgtag

SEQ ID NO: 134902 - DNA, 399 bp, synthetic construct
  misc_feature 1..399: note = Description of Artificial Sequence: Synthetic coding sequence
  source 1..399: mol_type = other DNA
atggattgctaccgcacaagcctgagctcgagttggatttacccaaccgtgatcctgtgtttgtttgggttcttctcaatgatgaggccgagcgaaccgttcctgatcccgtacttatccggccctgataaaaacctcacatcggccgaaatcacaaacgaaattttcccagtgtggacctactcttacctagtcttactcttacccgtcttcgtgctgaccgactatgtacgatacaaacccgtgatcatccttcaaggaatttcattcatcatcacatggttgctgctgctcttcggccagggagtgaaaaccatgcaggtcgtggagtttttctacggcatggtaactgcagccgaggtggcatactacgcttatatctactccgtggtgtcatag

SEQ ID NO: 134903 - DNA, 1479 bp, synthetic construct
  misc_feature 1..1479: note = Description of Artificial Sequence: Synthetic coding sequence
  source 1..1479: mol_type = other DNA
atgaacccactggggtccgcctcccgcgctactgtagaccagttaaccgatctcccctctaaggagcagctcagctgtgttgtgtttgcactgtggccacctgcattctctagcaatttaagcgacccaggagtcaaaattacgaacgaaattttccccgtgtggacatattcttatctggtgctactcctgcccgttttcgtgttaactgattacgtccgttataagcccgtcatcatcctgcaggggattagctttataatcacctggctgcttctgctgtttggacagggcgtgaaaaccatgcaggtggtggaattcttttatggaatggtcactgctgccgaagtagcatactatgcgtacatctattctgtggtgtcaccggaacattatcagcgggtgtccggctactgtaggagcgtgactctggcagcctataccgccggctcagtactggctcaacttctggtgagcctggcaaacatgtcatacttctatttgaatgtcatctctcttgcctccgtgagcgtggcttttctgtttagcctgttcctgcctatgcccaagaagagcatgtttttccatgccaaaccttcccgggagatcaagaaatcctccagtgtgaacccggttctagaggagacgcatgaaggggaagcacctgggtgcgaagagcaaaaacccacctcagaaattctgtccactagtggcaaactgaataaaggacaactgaacagcctgaagcccagtaacgttactgtggatgtgttcgtccagtggttccaggacttaaaggagtgttacagctctaaacggctattctactggtccctctggtgggcctttgccaccgccggcttcaaccaggttctgaattatgtgcagatcctgtgggattataaagcccccagccaggactccagcatctataatggggccgttgaggctattgctaccttcggcggggccgtggccgctttcgctgtgggctacgtcaaggtgaactgggacctgcttggggaactcgcactggtggtatttagcgtggttaatgctggctccctgttcctgatgcactacaccgccaacatatgggcgtgctacgctgggtacctgatctttaagtccagttatatgcttctgataacaattgcagtgtttcaaattgctgttaatctgaatgtcgaaaggtacgcactggtgttcggaataaacacttttatcgctctggtgatacagactattatgacagttatcgtagtcgaccaacgtggactgaacctcccagtttccattcagttcctcgtgtatggatcatattttgctgtaattgccggaatattcttgatgaggtccatgtatatcacctactccaccaaatcacaaaaggacgtgcagtcaccagctcccagtgaaaaccctgacgtgtcgcatccggaagaggagagcaatatcatcatgtcaacgaagctgtag

SEQ ID NO: 134904 - DNA, 1626 bp, synthetic construct
  misc_feature 1..1626: note = Description of Artificial Sequence: Synthetic coding sequence
  source 1..1626: mol_type = other DNA
atgggacattcacctcctgtgctgcctctctgcgcttctgtcagcctactgggcggactgacgtttggttacgagctggctgtgatcagtggagcgctcctgcctttgcagttggacttcggcctgagctgcctcgagcaggaatttctagtggggagtctcttactcggcgctctgttggctagtctggtgggcggcttcctgatcgactgttatgggagaaaacaagcaatactggggtcaaacttggtcttgctggcgggcagccttacactgggtcttgcgggctctctggcgtggctggtgcttggtcgggcggtggtgggcttcgctatttctctcagtagcatggcatgttgcatctacgtctcagaactcgtcgggcctcggcagaggggagttcttgtcagtctgtacgaggcagggataactgtcggtatcctgttatcctacgccctaaattacgcacttgctggaactccttggggctggcgacatatgtttggctgggctaccgcgcctgctgtgctacagtcccttagcctgctgttccttcctgcggggacagacgagacagctacccacaaagatctgatacccctgcagggaggagaggccccgaagctgggccccgggaggccacggtacagctttctggacctgttccgggcccgagacaatatgagggggcgtactacagttggtctgggactcgttctgttccagcaactgactggccaacccaatgtcctgtgttacgcctctacgatattctctagtgtgggcttccatggaggtagctccgctgtgttggctagtgtgggtttaggcgcagttaaagtcgccgcaactttaacagccatgggcctggtggacagggcagggcgacgtgccctgctgcttgcgggctgcgcacttatggctttgagtgttagcgggatcggcttggtgtccttcgccgtgccgatggattccgggccctcctgcctggcagtgccaaatgccaccggtcagactggcctacctggcgacagtggtctcctacaggatagttccctgcctcccattcctcgcacaaacgaggaccaaagagagcccattttgtcaacagcaaagaaaacaaaaccccacccgaggtctggagatccaagcgccccccccaggctcgctctgagcagcgcattacctgggccaccactgcccgcgcgcggccatgctctcctgcgatggactgccctcctgtgtctcatggttttcgtctccgccttttcttttggctttggtcctgttacctggcttgtcctctcagaaatttatcctgttgagatcaggggaagggcctttgctttctgtaacagcttcaactgggctgctaacctctttatttccctttctttcctcgatcttatcgggacgatcggattgtcatggacattcttgctgtacgggcttacagccgttctcggtctgggcttcatatacctcttcgtaccagaaacaaagggccagtctcttgcagagatcgaccagcagttccagaaacggcgctttacactcagctttggtcaccgtcaaaattctactggaatcccctatagccgaatcgaaatctcagcggcctcatag

SEQ ID NO: 134905 - DNA, 1947 bp, synthetic construct
  misc_feature 1..1947: note = Description of Artificial Sequence: Synthetic coding sequence
  source 1..1947: mol_type = other DNA
atgtcaagaaaagccagcgaaaacgttgaatacaccctgagaagtctgtcctccttgatgggagagaggcgccggaaacagcctgaaccagatgcggccagcgccgcaggcgagtgtagcttgctcgcggcggcagaaagctcaaccagcctgcaatccgccggcgccggtggaggcggtgtaggcgatctcgagcgagctgcgcggaggcagttccagcaggacgaaactccggcttttgtctacgtggttgccgtgttctctgccctgggcggcttcctcttcggctacgacaccggtgttgtctctggcgccatgctcctgctgaaacgtcagctgtccctggacgccctgtggcaggagctcctggtcagtagtacggtaggggcagcagccgtttctgctctggctgggggggctctgaatggtgtatttggtcgcagagcagccatcctcctggcaagtgccctgttcaccgcaggttctgccgtgctggccgctgctaataacaaagaaaccctcctggctggaaggctggtcgttggactcgggatcggaattgcctcaatgactgtccctgtatatattgccgaggtttcaccacccaatctacgaggacgccttgttacaataaacacactgtttataaccggtgggcagtttttcgcaagtgtggttgacggagcttttagctacttgcaaaaggacggctggagatacatgctgggactggcggctgtgcccgctgtcattcagtttttcggttttctctttttgccagaatcccctcggtggttgatccagaaggggcagacgcagaaggctaggagaattctcagtcagatgcgaggcaatcagactatcgacgaggagtacgatagtattaaaaacaacatagaggaagaggagaaggaggtcggtagcgcaggccctgtgatctgccgcatgctgagttatcctcccacccggagggcattaattgtcggttgcggtcttcagatgttccagcagctgtccgggattaacactatcatgtactactctgcaacaatcctccagatgagcggagtcgaggacgatcgcctggccatatggctcgcttccgtaacagctttcactaactttattttcaccctggtcggggtgtggttggtggagaaagtcggcaggaggaagctcacatttggctcacttgccggaaccacagtggcccttataatactggcactgggttttgtgctgtccgcgcaggtgagtcccaggatcacatttaagcctatagccccatccggtcagaatgctacttgcactcgatacagctattgtaatgagtgcatgctggatcctgactgcggtttttgttacaaaatgaataagagcactgtgatagatagttcttgcgtgcccgtaaataaagcttctacaaacgaggccgcctggggacgctgcgaaaacgagacgaaattcaagacagaagatattttctgggcatacaacttttgcccaacaccgtacagttggactgccctcctgggcctgattctgtaccttgtgttcttcgcgccagggatggggccaatgccgtggacagtgaattcagaaatctatccgctttgggctagatccactggcaatgcctgttcttccggtattaactggattttcaacgtgctcgtatctcttacttttcttcacactgcagaatacctcacttactacggggcattctttctgtacgccggcttcgctgctgtgggactcctgtttatttatggttgtcttccagaaacaaaaggaaaaaagctagaagaaatcgagagcctttttgacaatcggctatgcacatgcggcacgtccgattcagatgaaggtcgttatattgagtacatccgagtgaagggaagtaactatcacttaagtgacaacgatgccagcgacgtggagtag

SEQ ID NO: 134906 - DNA, 1074 bp, synthetic construct
  misc_feature 1..1074: note = Description of Artificial Sequence: Synthetic coding sequence
  source 1..1074: mol_type = other DNA
atgtctcggaaggcttcggaaaacgtagagtatacattgcggtcactgtctagcctgatgggagaacggcgacgcaaacaacctgaaccagatgccgctagtgcagctggggagtgtagtttgctggcagctgccgaaagttccacctcgctgcagagcgcaggcgctgggggcgggggagtgggcgatcttgagcgcgctgcaaggagacagtttcagcaggacgagaccccagcgttcgtttacgtcgttgccgtgtttagcgccctcggcgggtttctatttgggtatgatacaggggttgtgtccggggctatgctactccttaagcgccaactgagtctggacgctctgtggcaggaactgcttgtcagtagcactgttggcgccgccgcagtatccgccctcgcagggggcgccctgaatggggtgtttgggcgcagggccgcgatcctgctggcatccgccctgttcaccgcaggtagtgctgtgctagcggcagccaataataaagagacactgctggcaggtagactggttgtgggcctgggaatcggcatcgcatctatgactgtgcccgtgtacatcgctgaagtttcacctccaaatctgagagggagactcgtcaccatcaacactctctttatcacgggcggtcagttcttcgcaagcgttgtcgatggggcttttagctacctccaaaaggacggctggcggtacatgctaggtttggcggcagtacccgctgtcatacagttctttgggtttctcttcctcccggagtccccaagatggctaatccaaaaaggacagacacagaaggccaggagaatccttagccagatgaggggaaaccagactatagacgaggagtacgatagcattaagaataatatcgaagaggaggagaaggaggtgggctcggcggggcccgtcatatgccgcatgctgtcttatccaccaacgagaagggcgcttattgtgggatgtggactccagatgttccagcagctgagtggcattaataccatcatgtacgtctttttatcgggcttccttcttaagagactatag

SEQ ID NO: 134907 - DNA, 1494 bp, synthetic construct
  misc_feature 1..1494: note = Description of Artificial Sequence: Synthetic coding sequence
  source 1..1494: mol_type = other DNA
atggacaaccgtcagaacgtcactcctgcactgatcttcgctataacagtggctaccattggctcttttcagttcggctacaacacaggagttatcaacgcccctgaaaccatcattaaggaattcatcaacaagacattaactgacaaggcgaatgccccaccctcagaggtcttacttacaaatctgtggtctctatccgtggccatcttctctgttgggggaatgatcggatctttcagcgtgggtctctttgtgaataggttcggccgcagaaactctatgctgatcgtgaatttgctcgcagccaccggcggctgcctgatgggtctgtgtaagattgccgagtctgtggagatgcttatactgggaaggctggttatagggttgttttgtggcctgtgcacagggttcgtccctatgtatattggagaaataagtcctacggccttgcgcggggccttcggaacgcttaaccagttgggcattgtcataggtatcctcgtggcacagatttttggactggaacttatattaggaagtgaagaactctggcccgtgctgctgggcttcactattctgcccgcaatcctccagagtgcagcactcccatgctgcccggagtcacctaggtttctcctgattaatagaaaaaaagaggagaacgccacccggattctgcagcgactgtggggaactcaagacgttagccaggacattcaggagatgaaagatgaaagcgcaagaatgtctcaagagaaacaggttaccgtgctggagctgtttcgtgtttccagttaccggcaaccgatcattatcagtattgtcctacagttgagtcaacagctatccggaatcaatgccgtgttctactactcgactggtattttcaaagatgccggtgtccaacagccgatttatgccactatttctgccggcgtggtcaatacgatcttcacactgctgtctttgttcctcgtggagcgagccggtagacgcacgctccacatgattggactaggcggcatggccttctgttcgaccctcatgactgtttccctcctgctgaaaaaccattacaacggcatgagtttcgtctgcatcggagccatcctggttttcgtagcttgcttcgaaatcggaccaggccccataccgtggttcattgtggccgagctctttagtcaaggtcccaggcccgctgcgatggcagtcgccggctgttccaactggacatccaacttcttggtgggactgctcttcccgtccgcggcatattacctgggcgcctatgtgttcattatcttcacaggtttcttaatcaccttcttggcctttacattttttaaggttcccgagactcggggcaggactttcgaggacattaccagagctttcgaaggacaggcacacggtgccgatcggagtggcaaggacggtgtgatgggcatgaacagcatcgagccagcgaaagagaccactaccaatgtctag

SEQ ID NO: 134908 - DNA, 1563 bp, synthetic construct
  misc_feature 1..1563: note = Description of Artificial Sequence: Synthetic coding sequence
  source 1..1563: mol_type = other DNA
atggaattccacaacggcggccacgtctccgggattggcggattcctggtctctctgacctcacgaatgaaaccacacaccctggcagtgacacccgcactgatcttcgccatcaccgtggcgactatcggttcctttcaatttggctacaacacaggcgtgattaatgccccggagaccataatcaaggaattcatcaacaagaccctgaccgacaaagcaaacgccccccccagcgaggtcctgctgaccaacctctggtccctgtccgtggcaatcttttctgtcggaggaatgattggcagtttcagcgtcggtctattcgtgaatcggtttgggaggaggaatagtatgctcatcgtcaaccttcttgcagccaccggggggtgcttgatgggattgtgcaaaattgcagagagcgtagaaatgctgatactgggtcgattggtgatcgggctgttctgcgggctttgcaccggttttgtaccaatgtatatcggagagatcagccctacagcgctgcgtggcgctttcggcacactcaatcagctggggatagtgattggtatacttgtggctcagatctttgggctagagctgatcctcgggtccgaggaactatggcctgtgctcctgggatttaccattctaccagccatcttgcagagtgccgcgctgccttgttgccctgaatctccacggttccttcttattaatcggaaaaaagaagagaacgcaacaaggattttgcaacggctctgggggacccaagatgtgagccaggatatccaggaaatgaaggacgagtccgctagaatgtcccaggaaaagcaggtaactgtgttggagttattcagagtgagtagttaccgccaaccaataattattagcattgtgttgcaactttcccagcagctctctgggattaatgctgtgttttattatagtactggcatattcaaagatgctggagtgcagcagcctatctacgcaaccatttctgcaggagtggtcaataccatttttacactgctctctctgttccttgtcgagagggcaggccgacgcacattgcacatgatcggcctggggggtatggctttttgcagtactcttatgactgtctctctgctcctaaagaaccattataatggtatgtcgttcgtctgcattggggcgatcctggtgtttgttgcctgttttgagatcgggcctgggcctattccttggttcattgtcgcagaattatttagccagggaccaaggcctgcggccatggcagttgccggttgcagcaactggacctctaatttcctggttgggctgctctttccttcggccgcgtactacctcggtgcttatgtgttcattatcttcaccgggtttctgatcacatttcttgcctttaccttctttaaggtccccgagactaggggaaggacgtttgaggacatcacacgcgcgttcgagggtcaagcacatggggcagacagatctggcaaggatggagtaatggggatgaattccattgaacccgcaaaggagaccaccacgaacgtgtag

SEQ ID NO: 134909 - DNA, 1494 bp, synthetic construct
  misc_feature 1..1494: note = Description of Artificial Sequence: Synthetic coding sequence
  source 1..1494: mol_type = other DNA
atggacaaccgccagaacgttaccccggcactgattttcgcaattaccgtggcgacgatcggatcattccagttcggctacaacactggcgtcatcaacgccccggaaaccattatcaaggagtttatcaataaaactctgaccgataaggcgaacgctccaccgtcagaagtgctcctgacgaacctgtggagcctgagtgtggcaattttctctgtcggcggtatgattggcagtttcagcgtgggactgtttgtgaaccgattcggccggcggaactccatgctgatcgttaatctcctggcagcaaccgggggatgtctcatgggactgtgtaaaatcgctgaatccgtggaaatgctgatccttgggcgcctggtcattggattgttctgcggcctgtgcactggcttcgtgccaatgtacattggggagatctctccgacagcgttgcgaggtgcctttggtactcttaatcagttaggcatcgtaattgggattctggtcgctcagatattcgggttggagttaattctgggcagcgaggagctgtggcccgtgttactaggattcactatcctgccagctattttgcagtcagcagccctgccttgttgcccagaatccccccggttccttctaataaaccggaaaaaagaggaaaatgctacacgaatcctacagcgactatggggcactcaggacgtcagccaagacattcaagaaatgaaagacgagagcgcgcggatgtcccaggagaagcaggtcacagtgctagaactcttcagggtctctagctaccggcagccaattattattagcatcgtgttgcaactgtcacagcagctgtctggaattaacgccgtgttttattattcaactgggatattcaaggatgctggcgttcagcaaccaatctacgccaccattagtgcaggagtggtgaacacaatctttaccctgctgagtttgtttcttgtagagagggccggccggaggacactccatatgataggactgggcggaatggcgttttgtagcactctgatgaccgtatccttgctcctcaaaaatcactacaatgggatgtcattcgtctgcataggcgcgatacttgtgttcgtggcatgtttcgaaatagggcccgggccaatcccttggtttattgtggccgagctgttctcacaggggcccaggcctgccgctatggccgtggctggatgttctaactggactagcaactttttagttggactgttgtttcccagcgccgcatattatctcggagcctacgtcttcatcatcttcacagggtttctaatcaccttcttggcctttacgttcttcaaagtgccagagacgcgtggccgtactttcgaagatattacccgtgctttcgaagggcaggctcatggcgccgatcgcagtggcaaggatggtgtaatgggcatgaattccattgagccagccaaggagacaaccacaaatgtgtag

SEQ ID NO: 134910 - DNA, 363 bp, synthetic construct
  misc_feature 1..363: note = Description of Artificial Sequence: Synthetic coding sequence
  source 1..363: mol_type = other DNA
atggagttccacaatggtggacatgtctctgggatcggtgggtttttagtgtcccttacctctaggatgaaacctcacactttggccgtgactcctgcgctgatcttcgccataactgtggcgaccattggtagcttccagtttgggtacaacacgggggttatcaacgcccccgagaccatcatcaaagagtttatcaacaagacgttaactgacaaggcaaatgccccccctagcgaggtgctcctgactaacctgtggagcctttccgtggcaatcttcagcgtgggaggaatgatcggttctttcagtgtggggctgtttgtcaataggtttggccgccgaaactccatgctgatatag

SEQ ID NO: 134911 - DNA, 1236 bp, synthetic construct
  misc_feature 1..1236: note = Description of Artificial Sequence: Synthetic coding sequence
  source 1..1236: mol_type = other DNA
atgctcctccgacggcgcaacagtatgctgatcgtgaacctgctagccgctactggcggctgtctgatggggttatgcaaaatcgctgagagtgtggagatgctgatccttggacgactggtgatcgggctcttttgtggcctctgcaccggcttcgtgcctatgtacatcggtgaaatcagtccgacggccttgcggggcgccttcggcaccttgaaccagctcggcatcgtaatagggatcctggttgcccagatttttgggctggaattgatactgggctcagaagaactctggccagttctgttgggcttcacaatactccccgctattctccagtcagctgcactcccatgttgccccgagtcccctcgttttctgttaatcaatcgcaagaaagaggagaatgccacccgaattctgcagaggctatgggggacccaggatgtgtcacaggatatccaagagatgaaagatgaatccgctcggatgagtcaggaaaagcaggttacggtgctggaactgttccgcgtttcttcatacaggcagccaattattatctctatcgttctacagctgtcccagcagttgagcgggatcaacgccgtgttttattactcaaccgggattttcaaggatgctggggtacaacagccaatctacgcaacgatctctgccggtgtagtgaacaccatctttactttgctctcattgttcttagtggaacgggcaggaaggagaaccctgcatatgattggcctggggggcatggccttctgttcaacactgatgaccgtttctcttctgttgaagaatcactataacggcatgtctttcgtgtgcatcggcgctatcctagtgtttgtcgcgtgcttcgagattgggcctggtcctattccatggttcatcgttgccgagctgttctcccaaggaccacggccagccgccatggctgtggctggctgctctaattggacaagcaatttccttgtggggctgctgttcccatctgcggcctactatcttggggcttatgtatttatcattttcacaggttttctcatcacattccttgctttcactttttttaaggtacccgagacccgaggacgaactttcgaagacatcacacgagcttttgagggccaagcacacggcgctgaccgttcaggcaaagacggtgttatgggtatgaacagcatcgagccagccaaggagactacaaccaatgtatag

SEQ ID NO: 134912 - DNA, 426 bp, synthetic construct
  misc_feature 1..426: note = Description of Artificial Sequence: Synthetic coding sequence
  source 1..426: mol_type = other DNA
atggataatagacagaacgtcacccctgccctcatattcgccatcactgtcgcaaccattggatcttttcagttcggatataacactggagtgatcaatgcgcccgagacaattatcaaggagttcatcaacaagacccttacggacaaggccaatgcaccaccgtccgaagttttacttactaatctttggtctctctccgtggccatttttagcgtgggcggaatgatcggttcatttagcgtgggactattcgttaacaggtttggacggcggaactccatgttaattgttaatctgctggctgctacaggcggatgtctgatggggctgtgtaaaattgccgaatccgtcgagatgttgattcttggccggctcgtgattgggctcttctgtggcctgtgcactggctttgtgccaatgtag

SEQ ID NO: 134913 - DNA, 144 bp, synthetic construct
  misc_feature 1..144: note = Description of Artificial Sequence: Synthetic coding sequence
  source 1..144: mol_type = other DNA
atggacaaccgtcaaaacgtgactcctgcgctcattttcgccatcacagtggccaccatcgggagttttcagtttggctacaacactggcgtgatcaacgcgcctgaaaccattattaaggagtttattaacaaaaccttatag

SEQ ID NO: 134914 - DNA, 69 bp, synthetic construct
  misc_feature 1..69: note = Description of Artificial Sequence: Synthetic coding sequence
  source 1..69: mol_type = other DNA
atggataaccgccagaatgtgacacctgcgttgatctttgctatcacagtggcgaccatcggctcgtag

SEQ ID NO: 134915 - DNA, 426 bp, synthetic construct
  misc_feature 1..426: note = Description of Artificial Sequence: Synthetic coding sequence
  source 1..426: mol_type = other DNA
atggagttccataatggcggacacgtgagtgggattggaggctttctggtgagcctgacttcgagaatgaagccacatacactggctgtaacgccagcgctgattttcgccattaccgtggccactattggatctttccagttcggatacaatactggcgtgatcaacgcacccgagaccataatcaaggagtttatcaataagacccttaccgataaggcaaacgctcccccgagcgaagttctactgacaaatctctggagcttgtctgtagccatcttcagcgtcggtggaatgattggcagtttctctgtgggcctgttcgtgaaccgttttggtcggcgaaacagcatgctgattgtaaatctgctggccgctacaggaggttgccttatgggactttgtaagatcgccgagtcagtctag

SEQ ID NO: 134916 - DNA, 1608 bp, synthetic construct
  misc_feature 1..1608: note = Description of Artificial Sequence: Synthetic coding sequence
  source 1..1608: mol_type = other DNA
atgcagaggttgcagctattgagggtagaagtgctgctgggggtcaagcaaggcgatgaaatgcggcatttttttttttccagtcagacaagcaccctagagaagagccagaacggaggagtcggtgaagaggtcacccccgctctgatctttgctatcaccgtagctactattgggtcgttccaattcggctataacacgggagtgatcaacgcacccgagacaattattaaagagttcatcaacaaaacactcaccgataaggccaatgcgcctccctctgaggtgttgctgaccaacctgtggtctctcagcgtggccattttttctgtgggaggcatgataggatccttctccgtgggcctgtttgtgaatcggtttggacggcgtaacagtatgctcattgtcaacctgctggccgctactggaggctgcctgatgggactatgtaagattgccgaaagcgtggaaatgctgatactgggtcgtctggtgattggactcttctgtgggctttgcaccggctttgttccgatgtatataggagaaatttccccaaccgcactcagaggtgcatttgggaccctcaatcagctgggaattgtgattggaattttggtagcccaaatctttggtctggagttaatcctgggatcggaggagctatggcccgttctcctggggtttaccatcctacccgcaatcttgcagtccgcagctttgccttgttgtcccgagtctccgcgcttcctcctcatcaatagaaaaaaggaagagaatgcaactaggatcttacagaggctgtggggaacgcaagatgtcagtcaagatattcaagaaatgaaagacgaaagtgctcgcatgagtcaggaaaagcaggtaacggtgttagagctgtttagggtctcctcctatcggcagcctattattataagcatcgtcctgcagttatcacagcagctgagcggaatcaatgccgtattctattattccactggaattttcaaagatgctggggtccagcagcctatttatgctactatcagcgccggggtggtcaacacgatcttcactttgctgtccctcttcctggtcgagagggctggacgaaggacactgcacatgattggactgggaggaatggcattctgttcaactctgatgaccgtgtcgttgctcctcaaaaaccactataacggtatgagctttgtgtgcataggtgccattctggtgttcgtggcatgctttgagatcggcccaggacccatcccctggttcatcgtggccgaattgttttcccagggccccagaccagctgcgatggcagtagccgggtgtagtaactggacttccaactttctggttgggctcttgttcccgagtgccgcttactacttgggggcctatgtgttcataatcttcactgggttcctgatcacctttctggcttttacattttttaaggttcccgagacgcggggcagaaccttcgaagatattacgcgtgccttcgagggacaggcccacggcgccgataggtcggggaaagacggggtgatgggaatgaatagcatcgaacctgcgaaagagaccaccacaaatgtttag

SEQ ID NO: 134917 - DNA, 486 bp, synthetic construct
  misc_feature 1..486: note = Description of Artificial Sequence: Synthetic coding sequence
  source 1..486: mol_type = other DNA
atgattgggcttggaggcatggctttctgcagcacgctgatgacagtgtccctgctactgaagaatcactataatggtatgtccttcgtgtgcataggcgccattctagtgttcgtggcctgcttcgaaatcggccccggaccaatcccttggttcatcgtggctgaactgttctcccagggccctcgaccagctgctatggccgtcgccggttgttcaaactggactagtaactttctcgtcggattattgttcccttccgccgcctattacttgggcgcttatgtcttcatcatctttactggtttcctcatcacttttctcgcgtttacatttttcaaagtacccgagacacgcggacggaccttcgaagacattactagggcgttcgaaggacaagcccacggcgcggacaggtccgggaaagacggcgtaatgggaatgaactcaatcgagccggccaaggagactaccaccaatgtatag

SEQ ID NO: 134918 - DNA, 1236 bp, synthetic construct
  misc_feature 1..1236: note = Description of Artificial Sequence: Synthetic coding sequence
  source 1..1236: mol_type = other DNA
atgctcctgagacgcaggaattctatgctcattgtgaatctacttgccgcaactggcgggtgcttaatggggctctgcaagatcgctgagagcgtagaaatgctgatcttgggtaggctggtaatcgggctcttttgcgggttgtgtactggctttgtgccaatgtatatcggggaaattagccctacggcacttcgcggagccttcggcacattgaatcagctcggcatcgtgattggcatactcgttgcccagatttttggcctggagctcatcctcgggagtgaagaactgtggcccgtgctgctcggcttcactattttgccagcaattttacagtccgccgccctgccctgctgtccagagagtcccaggttcctgctaatcaatcgcaaaaaggaagagaacgccaccaggatactgcagcgcttgtggggcacccaagacgtttcccaagacattcaggagatgaaagacgaatctgcccgaatgagtcaggagaaacaagtcactgttttggaactttttcgtgtgagcagctaccgacagcccatcattataagcatagtgctgcagttatcacaacaactgtctggaattaatgctgttttctactactccactggcatttttaaggacgccggagtccagcagccaatttacgctaccattagtgcaggtgtggtgaatacaatttttactctgctgagcctgttccttgtggagcgggctggacgccgcactttacatatgattggcctggggggcatggccttttgctctacactgatgacagtgtcactgctgctcaagaaccactataacggaatgtcatttgtttgcataggtgccatcctggtcttcgtggcttgcttcgagattggcccagggcccatcccatggttcatcgtggccgaactattctcacaaggaccaaggccggcggcgatggcagtcgccggttgtagtaactggacatctaacttccttgtgggcctactctttccatctgccgcttattatcttggcgcctatgtgtttattattttcacaggcttccttatcactttcctagctttcacgtttttcaaagtaccagagacccgcgggcgcacctttgaagatattacccgtgcatttgaaggccaggcccacggggctgacaggtcaggcaaggatggcgtcatgggaatgaatagcatcgagcccgcgaaggagactactactaatgtctag

SEQ ID NO: 134919 - DNA, 459 bp, synthetic construct
  misc_feature 1..459: note = Description of Artificial Sequence: Synthetic coding sequence
  source 1..459: mol_type = other DNA
atggacaacaggcaaaacgtcactcccgctctcatattcgcaatcacagttgccactatcggctccttccagtttgggtacaacacaggcgtcatcaacgccccggaaaccattataaaagagttcatcaacaagaccctgacagacaaagctaatgcaccacctagtgaggttctcctcactaatctgtggagcctgtctgtggccatcttcagcgttggcggaatgatcggcagcttcagtgttggcctattcgtgaacaggttcggaaggcgaaactccatgctgattgtaaacctactagcggctacaggcgggtgcctgatgggactctgcaagatagctgaaagtgtggagatgctaatactaggtcgcttggtaatcgggctgttttgcggtctgtgcacagggttcgtccctatgtatatcggcgagatctcccccaccgccctgcgatag

SEQ ID NO: 134920 - DNA, 255 bp, synthetic construct
  misc_feature 1..255: note = Description of Artificial Sequence: Synthetic coding sequence
  source 1..255: mol_type = other DNA
atggacaatcgccagaatgtgactccggcgctgatcttcgccattacggtggcgacaatcggaagcttccagtttggttacaacaccggggttatcaatgcccccgaaaccataatcaaggagtttatcaataaaactttaaccgacaaggcaaacgccccccctagcgaagtgttgctaactaatctttggagcctcagcgtcgccatcttttcagtgggtggaatgatcggttccttcagcgtgggactgtag

SEQ ID NO: 134921 - DNA, 1563 bp, synthetic construct
  misc_feature 1..1563: note = Description of Artificial Sequence: Synthetic coding sequence
  source 1..1563: mol_type = other DNA
atggaatttcataatggcggccacgtcagcggcataggcggctttctggtgtcccttacgtcacggatgaagcctcacaccctggcagttacccccgcactgatattcgccattacagtcgcaacgatcggttctttccagtttggatacaatactggcgtgatcaacgcgcccgagacaatcatcaaggagttcataaacaagacactgactgacaaggccaacgccccgccatccgaagtattactgaccaatctatggagcctgtccgtggccatttttagtgtaggagggatgatcggatcttttagcgtggggctgtttgttaatcggtttgggcgccgtaacagtatgctgatcgtgaatctactggctgctaccggcggctgcctgatggggttgtgcaagatagccgagagcgtggagatgctcattctcggcaggctggtgatcgggctcttttgtggactgtgcactgggttcgttccgatgtatattggagagataagtcctacggctctcaggggtgcattcggaaccctgaatcagctgggcattgtcattgggatcctggtcgctcaaatttttggcttggagctgatccttggcagtgaagaactatggccagtgctgctgggctttactatcctcccggctattttgcagagtgcggcgctgccttgttgccctgaaagcccaaggttcttactcattaataggaagaaagaggagaatgccacccgtatactgcagagactgtggggaacgcaagacgtcagccaggatatccaagaaatgaaggatgagtctgctagaatgagccaggagaaacaggtcacagtattagaactcttccgagtttcctcatatcggcagccaattattatttctattgttctgcagctgtcccagcagctgtcgggcattaatgcagttttttattacagcacgggaatttttaaagatgcaggcgtccagcagcctatttatgctacaatcagcgccggagtggtgaatactatctttactctactgtcgctgtttctggtggaaagagcaggcagacgaactttacatatgatcggactaggtggcatggctttttgtagtacactaatgaccgtgagcctcctgcttaagaaccattataacggtatgtctttcgtgtgtattggggcaatactcgtgttcgttgcttgttttgaaattggtcccggtccaatcccatggtttattgtggcagaactgttttctcagggacctaggcctgcggccatggccgtggcgggctgtagcaattggaccagcaacttcttagttggactcttgtttcccagcgctgcctactacttgggcgcgtatgtattcatcatcttcaccggtttcttgataacctttctggcttttactttctttaaggttcccgagacccgcgggaggacatttgaggacattactagggcttttgaagggcaggctcacggcgccgatagaagtggcaaggacggtgtgatgggaatgaacagcatagagcccgccaaggaaaccacaacaaacgtatag

SEQ ID NO: 134922 - DNA, 510 bp, synthetic construct
  misc_feature 1..510: note = Description of Artificial Sequence: Synthetic coding sequence
  source 1..510: mol_type = other DNA
atggataatagacagaacgtgacaccagccttaatcttcgctattaccgtagcaacaatcggctcctttcaatttggatacaatacaggcgtgatcaacgcccccgagacaatcataaaggaattcattaataagactcttactgacaaggcaaatgcacctccttcagaagtcctgctgacaaatttatggagcctgtcagtggcgatcttttctgtcggcggaatgatcggctcattcagtgtgggtcttttcgtgaacagattcggcaggcgcaattctatgctgatcgtcaatctcttagctgcaactggcggctgtctaatggggctatgcaagatcgccgagagtgtcgagatgctcatactgggccggctagtgattggcctgttctgtggcctgtgcactgggtttgttcccatgtatattggtgaaatttcccctaccgctctgaggggcgcattcggcaccctgaatcagctgggaatcgtgatcggcattctcgtgtag

SEQ ID NO: 134923 - DNA, 1491 bp, synthetic construct
  misc_feature 1..1491: note = Description of Artificial Sequence: Synthetic coding sequence
  source 1..1491: mol_type = other DNA
atgggaacccagaaagtgactcccgcactaatcttcgctattaccgttgcaacgatcggcagctttcaatttgggtacaacaccggggtcatcaatgcccccgaaaagataataaaagagtttatcaacaagacactgacagacaaggggaatgctccccccagcgaagtgctgcttactagcctgtggagcctgtctgtggccatattcagtgtcgggggtatgataggaagttttagtgttgggctgtttgtgaaccggtttggtcggcgcaattctatgctgattgttaacctgctggcagtgactgggggttgcttcatgggcctctgtaaggtcgcaaagtccgtggaaatgctgatcctcggccgcttggtgatagggctgttctgcggcctgtgtactggctttgtgccgatgtatattggagagatttcccccacagcactccgcggcgcatttggcaccctgaatcagctgggcatagtcgtagggatactggtcgcccaaatcttcggtctggaattcatccttggatctgaggaactttggcccctgctgctgggcttcacaatcctccccgctatactgcagtcagctgccctccctttttgccctgagtctccgagatttctgttgataaatcggaaagaagaagaaaacgcaaagcagatacttcagcgcttatggggaacacaggacgtctctcaggacatccaggagatgaaggatgaaagcgcgagaatgtcccaggagaagcaggtgaccgttctggaactttttagagtgagttcttataggcagcccataataatatcaatcgtactgcagctaagtcagcagctcagtggcattaatgcggtattctattactctacaggtatatttaaggacgcgggcgtccaggaaccaatttacgccaccataggtgctggtgtggtgaataccatctttacagtagtgtctctgtttttggtagaaagggcagggaggaggaccttacatatgatcggtctcggtggtatggctttttgtagtactcttatgacggtgtccttgctgttgaaggacaactacaacggaatgtctttcgtgtgtatcggtgccattctggtgttcgtagccttcttcgaaatcgggccgggtcccattccctggtttatcgtcgctgaactgttttcacagggaccacgcccagctgcaatggctgtggcgggatgttctaactggacctcaaactttctagtggggctcctcttccctagcgccgcacattacctgggggcatatgtatttataatttttaccggtttcttgatcacattccttgcctttacattctttaaagtgccagaaactcggggtcgaaccttcgaggacataactagagccttcgagggccaggcccatggcgccgatcgcagcgggaaggatggcgtaatggagatgaacagtatcgaaccagctaaggaaaccaccactaacgtttag

SEQ ID NO: 134924 - DNA, 1269 bp, synthetic construct
  misc_feature 1..1269: note = Description of Artificial Sequence: Synthetic coding sequence
  source 1..1269: mol_type = other DNA
atgattggctctttctcggtgggtctttttgtgaatcggtttggaagacggaactcaatgctgattgtgaacctactcgctgtgacggggggatgcttcatgggtctctgcaaggtggcgaaatctgtggagatgctgatcctgggccggctggtgatcgggttgttctgcggcctatgtactggatttgtgcccatgtacattggcgagataagcccaacggccctcagaggcgcctttggcactcttaatcagttaggtattgtcgttggcattctggtggcacagatatttggtctggagttcattcttgggtctgaggaactgtggcctctgttgctggggttcacaattctgcctgccatcctccagagtgccgcactgcctttctgccctgaatctccgcggttcctcctgatcaataggaaagaggaagaaaacgccaagcagattctgcagagattatggggcacgcaggatgtgtctcaggacatacaggagatgaaggatgaatccgctaggatgagccaagagaagcaggttaccgtgctggaactctttcgcgtcagcagctacagacagcctattattatttcaatcgtgctacagctaagccaacagctgtccggcattaatgcagtattctactactcaactgggatcttcaaagacgcaggggtgcaggagccgatctacgctacaatcggagctggcgtcgttaatacaatctttactgttgtaagcctgttcttggtggaacgcgcaggccgccgcacacttcacatgattggactcggagggatggcattttgcagcaccttaatgacagtgagcttactgctgaaggacaattacaatgggatgagttttgtgtgcattggcgcaatactggtgtttgtcgcatttttcgaaatcggcccgggccccattccatggtttattgtcgccgagctttttagccaagggccccggcccgcagctatggcagtggcaggatgttccaactggaccagtaattttctggtcggactactgtttccctctgctgcacattacttgggtgcctatgtgttcatcattttcacaggatttctgatcacttttctagctttcacattttttaaagttcctgagacccggggacgaacattcgaagacataaccagagctttcgagggacaggctcacggtgctgataggtccggcaaggatggagttatggaaatgaacagcatagaacctgcgaaggaaaccaccactaacgtatag

SEQ ID NO: 134925 - DNA, 1530 bp, synthetic construct
  misc_feature 1..1530: note = Description of Artificial Sequence: Synthetic coding sequence
  source 1..1530: mol_type = other DNA
atgccatccggattccaacagataggttccgaagatggggagccaccccagcaacgagtcacaggcaccctcgtgcttgccgtttttagcgcggtcttgggtagtctgcagttcggatacaatataggtgtcatcaatgccccacagaaggtcattgaacagtcctacaatgagacatggttaggccgccagggaccggaaggcccgtcaagtatccccccaggaaccctcactacactttgggccctaagtgtggctattttcagtgtgggtggaatgattagcagcttccttatagggattattagtcaatggctcggcagaaaacgtgccatgctggtcaataacgtcctggctgtgttaggcggcagcctgatggggctggctaatgctgctgcctcttacgagatgctaatcttgggccgcttcctgatcggggcctattctggactgacctcgggcctggtaccgatgtatgtaggggaaattgcacctacccaccttaggggagcattgggcacattaaatcaactagccatcgttataggcatactgatagctcaggtactcggcctggagtcccttctcggcactgcctcgctatggccactgctgttgggccttactgtactgccagcgctgttacaactcgtcttgctccccttttgtcctgagagcccacgctacttgtacattattcagaacttggaaggaccagcccgaaaatctttgaaaaggttaactggatgggctgacgtgtcgggggtgttagccgagctgaaagatgagaaacggaagttggagagagagcgtcccctgtcactgttacaattgctggggtcgaggacccacaggcagcccctcataatcgcagttgttctgcaattgagtcagcagctctctggcataaacgcagtcttctattactcaacctctatctttgaaacagccggcgtgggtcagcccgcttatgccaccatcggcgccggggtggtaaacacagtgtttacactggttagcgttctgctggtggagcgggctggaagacgcactctccatctgctggggcttgccggaatgtgtggctgtgccatcttgatgactgtggccctccttctgttggaacgggtccctgccatgagttatgtgagcatcgtggctattttcggtttcgtggccttctttgagatcgggcctggacctatcccatggtttatcgtagctgaactgttctctcaggggcctagacccgccgctatggcagtcgcaggatttagcaattggacatccaactttatcataggcatgggcttccagtatgtcgcagaggctatgggcccctacgtgtttctgcttttcgccgtgctgttgctgggattcttcatttttacttttttacgagtcccagaaacccgcggaaggacgttcgatcagatttcagctgcgtttcaccgaaccccaagccttttggagcaggaggtaaagcctagtacagagctagagtatctcggccccgacgagaatgattag

SEQ ID NO: 134926 - DNA, 1356 bp, synthetic construct
  misc_feature 1..1356: note = Description of Artificial Sequence: Synthetic coding sequence
  source 1..1356: mol_type = other DNA
atggacggcgagccaccccagcagcgcgtcacggggacgcttgtgctcgccgtgttttccgctgtcctggggtcactgcagttcgggtataacattggggtgattaatgctcctcagaaggttattgagcagtcctacaacgaaacttggcttgggcggcagggaccggagggaccctctagtataccccccggaaccctcacgaccctttgggctctgagcgtggcaatcttttccgtggggggtatgatttcttcctttctcataggaattatcagccagtggttaggcagaaagagggcaatgcttgtcaacaatgtactggcagtgctggggggaagcctgatgggattggccaacgctgctgcctcatacgagatgctgatcctggggcggtttctaatcggcgcctactctggtcttaccagcggcttggttccgatgtacgtgggggaaatcgcccccacccatcttagaggggctctcgggactcttaaccagctggcgatcgttattggtatccttattgcgcaggtcctcggattggagagcctgctgggtaccgcttctttatggccactgctgttggggctcactgtgctccctgccctgctccaacttgtactcttaccattttgcccagaaagtccccgttacctttacattattcagaacctggaggggccagccaggaaatctctgaagagactgaccggttgggcggatgtcagcggcgtactggcagaactcaaggacgagaaaaggaagctggaacgggagcgtccactgtcactgttacaactgctgggaagccggacacatcgtcagcctttgatcattgccgtcgttttgcaactgtcgcagcagctctccggaattaacgcagtgttttattacagcacctcaatttttgaaaccgctggggtgggccagcccgcatatgcaacaataggagccggggtggtgaatactgtgttcacccttgtctcggtcttgttggtcgaaagggccgggcggaggacgctgcatctgcttgggttagcgggcatgtgcgggtgtgctatactgatgacggttgccctcttgttgctggaacgcgtccccgctatgtcctacgtcagcattgtggccattttcgggttcgtggctttctttgagatcggcccgggcccaatcccttggtttatcgtggctgaactctttagccaggggcctcggcctgcggcaatggccgtcgctggcttcagcaactggaccagcaattttattattggtatgggcttccaatatgtcgccgtcggaccacccgcacccgccagccatacagtggggcaacgctgggcatcacactcatag

SEQ ID NO: 134927 - DNA, 1338 bp, synthetic construct
  misc_feature 1..1338: note = Description of Artificial Sequence: Synthetic coding sequence
  source 1..1338: mol_type = other DNA
atgcaggaaccactccttggagccgaaggtcctgactacgataccttccccgaaaaaccaccgccaagtcccggcgatcgcgcacgagtggggacactgcagaacaaacgggtattcctcgctacgtttgccgcagtgctcggcaacttctcctttggctatgcactggtctatacctcacccgtgatccccgccttggaaaggtctttggatccagacctccacctgactaaaagccaagcctcctggtttggctcagtctttacgctaggggctgccgctgggggattgtctgccatgattctgaacgacctgctggggcggaaactgtccataatgttttcagctgtgccaagtgccgcaggttatgccctgatggctggggcccatggtctgtggatgctgctcttgggtcgtactctcaccggatttgcaggaggcctgacagccgcatgtataccagtgtatgtgtccgagattgcccctccgggagttcgtggcgcgctcggcgctaccccgcagctgatggctgtttttggttcgctgtcactgtacgctctcgggctgctcctgccctggagatggttggccgtggcaggcgaggcccccgtcctgataatgattctgctgctgagctttatgcctaattcccctcggtttttgctgtcaaggggccgcgatgaagaggcgctcagagcattggcctggttgagggggacagacgtggacgtccattgggagttcgagcaaattcaagacaacgttagacgacagtcctccagggttagttgggccgaggctcgggcgccccacgtttgcagacctatcaccgtggctctgctaatgcggctgttacagcagctgacaggaattacacccattctcgtgtatctgcagagtatttttgattccaccgccgtactcctgcctcccaaagatgatgccgctatcgttggagcagtgcgcctcctctctgtgttgatcgccgcgctgacaatggatctggccgggaggaaagtcctgctgttcgtgtccgggtatgccgtggggtggggaccaattacgtggctgctgatgtcagaggtgctgccactccgcgctaggggggttgctagtggtctctgcgtgttggctagttggctgacagcattcgtactaacgaagtcatttctccccgtggtgtccacttttggacttcaagtcccattcttttttttcgccgcaatttgcctggtgtccttggtttttactggctgctgtgttccagaaacaaagggccggtctttggagcagattgagtcattttttaggaccggaagacgaagctttcttagatag

SEQ ID NO: 134928 - DNA, 1524 bp, synthetic construct
  misc_feature 1..1524: note = Description of Artificial Sequence: Synthetic coding sequence
  source 1..1524: mol_type = other DNA
atgcaagagccattgctgggagcggaaggtccagattacgacacctttcctgagaagcccccacccagtccgggtgacagggcacgggtggggaccttacagaacaaaagagtgttcctggccaccttcgccgctgtcttaggtaacttctcttttggttatgctctggtttacacctctcctgtgattcctgccttagagcgtagcctcgaccccgaccttcacctaacgaagtcacaagcttcatggttcggtagtgtcttcactcttggcgctgctgccggcgggctgtctgccatgatcctgaacgatctcctgggaagaaagctctcaataatgtttagcgctgtccctagcgctgccggttatgctctgatggccggtgcacacggactctggatgctgctgctaggcaggaccctcactgggtttgccggcggactgacagctgcctgcatcccagtgtacgtgtcagagatcgcaccgcctggcgtacggggcgctttgggggccaccccacagcttatggccgtgttcggatcactgtctctctatgcactcggcttactgcttccctggcgctggctggctgttgcaggagaagcacctgtgttgattatgattttgctgctctcgttcatgcccaactctcctcgcttcctattatcaagaggcagagatgaggaggccctccgggccctggcctggctgagaggtaccgacgtggacgtgcattgggaatttgaacaaattcaggataacgtgcggcgtcaatcttctagagtgtcctgggctgaggcccgagctccacatgtatgtagacctatcacagtggcactgctaatgcggctgttgcagcagctcacgggtataactcctatcctcgtgtatctccagagtatcttcgacagtacggctgtcctgctccctcccaaagatgatgccgccattgtcggcgccgtgcgccttctcagtgtgctgattgccgccctaaccatggatctggcaggaagaaaggtgctcctatttgtttcagctgccatcatgttcgccgccaatctaactcttgggttatacatccacttcggtcccaggcccctgtcccccaactcaaccgccggacttgagtccgaaagctggggggacctcgcccaacctttagccgcacctgctggttacttgaccttagtgcctcttctggcaacaatgctgtttatcatgggttacgccgtagggtggggcccaattacatggctcctcatgtctgaggttctgccgctgcgggccaggggcgtcgccagtggcctatgtgttctggcctcttggctaactgcctttgtgttgaccaagtccttcctgccggtggtgtcaaccttcggcctgcaggtgccattcttcttttttgccgccatctgccttgtaagccttgtgttcacaggatgctgcgtgcccgagaccaaaggacggtctctcgagcaaatcgagagcttcttcaggactggccgcagaagctttctcaggtag

SEQ ID NO: 134929 - DNA, 441 bp, synthetic construct
  misc_feature 1..441: note = Description of Artificial Sequence: Synthetic coding sequence
  source 1..441: mol_type = other DNA
atgatcttgaacgacctgctcggtaggaaactctctatcatgttctccgcagttccatctgcggctgggtacgctcttatggcgggagctcacggactttggatgctacttctcggcagaaccctcaccggctttgcaggcggtttgactgccgcttgcatacctggtctgaccctcccatcccgaccagggcttggaacttccattttttccaagacctggtgcggagggtgcgtactgcaggtgtatgtctcagaaattgctccgcctggtgtgcggggggcgctgggcgcaacgccccagctcatggccgtgtttggaagtttgtccctgtacgctttagggaaggatgaggaggcattgcgggccctcgcctggttgcgtggaaccgatgttgatgtgcattgggaattcgagcaaatccaggacaacgtcagatag

SEQ ID NO: 134930 - DNA, 660 bp, synthetic construct
  misc_feature 1..660: note = Description of Artificial Sequence: Synthetic coding sequence
  source 1..660: mol_type = other DNA
atgcaggagcctctcctgggggcggagggccccgattacgacaccttcccagaaaaacctcccccctccccaggggacagagctagagtgggaaccttgcagaacaaaagggtgttccttgccacatttgctgcagttttgggtaattttagtttcggttacgcgctggtttatacatcaccggttatccctgctttagaaaggagcctcgatccagacttgcatttgactaaatctcaggcaagctggttcggctccgtatttacactgggtgctgcagcgggaggattgagcgcgatgatcctgaatgatctgctgggaagaaagttatcaattatgttcagcgccgtaccttctgccgctggctatgccttgatggctggagcacacggcctgtggatgttgctcctgggcaggacattgacgggcttcgccggggggcttacggccgcctgcatccctgtgtatgttagcgagattgcacctcccggggttcgcggggccttgggcgcaacacctcaactcatggccgtgtttggcagcctgagtttgtatgccctaggcactaaacgaccctgcggccgatggcctggttgtgtgggccggaccagcatgagcacagggtcgtcttctagatcacgcaccactagcggagattag

SEQ ID NO: 134931 - DNA, 1539 bp, synthetic construct
  misc_feature 1..1539: note = Description of Artificial Sequence: Synthetic coding sequence
  source 1..1539: mol_type = other DNA
atggagaacaaggaggctggcactccaccaccaattccgtctagggaagggcgactccagcctactctgctgcttgcaactctgagcgcagcttttgggtctgcattccaatacggttacaacctttcagtggtgaacacccctcataaggtgtttaagtcattttataatgagacctattttgagcgccatgctaccttcatggatggcaaactgatgctcttgttgtggagttgcacagttagcatgttccccttaggcgggctgttgggatccctcctcgtcggactactggtggatagctgcggcagaaaaggcactctgctgattaacaacatattcgccatcatccctgccattctcatgggcgtaagcaaagtggccaaggcttttgaactgattgtgttcagcagagtggtgctgggagtctgtgctggaatcagctacagcgctcttcccatgtacctaggagagctggctccaaaaaacctgcgtggcatggtcggcacgatgactgaggtgtttgttatcgtgggcgtgttcctcgcacagatttttagtcttcaggccattctgggaaatcctgccggctggccagtactgctggctctgaccggcgtgccagcgctgttgcagctcctgaccctgccgtttttccctgagtcccccagatactctctgatacaaaaaggtgacgaggcgaccgcccgccaggccctgaggaggctcagaggccacacggacatggaagccgagctcgaggacatgagagctgaggcccgcgcagagcgggctgaagggcacctgtctgtgctgcatctgtgcgcgctgaggagccttcgctggcagcttctctcgatcatcgtgctgatggccgggcaacagctgagtggaattaatgccataaactactatgccgacactatttacacctccgccggggtagaggcagcacatagtcaatacgtgacggtggggagcggggtcgtcaatatagttatgacaattacttccgccgttctggtggaacgacttgggagacgccatctgttactggccggatacggaatctgcggctctgcgtgcctcgtgctgacagtggtgctgctgtttcagaatcgggtgcccgaactgtcatacttgggcatcatttgcgtgttcgcctatatagcgggtcactcaatcggcccgtcaccagtgcccagcgtcgtgcgcactgaaatcttcttgcagtcatcgcgaagggccgccttcatggtcgacggggccgtccattggctgaccaatttcatcataggctttctgttcccttcaattcaggaagccattggggcctactcttttatcatatttgctggcatctgcttgctgactgccatctacatctatgtagttattcccgagaccaaagggaagacattcgtggaaatcaacagaatctttgctaagcggaatagggtcaagctgccagaagaaaaggaggagacaattgacgcaggaccgcccaccgcttctcctgctaaagagacttccttctag

SEQ ID NO: 134932 - DNA, 804 bp, synthetic construct
  misc_feature 1..804: note = Description of Artificial Sequence: Synthetic coding sequence
  source 1..804: mol_type = other DNA
atgacgtgctccctgggcaaagtttacattagtgaaattgcctatcccgcagtgcgggggctgttagggagttgtgtgcaactgatggtggtggttggaatcctactggcatacctcgcaggttgggttttagagtggcggtggctcgcggtgctgggttgcgtgccccctagcctgatgcttctgctgatgtgcttcatgccagagacacccagatttctgttgacccagcatcgcaggcaagaggccatggccgctctcaggttcctatgggggtcggagcagggctgggaggacccccctattggtgccgagcagtcgtttcatctagcactgctgagacagcccggtatctataagccattcattatcggtgtatctctgatggctttccagcaactgtccggcgtgaacgctgtgatgttctacgccgaaaccatcttcgaagaagccaagtttaaggattcttcgttagcctcagtggtggttggggtaattcaggtcctgttcaccgcagtggccgccctcatcatggatagggccggcaggcggctgctgctggtgttgtcaggagttgtgatggtgttttccacaagtgccttcggagcatatttcaagctgacacagggggggccagggaacagctcccacgtggcgatatccgcacccgtctcggcccagcccgtggacgcaagtgttggcttggcatggctggctgttgggtcaatgtgcctgttcatcgctggattcgcagtgggctggggaccgataccttggctcctgatgtccgagatctttccatag

SEQ ID NO: 134933 - DNA, 645 bp, synthetic construct
  misc_feature 1..645: note = Description of Artificial Sequence: Synthetic coding sequence
  source 1..645: mol_type = other DNA
atggcttttcagcaactcagcggtgtgaatgccgtaatgttctacgcagaaactatctttgaggaagccaaatttaaggactcctccctcgccagcgtcgtcgtgggggtcattcaggtcttgttcacggcagtggctgcccttattatggaccgcgccggccggcgactgcttctggtcttgtcgggggtcgtcatggtgttctcaacgtccgcatttggcgcctacttcaaacttacacagggcggccccggcaacagcagtcatgtggccatcagcgcacctgtatccgctcagcctgtcgatgcctcggtcggacttgcctggctggcagtggggagcatgtgcctcttcatagccggcttcgcggttgggtggggccctatcccatggctcctcatgtcggagattttccctttacacgtcaagggtgtggccaccgggatctgcgttctaaccaactggcttatggctttcttggtaaccaaggagttcagctctcttatggaggtgctgagaccatacggcgctttctggctggcaagcgcattttgtattttctctgttctcttcacgttattttgcgttcctgagactaagggcaaaactctcgaacaaatcaccgcccatttcgaaggaagatag

SEQ ID NO: 134934 - DNA, 1236 bp, synthetic construct
  misc_feature 1..1236: note = Description of Artificial Sequence: Synthetic coding sequence
  source 1..1236: mol_type = other DNA
atgactccagaagatccggaggagactcaaccattactgggtcctcccggagggtccgccccccggggccgacgcgtcttcctggcggcttttgccgccgccctgggaccccttagttttggattcgcactcggctactcctcgcccgcaattccctcactgcaacgcgccgccccaccggcccccaggctcgatgacgccgcagcaagctggttcggcgccgtggttaccctcggagcagccgcggggggcgtgctcggtggctggttggtcgatcgcgcagggcgaaagctgtctctcctgctatgtagtgtgcccttcgtcgccggattcgccgtgatcacagcggctcaggacgtctggatgcttctcggcgggaggttactgactggactggcttgtggagtggccagtcttgtggcacccgtgtatatcagcgaaatagcttatcctgccgtgcggggcctcctgggatcatgcgtccagctcatggtcgtggtgggcattctactcgcgtatctggccggttgggttctcgagtggcgctggctggccgttttaggctgtgtgcctccatccctgatgttgttgctgatgtgtttcatgcctgagacaccacggttcctactcacccagcatcggcgtcaggaagctatggcagccctaaggtttctctgggggagcgagcaaggctgggaagacccccccattggggccgagcagtctttccatctggctctcctgcgtcagcctggaatatataagcccttcattatcggagttagcttgatggcattccagcaactgtcgggcgttaacgcagtcatgttctatgccgaaaccattttcgaggaagcaaaatttaaggactcttctcttgcatctgttgttgtgggcgtgattcaggtgctgtttacagcggtggctgcactgattatggatcgggccggacgccggctcctgctggtgctgagcggggtggttatggtattctcgacttcagccttcggagcctattttaagcttactcagggtgggccaggtaattcatcccacgtagcgatctcagcccccgtgtccgctcagcccgtcgacgcctctgtcggcctggcctggctggcagttggcagcatgtgcctgttcatcgctggaggcccccaagccctatggtctttgctcgcctgcctccgctttctacatctgcagtgtccttttcacttcgttctgtgtccttag

SEQ ID NO: 134935 - DNA, 1434 bp, synthetic construct
  misc_feature 1..1434: note = Description of Artificial Sequence: Synthetic coding sequence
  source 1..1434: mol_type = other DNA
atgacgccagaggacccagaggagacccaaccgctgctcggacctcccggggggagcgctccacgcgggcgaagggttttcctggcagctttcgcagcggctctggggcctctttcatttggtttcgctctcggatattctagtcctgcaatacccagtcttcagcgcgctgcaccacccgccccaaggctggatgacgcagctgcctcatggtttggagccgttgtgaccttgggtgctgccgctgggggggtcctcggaggctggcttgtagaccgcgccggtcgtaagctgtctctgcttctctgttccgtccccttcgtagcagggtttgccgtgataaccgctgcgcaggacgtatggatgcttttgggcggtcgtctgctgaccgggctggcttgtggagtggcctcattagtggctcccgtgtacatttctgaaatagcctaccccgcagtacgcggcttgcttggaagctgtgtgcagttaatggttgtagtgggtatccttctagcctatttagcgggatgggtgttagagtggagatggcttgcagtattgggatgcgtcccccccagtctaatgttacttttaatgtgtttcatgcctgagacccctagatttctgctcacccagcataggcggcaggaggccatggctgctctgaggttcctgtggggatcggaacagggttgggaagatccaccgatcggggctgagcagtcttttcacttagctcttctccgccaaccggggatctacaaacctttcatcattggggttagcctcatggcgtttcagcagttgagcggggtgaacgccgtcatgttctacgcagagacaatctttgaagaagctaagtttaaggattcttcactagccagcgtggtcgtgggggttattcaagtgctcttcaccgccgtcgccgccctaattatggaccgggccgggcgcaggctcttgctcgttctgtcgggagtcgtgatggtatttagcacatcagcattcggtgcctactttaagctcacacagggtggccccgggaactcctctcatgtagcgatttctgctccagtctccgcccagcccgtggacgcgagtgtgggactggcctggctggccgtgggaagtatgtgtttgtttatcgcaggctttgctgttggatggggccccatcccatggttgctgatgtctgaaattttcccactgcatgtaaagggagtggccaccggcatttgtgtgttgaccaactggcttatggcctttctggtaactaaggagttctcatcactgatggaagtgctgcgcccctacggagctttttggcttgcgtccgcgttctgcatctttagcgttctttttaccctgttctgcgtgcctgaaaccaagggtaagacattggagcagatcacggctcattttgaagggagatag

SEQ ID NO: 134936 - DNA, 510 bp, synthetic construct
  misc_feature 1..510: note = Description of Artificial Sequence: Synthetic coding sequence
  source 1..510: mol_type = other DNA
tgaggccggagagtgttcctggccgccttcgccgccgccctcggtcctctgagctttggatttgccctgggctactcctctcccgccataccctccctgcagcgggcggctccacccgcaccgaggctggatgatgccgccgcgagttggtttggcgtgtatatcagtgaaattgcatatccggccgtgcgcggtctattagggagctgcgtgcagctgatggtggttgtaggaatcttgcttgcctatctcgccgggtgggtcctggaatggcgctggctcgccgtgttgggctgcgtgcctccttctcttatgctattgctgatgtgtttcatgcctgagacgcctcgatttctcttgacacagcaccggcgacaggaggcgatggcagcgctgcggttcctgtggggatccgaacagggctgggaagatcccccaattggcgccgagcaacagctgtccggtgtgaatgccgtgatgttctatgcggagacgatttttgaagagtag

SEQ ID NO: 134937 - DNA, 771 bp, synthetic construct
  misc_feature 1..771: note = Description of Artificial Sequence: Synthetic coding sequence
  source 1..771: mol_type = other DNA
atgaccccggaggatcccgaagagacgcagccactgctggggccacctggcggatccgcacccaggggtcggagagtgtttttggcagcttttgctgctgcactgggaccattgagctttggcttcgccctcggatactcctcgccagcaattccttccttacagagggcggcccccccagccccaaggcttgacgacgcagctgcttcgtggttcggcgtctatataagcgaaattgcttacccagcagtgcgggggctcctgggaagctgtgtgcagctgatggtggtggtgggcatattgctagcatatctcgctggctgggtcctggagtggcgctggctagcagtcctgggatgtgtgcctccaagcctaatgcttcttttgatgtgtttcatgcctgagacccctcggtttctgttaacacagcataggcggcaggaggcaatggccgctctcaggttcctatggggatccgaacaaggctgggaagatccaccgattggggcggaacagagcttccacttggctctgcttaggcagcccggcatatataaacccttcatcatcggtgtgtcactaatggcgttccagcagctgtctggggtgaacgcagtaatgttttatgccgaaactatttttgaagaggccaagttcaaggattcctctttagcatctgtggtcgtcggagtgatccaggtactctttacagccgtggccgcgctcatcatggacagggccggtaggcgcctgctgctcgtcctctcttag

SEQ ID NO: 134938 - DNA, 804 bp, synthetic construct
  misc_feature 1..804: note = Description of Artificial Sequence: Synthetic coding sequence
  source 1..804: mol_type = other DNA
atgacctgtagcctaggaaaagtttacatttctgagattgcttatccagctgttagaggcctattaggtagctgtgtgcagctcatggtcgttgtaggcattcttctggcatacctggctggttgggtgttggagtggaggtggcttgccgtgcttggctgtgtgccgccgagtctcatgctgttactcatgtgcttcatgcctgagaccccaagatttcttctcacccagcataggaggcaggaggctatggcagctctccgtttcctttggggctcagagcagggatgggaggaccccccgatcggtgctgagcagagtttccatcttgcattgctgcggcagcctgggatctataaacccttcatcataggcgtcagtcttatggccttccagcaactatccggcgtgaacgctgtaatgttctacgcggaaacaatctttgaagaagcaaagttcaaggatagctccttggcaagcgtcgtggttggggtcatacaggtgctgttcacagccgtggctgccttaatcatggatagagccggcagaagattgctgttagtcctatcgggtgtggttatggtcttttcaacctcggccttcggcgcctattttaagctgactcagggcggccccggcaactcttcccacgtggccatatctgcccccgtgagcgcccagcccgttgatgcatcggtgggactggcatggttagccgtcggtagcatgtgcctattcatcgctggatttgcggtgggttggggaccaattccatggctgctcatgagtgagatattcccatag

SEQ ID NO: 134939 - DNA, 831 bp, synthetic construct
  misc_feature 1..831: note = Description of Artificial Sequence: Synthetic coding sequence
  source 1..831: mol_type = other DNA
caactgatggtcgtggtgggaattctgctggcttatctagccggctgggtcctggagtggcgatggctggccgtccttgggtgcgtgcctccctccttgatgctcctgctaatgtgctttatgcccgaaacgccaaggttcttactgactcagcacagacgtcaggaggctatggctgcactaagattcctgtggggctcagagcagggttgggaggaccctccgataggggctgagcagtctttccacctggcactgttacgtcaaccaggtatatacaagccctttataatcggggtgtctctgatggccttccagcagctgagcggcgtcaatgctgtgatgttttacgcagagacaatctttgaagaagctaagtttaaagatagtagcctcgcgtcagtggtggtgggggtgatccaagttctgttcaccgccgtagccgcattgattatggacagggcagggcgccgattgctgcttgttctctctggggtcgtgatggtgtttagcacctcagcctttggcgcctatttcaaactgacacaggggggaccagggaattcaagtcacgtagctataagcgcacctgttagcgctcaacccgtagatgcctccgtgggtttggcctggcttgcagtaggcagtatgtgcctcttcatcgcaggatttgccgttgggtggggacccatcccatggctgctaatgtcagagatctttcccttacacgtgaagggcgtcgccacagggatttgtgtgctgacgaactggttaatggcgttcctggtcacaaaggaattttcttctctgatgttgttgctcctgctgtag

SEQ ID NO: 134940 - DNA, 726 bp, synthetic construct
  misc_feature 1..726: note = Description of Artificial Sequence: Synthetic coding sequence
  source 1..726: mol_type = other DNA
atgacgtgctccttgggaaaagtctatatttctgagattgcctacccggctgtgcgcggactgctggggagctgtgtgcagctcatggtggtggtgggcattctgcttgcgtacttggccggctgggtgctggagtggcgttggctggccgtattagggtgtgtgccaccctctctcatgctactgttgatgtgctttatgccagagaccccaaggttcctgctcacccagcacagacgtcaggaggcaatggcagccctgcgtttcctgtggggaagtgagcaggggtgggaggatccaccaatcggtgccgagcagcagctcagcggtgtcaatgctgtaatgttctacgctgaaacgatttttgaggaagctaaattcaaggatagttccctggctagtgtcgttgtgggagttattcaagtgctttttaccgcagtagccgccctgatcatggatagggctgggcgcagactattgcttgttctcagtggcgtggtgatggtcttttccacttccgcctttggagcctacttcaagctgacccagggaggtcctggcaactcaagccatgtcgcgatctccgcaccggtctccgcccagccggtggatgcctcagtgggactggcctggctggcagtgggctcaatgtgcctgtttattgctggattcgcggtaggctggggcccgatcccctggcttctcatgtcagaaatttttccctag

SEQ ID NO: 134941 - DNA, 798 bp, synthetic construct
  misc_feature 1..798: note = Description of Artificial Sequence: Synthetic coding sequence
  source 1..798: mol_type = other DNA
atggtcgtagtgggcattctgctggcttacctggcaggctgggttttggagtggaggtggctggccgtgctcggctgcgtgccccctagcctcatgcttctgctcatgtgctttatgccggagacgccacgctttcttctaacccaacatagaaggcaggaggctatggccgccctgagatttctgtgggggagcgagcagggttgggaggaccccccaattggcgctgaacagtcttttcacctggcgctattacggcagccaggcatctataagccgttcatcatcggtgtcagtctgatggcgtttcagcaactgtctggcgtcaacgctgtgatgttctatgccgaaactatcttcgaggaggcaaagtttaaagacagctctttggccagtgtcgtcgtaggagtcatccaggtgctgtttacagccgtcgccgctctgatcatggatcgtgcaggacgtcggcttctccttgtgctctccggcgtggtgatggtcttttccacgtcagcctttggcgcatacttcaagttaacacagggaggcccagggaattcaagtcacgtggccatctcagcccctgtcagtgcacagcccgttgatgcttcagtggggttggcttggctggcggtagggagcatgtgcttatttattgcgggatttgcagtgggatggggtcctatcccctggctgctgatgagtgaaattttcccattgcatgttaaaggcgtcgccaccggtatatgtgtcctgacaaattggctgatggcttttctcgtgacaaaggagttttag

SEQ ID NO: 134942 - DNA, 1623 bp, synthetic construct
  misc_feature 1..1623: note = Description of Artificial Sequence: Synthetic coding sequence
  source 1..1623: mol_type = other DNA
atggcccgaaagcagaacaggaacagtaaggaactggggttggtcccactgacagacgacacatcgcacgccggtccccctggccccggcagggcgcttctggaatgtgatcacctgcggagcggggtccccgggggccggcggagaaaggattggtcttgctccttactcgtggcttccctggccggcgcgtttgggagtagcttcctgtatgggtacaacctgagcgtggtgaacgcccccacgccctacattaaagccttttacaacgaatcatgggagcgtagacatgggagaccaatcgatcccgacacactcaccctgttgtggtccgtgacggtgtcaatcttcgccataggcgggctcgtgggaacactgatagtaaaaatgattggcaaggtgcttgggcggaagcacaccctgttagccaacaatggctttgcaatctccgccgccctcctgatggcctgctccctccaagccggagcattcgagatgctgatagtaggtcgctttatcatggggattgacggcggtgtggcactctccgtcttacccatgtatctctctgaaataagccctaaggaaattcggggctccttggggcaggtgactgctatttttatctgtattggcgtattcaccggccaactgctcggtctcccagaattgttgggaaaggagagcacctggccctacctttttggggtcatcgtcgtccctgcggtcgttcaacttttatctcttcctttcctaccagactcccctagatacctgctgttagaaaagcacaatgaggcccgtgccgtgaaggcattccagaccttcctgggcaaggctgacgtctctcaggaggtggaagaagttcttgccgaatcccgggtgcaaaggtcaatcagactcgtgtccgtgctggaactcctgagggccccttatgtgcgatggcaagtggtgactgtgatcgttaccatggcttgttatcagctttgtggccttaatgctatctggttttatacaaatagtatcttcggcaaggcgggaattcctcccgccaagattccttatgttaccctcagtaccggcggtatcgagacgctggcggccgtgttttctggtctggtcattgagcatctgggccgtcgccccctccttattggcggcttcgggctcatggggttattttttggcaccctgactattaccttaaccttgcaggatcatgccccatgggtgccttacctttccatcgtcggaattctggccatcatcgcgtccttttgttctggcccaggcggcatccctttcatcctaacaggcgaattcttccagcaatcccagcgccccgccgcgttcattatagctggcacagttaattggctctctaatttcgctgtaggcctgctgttccccttcatacagaaatccctggacacctactgtttcttggtgtttgctaccatatgtataacaggagccatttatctctactttgttttgcctgaaacaaaaaataggacctacgccgaaatctctcaggctttcagcaaaagaaacaaggcttatcctcccgaggagaagatcgatagcgctgtaacagacggaaagattaacgggcgaccgtag

SEQ ID NO: 134943 - DNA, 1536 bp, synthetic construct
  misc_feature 1..1536: note = Description of Artificial Sequence: Synthetic coding sequence
  source 1..1536: mol_type = other DNA
atgaaattgagtaaaaaggacaggggcgaggacgaggagtccgactcagctaaaaagaaactcgattggtcgtgctcgttactggtggctagcttggccggagccttcgggagttcatttttgtacggctacaacctgagtgttgtcaacgcgcccaccccatacataaaggcattctacaacgagtcatgggagcgaaggcacgggcgtcccatcgaccctgacaccctcacactgctttggtcagttacggtgtcaatttttgccatcggtggactagtcggaaccttaattgttaaaatgattgggaaagttttaggccgcaaacacacactgcttgctaacaacggcttcgcaatctctgctgccctgttaatggcctgttcgcttcaggcaggagcgtttgaaatgctcattgtgggccgcttcattatgggcatcgatgggggagttgccctgagcgtgctccccatgtatctttccgagatttcaccaaaggaaatcagaggatccctggggcaagttaccgccatatttatctgtatcggggtgttcacgggccagctcctgggcctacctgaactgctcggtaaagagtctacatggccctacctcttcggtgtgattgtggtgccggcagtggttcagctgctctccctgccgtttttgccagactcgccccggtacctcctgctggagaaacataatgaggcacgagccgtgaaggcttttcaaacctttctggggaaggccgatgttagccaagaagtcgaggaggtgctggcggagtccagagtacaacgatccattcgcttggtaagcgtattggagctactacgggcgccatatgtccggtggcaggtcgttaccgtgatcgtgaccatggcgtgctatcagctgtgtggactcaacgctatttggttctatactaatagcatttttggtaaagctggaatccctccagctaagatcccctacgtgacactgtccacggggggtattgaaactctcgccgcagtattttccggtctggtaattgagcatctggggcgccgccccttgctcattggtgggtttggcctgatgggcctgttctttggaaccttaacaattactctcacccttcaggaccacgcaccctgggtgccttaccttagtattgtggggatcctggcaattattgcatcattctgttccggccctgggggaattccatttatcctgacgggcgagttctttcagcagagccagaggcccgccgcatttattatagctggaactgtaaactggcttagcaacttcgccgttggactgctgttcccatttatacagaaatccctggatacatattgttttctggttttcgccacaatatgtatcacaggcgccatttacctgtacttcgtgctccctgagacaaaaaatcgcacgtatgccgagatttcccaggccttctctaaaaggaacaaggcctatcctcccgaagagaagatagacagcgcagtcacggacggcaaaatcaatggaagaccctag

SEQ ID NO: 134944 - DNA, 1536 bp, synthetic construct
  misc_feature 1..1536: note = Description of Artificial Sequence: Synthetic coding sequence
  source 1..1536: mol_type = other DNA
atgaaactgtcaaagaaagaccgcggagaagacgaggaatccgattccgctaagaagaaactcgattggagctgttccctcctggtcgcttcgctggcgggggcatttggatcaagtttcctgtatggatataacctctctgtggtgaatgcaccgacaccctacatcaaagccttctacaacgagtcatgggagcggcgacacggccggccgatcgacccagatacgctgactctgctgtggagcgtcactgttagtatcttcgctatcggtggtctagtcggcactctgatagtgaagatgatcggaaaagtgctgggccggaagcacactctacttgctaataacggcttcgcaatcagcgcggctctgctcatggcttgctctctgcaagctggggcctttgagatgctgatcgtcggacgtttcatcatgggaatcgacggcggagttgccctgtccgtgttgccgatgtatctgtccgagattagcccaaaggagatccggggatctctcggacaggtgactgctatctttatctgcatcggagtgttcacaggacagctactcggcctgcctgagctgcttggtaaggagtccacctggccttatttgtttggggtgattgtcgtcccagccgttgttcaactgctctctctgcctttcctgccggacagccctagatatctcttgctggagaagcataacgaagctcgagcagtcaaagccttccaaacctttcttggaaaagcagatgtgtcccaggaggtggaagaagttttggcagagagcagagtgcaacgcagcatccgtctggtgtccgttctcgagctgcttcgagcgccatatgttcgatggcaggttgtaaccgttattgtgaccatggcctgctaccagctgtgtgggcttaacgccatctggttttacactaattcaatttttggcaaggcgggaataccacctgccaagattccctacgtgaccttgtctacgggagggatcgaaacactggccgctgtgttcagtgggctggtgattgaacacttggggaggcggcccctgctgattgggggatttggcctgatgggcttgttcttcggtacattaacaatcacacttacactccaggatcacgcgccctgggtaccctacctgagtatcgtgggcattcttgctattattgcgtctttttgttccgggcctggtggaattccctttatcctgaccggcgaattcttccaacaatctcagcgtcccgctgcattcataatagcaggcaccgttaactggctttcgaatttcgccgtcggactcctatttccattcatccagaaatccctggatacctactgcttcttggtttttgcaactatatgtataaccggagcaatctatctttacttcgtattgcccgagaccaagaatcggacctacgccgaaatttcccaggccttttccaaaaggaacaaggcttatcctcccgaggagaaaatcgacagcgcggtgacggacggaaagataaatgggagaccttag

SEQ ID NO: 134945 - DNA, 597 bp, synthetic construct
  misc_feature 1..597: note = Description of Artificial Sequence: Synthetic coding sequence
  source 1..597: mol_type = other DNA
atgaaactgagtaagaaggacagaggcgaggacgaagagagcgactcggctaagaagaagctggattggagctgttctcttctggtcgcttccctagccggggcctttgggtcttccttcctgtatggatacaacctctccgttgtaaatgcgcctaccccctatattaaggctttctataacgaaagctgggaacggcggcacggccgtcctatcgatccagatacccttacgctcctgtggtccgtgacagtctccatcttcgcgattggcggtcttgtggggacgctgatcgtcaaaatgattggcaaggtgctgggacggaagcacacactgttggcaaacaatggattcgcaatttccgcagcccttcttatggcgtgttcccttcaggctggcgcttttgaaatgctgatcgtggggaggtttatcatgggcattgatggaggagtcgctctgtctgtgctgcccatgtatctctctgagattagtcccaaggagatcagggggtctttgggccaagtcaccgcaatattcatttgtataggtgtctttactggccagctcctcggcctccctgaactgctcggcaagtag

SEQ ID NO: 134946 - DNA, 735 bp, synthetic construct
  misc_feature 1..735: note = Description of Artificial Sequence: Synthetic coding sequence
  source 1..735: mol_type = other DNA
atggagcagcaagaccagagtatgaaggaaggaaggctgaccttagtattagcgctcgcgacactgatcgctgcttttggcagctcatttcagtatggctataacgtcgccgccgtgaacagtccagctttgttgatgcagcaattctacaatgagacatattatgggaggactggcgaatttatggaggacttccctttgaccctgctgtggtcagtgactgtctcaatgtttccatttggggggtttattggcagcttgctggtcggccctctggtgaataaattcggcagaaaaggagcgttactgttcaacaatattttctccattgtccctgcaatcttaatgggatgctcgcgagtagcgacctctttcgagcttattattatctcccggctgctggtcgggatctgcgccggcgtcagttccaatgtcgtgccgatgtacctgggcgagttagctccaaaaaaccttcgtggagcccttggcgtggtacctcagctctttatcacagtggggatcttggtggcccaaatttttggactgcggaatttattggcgaacgtggatggtgaattccggacgagccgtgaacatcctcacccttttactaccactctgggtcccctccttgtattccaatcccaccaccaccgcaccgggctcagtgcagattggtccctgctaaccggatggatgagcctaggaggccccagctgccctgagcctacatag

SEQ ID NO: 134947 - DNA, 1506 bp, synthetic construct
  misc_feature 1..1506: note = Description of Artificial Sequence: Synthetic coding sequence
  source 1..1506: mol_type = other DNA
atggagcagcaggatcaatccatgaaggagggtaggcttacactggttcttgcactggccaccctaatcgccgcgttcggttcctcgttccagtatggctacaacgtggctgctgttaactcccctgccttactcatgcagcagttctacaacgagacgtactatgggcgaactggggagtttatggaggacttccctctcacactgctttggtcagtcaccgttagtatgtttccattcggaggcttcatcggcagtttactggtaggtccactcgtgaataagtttggtagaaaaggagctcttctatttaataacatcttttcaatagtgcccgccattctgatgggatgttctagggttgcaacaagcttcgaactgatcataatctccaggttgctggttggcatctgtgctggcgtctcttctaacgtggtgccaatgtacctgggcgagttggcccccaagaatctccgcggggccctgggagtggtgccacaattgttcataaccgttggcatcttggtcgcacagattttcggactcagaaacttgctggccaatgttgacgggtggcccatcctactggggctcactggagtgcccgcagcactgcagctcctgctcttgcctttctttccagagagtcctagatatctgttgatacaaaaaaaagacgaggctgcagcaaaaaaagcgctccaaactttgcgtgggtgggactctgtggaccgcgaagtcgcagaaatccgccaagaggacgaggctgagaaagccgcgggatttatatctgtgctgaagctgttcagaatgcgctcgctgcggtggcaattgctgagcattatcgtactcatgggcggccagcagttgtctggagtgaatgctatctactactacgctgaccagatttacctaagtgccggtgtccccgaggaacatgtgcagtatgtgacagccggaactggcgccgtaaacgtggtgatgaccttttgcgccgtctttgtcgtcgaactgttggggagaaggttgctgttgttgctgggattttccatctgcctgatcgcctgttgcgtgttgactgcagcactggctctgcaggatactgtcagctggatgccgtacatctctatcgtgtgtgtcatttcctatgttatcggccatgccctggggccaagcccaatccctgccctcttgattacagaaatctttctgcagtcctcaaggccctcagccttcatggtcggggggagcgttcactggctgagtaacttcactgtaggtctgattttccctttcattcaagaagggctgggaccctactctttcattgtgttcgctgtaatttgcttgcttacgacaatttatatcttcctcatcgttccggaaacaaaagcgaaaacattcattgaaattaatcagatctttactaagatgaataaggtcagcgaagtgtacccggagaaggaagagctgaaagagttgcctccagtcacgtctgagcaatag

SEQ ID NO: 134948 - DNA, 1455 bp, synthetic construct
  misc_feature 1..1455: note = Description of Artificial Sequence: Synthetic coding sequence
  source 1..1455: mol_type = other DNA
atggagcagcaggaccagagcatgaaagagggtcggctgaccttggtccttgccttggctgccgttaatagccctgccctccttatgcagcagttctacaatgaaacttattacggcagaactggcgagtttatggaagatttccccttgaccctgctgtggtccgttaccgtgtctatgttcccctttggaggcttcataggttcactgctggtaggccccctggtcaataagttcggcagaaaaggcgcacttctgtttaacaatatcttcagcattgtccctgccatcctgatgggctgctcgcgggtggccaccagttttgaactcattattatttcacggttactggtggggatttgtgccggtgtttctagtaatgtcgtgcctatgtatctaggggaactcgcacccaaaaacttacggggtgcactgggagtggtgccacagctgttcataactgtgggcattctcgtggctcagatcttcggccttcggaatctgctggccaacgtagacggatggccgattttattgggtttgacgggggtgcctgcagctttgcagcttttgctcctgccgttcttccccgagagccctcgttacctgctcatccagaagaaagacgaggctgcagcaaaaaaggcccttcagacactgcggggctgggattcagtcgaccgggaagtggctgagattcgacaagaggatgaggctgagaaagcggcaggctttatatctgtgcttaagctgttccgaatgagaagcctcagatggcaacttctgtctatcattgtgttgatgggagggcagcagctctccggagtcaacgccatatactactacgctgaccagatttacctgtcggctggagtacccgaggaacatgtgcagtatgtgactgccgggaccggggccgttaatgtggtcatgacattctgcgcggtgtttgtggtagaattattaggtcgtcgcctccttctgctgctggggttctctatctgcctgattgcctgctgcgtgctgacagcagccttggccttgcaggacaccgtgagttggatgccctatatctcgattgtgtgtgtgatttcctacgtcatcggccacgctctgggccctagccccatacctgcattgctgatcaccgagatctttttacagtcgagtagacctagcgcatttatggtcggcgggtctgtgcactggctatccaatttcacggtgggtctcatcttcccgttcatacaggaaggcctgggtccctactcatttatcgtgttcgccgtgatttgccttctaacaacaatctatattttcttaattgtcccagaaaccaaggcgaaaacatttatcgaaatcaaccagatctttacgaaaatgaacaaggtgtctgaagtgtatcctgagaaagaggaactcaaggaactgcctccagtgacctctgagcagtag

SEQ ID NO: 134949 - DNA, 1161 bp, synthetic construct
  misc_feature 1..1161: note = Description of Artificial Sequence: Synthetic coding sequence
  source 1..1161: mol_type = other DNA
atgggatgttctcgcgttgcgacatcctttgagcttattattataagcaggctgttggttggcatctgtgctggcgtgagctctaatgtggtgcctatgtatctgggcgagctggcccctaagaatctgaggggcgccttgggcgttgtgccccagctgttcatcactgtgggaattctagttgcacagatatttggactgcgcaatctgttggcaaacgtggacgggtggcccattctgctaggcctgacaggcgtccccgcagccctgcagttgctcttgctgccattttttccggagagcccgaggtatctcctaattcagaaaaaggacgaagctgctgctaaaaaggccctgcaaaccctgagaggatgggactcagtggatagggaggtagcggagattagacaagaggacgaagcagagaaagcagctgggttcatctccgttcttaaactctttaggatgcgttctttgcgctggcaattactgagtatcattgtgctgatgggaggccaacaacttagcggagtgaatgcaatctattactacgctgatcaaatttatttgtctgccggcgtgcccgaagagcacgtgcaatacgtcaccgctggtaccggcgccgtcaacgtagtcatgactttttgcgctgtattcgtcgtggaattgttgggccggcggctccttctgctcctcggcttttccatctgtctcattgcttgctgtgttctgactgccgcattggccttacaggatacagtgagctggatgccatacatcagcatagtgtgcgtcattagctacgtgatcggccatgcactcggaccctcccctatccctgccctactaatcacagaaatttttcttcagtcttcaagacccagcgcctttatggtgggcggctctgtgcactggctatccaacttcacagtaggactgatctttccctttattcaggagggcctgggtccttacagtttcatcgtgtttgccgttatttgcctgcttacaacgatttacatcttcttaatcgtccccgagaccaaagctaagacatttatcgaaataaatcaaattttcacaaaaatgaacaaagtaagtgaagtctaccccgagaaagaggagttgaaggaactgccccccgtgacatccgagcagtag

SEQ ID NO: 134950 - DNA, 1329 bp, synthetic construct
  misc_feature 1..1329: note = Description of Artificial Sequence: Synthetic coding sequence
  source 1..1329: mol_type = other DNA
atgctggagttgcattcactgaccgcttcctccatcatgcgggtcttgatcatgagagcgcccctccgagaagcgccaccagaaaaatttgcattgctcctgagcggcagtcccgggaaaggtgctcttttatttaataacatcttcagcatagtccccgccattctgatgggctgttccagggttgccacgagcttcgagctgataatcatatccaggcttctggtgggcatttgcgccggggttagcagcaatgtggttcccatgtacctcggcgaactggcccctaagaatcttcggggagctctcggggtggtaccacagctctttattaccgtggggatactcgtggcacagatattcgggctgcgcaatctgcttgccaacgtggatgggtggcccattcttctgggcttgaccggcgtgcccgccgccttacaacttctgctcctacctttctttccagagagcccaagatatttgctgattcagaaaaaggatgaagctgccgccaagaaagcactgcagacgctgcggggctgggacagcgtggaccgggaagtggccgagatccgccaggaggacgaggcagagaaggctgccggattcatctcagtgctgaagttatttagaatgcggtccctgcgttggcagctgctctcaatcatcgtattgatgggcgggcaacagctatccggcgtgaacgcaatctactactatgcagatcagatctatctgagtgccggcgtccctgaagagcacgtacagtatgtgacagctggcactggcgccgtgaatgtcgttatgactttctgtgcagtctttgtggtagagctgttggggcgccggctactgctgctgctgggattttccatctgtctcattgcctgctgcgtattgacagcagccctagccctccaggataccgtgtcatggatgccctacataagcatagtgtgtgtgatctcctatgtgatcggacatgctctaggaccaagcccaattccagccctgctcatcaccgagattttcctgcaatctagccgccctagtgcttttatggtaggcggctcagtgcactggctctcaaattttaccgtgggcctgatcttcccattcatccaggaagggctcggcccctactccttcatcgtgtttgcggttatttgcctgcttaccacgatttacatatttctgatcgtcccagagaccaaggccaagaccttcatcgagataaatcagatatttaccaagatgaacaaggtttccgaagtctaccccgagaaagaagagcttaaggaactgccaccggtgaccagtgaacagtag

SEQ ID NO: 134951 - DNA, 2040 bp, synthetic construct
  misc_feature 1..2040: note = Description of Artificial Sequence: Synthetic coding sequence
  source 1..2040: mol_type = other DNA
atggccaccttgatcacatctaccacagcggcaaccgctgcgtccggtcctctagttgattatctatggatgctcattctaggattcatcatagcctttgttctagcatttagcgtcggcgccaatgatgtggccaacagttttggcactgccgtaggtagtggtgtggtgacattgaagcaggcatgcatcctggcttcaatttttgaaacagtcggcagtgtcctattgggggctaaagtgtccgagacaatacgtaaaggcctgatagacgtggagatgtacaactccacacaggggctgctcatggcgggttcagtgagcgcaatgttcggctcagcagtttggcagttggtggcttccttcctgaagttacctatttctggaacccactgtatagttggggccacaattggcttttcccttgtggccaaaggccaggagggcgtcaaatggagtgaactgatcaagatcgtgatgtcctggtttgtatcacccctactttccggaatcatgagtggcatccttttcttcttggtgagagccttcatcctacataaggccgatcccgtgcccaatgggctgagagcgttgcctgtattctacgcatgtaccgttggcataaatctgttctcaatcatgtatacaggcgccccgctgttgggatttgataaactgcccctttgggggacaatcctgatctctgtcggttgtgctgtcttttgcgccttaatagtgtggttcttcgtgtgcccacgcatgaagcgcaaaattgagcgagagattaaatgttccccatccgagtcccctctcatggaaaagaagaattccctgaaagaggaccatgaagaaacaaagctcagtgtcggcgatattgagaataagcaccccgtgtctgaggtagggccagctacagtgcccttgcaggccgtggtggaagaaaggactgtctcatttaagctgggggacttggaggaggctccagaaagggaaaggctgccctctgtagacctgaaggaagaaacatccatagactcaacagtcaatggggctgtgcagcttccgaacggaaacttggtgcagtttagtcaggccgtgtcaaaccagatcaactctagcggacattatcaataccatactgtgcataaagactcggggctttataaagagctcctgcataaactgcatttggccaaagtgggagattgcatgggggattccggggacaaaccgctcaggcggaacaactcatatacctcttacacaatggcgatttgcgggatgcccctcgattccttccgagccaaggaaggggaacagaagggcgaggagatggagaaactgacttggccaaatgcggacagcaagaaacgaatccggatggattcctacactagttactgtaatgcagtaagtgatctgcattccgcatcggagattgatatgtccgtaaaggccgagatgggactcggcgatagaaagggctccaatgggtcattggaagagtggtatgaccaggataaacctgaagtgagcctgctgtttcagttcctacaaattctcacagcatgtttcggttcattcgcccacggcggtaatgacgtgagtaatgccatcgggccactggtcgccttatacttggtttacgacacaggggacgtcagctcaaaggtggccacccccatctggctactcctatatgggggtgtcggtatctgtgttggcctctgggtttggggccgccgtgtcatccagactatgggaaaggacctgaccccaatcacaccttcatctggcttctctatcgagctggctagcgcccttactgtggtaattgcatcaaacatagggctgcctatctccactactcattgcaaggttgggagtgtcgtgagcgttggatggctgagaagtaagaaggctgttgattggcgcctgttcagaaatatttttatggcctggtttgtgactgtgcccatttcaggagtgatctccgccgcgattatggcaattttccgatacgtgattctacgtatgtag

SEQ ID NO: 134952 - DNA, 1137 bp, synthetic construct
  misc_feature 1..1137: note = Description of Artificial Sequence: Synthetic coding sequence
  source 1..1137: mol_type = other DNA
atgggaaatccaagcgtgcccagaggaggtttcacgcagtactgtaggggcttgcttccttggggcttccaagatgccccgttttatctgctcgtgctcggattcgataaacttccgctatggggcactatcctgatctcagtcggctgcgctgtgttttgtgccctcattgtctggttcttcgtttgtccacgcatgaagcgcaaaattgagcgtgagatcaagtgcagtccttctgaatctcctctaatggagaaaaaaaacagtttgaaagaagatcacgaagaaaccaagctgtccgtaggtgatattgagaacaagcaccccgtttccgaagtgggacctgctacagtgcctttgcaagcggtggtcgaagagcgtaccgtgtcttttaagttaggcgacctggaagaggcaccagagcgggagagactgccgagtgttgacctgaaagaggaaacatccattgactctactgtaaatggcgccgtgcagctgcccaatggaaacctcgtccagttttcgcaggctgtatccaaccagatcaacagctccggccactatcagtaccatacggtacacaaagattctggcctttacaaggagcttttgcataaactgcacctcgctaaagtgggcgactgcatgggcgactctggagacaaacccttgagacgcaacaacagttatacttcctacacgatggctatctgcgggatgcccctggacagtttcagagcaaaagaaggcgagcagaaaggcgaggaaatggagaaactcacatggcccaacgcagattccaaaaagagaatcagaatggactcttacacatcttattgcaatgcggtatctgatcttcattccgcctcagagattgacatgagcgttaaggcggagatgggccttggggataggaagggtagtaatggatcattggaggagtggtatgaccaggacaaacctgaggtcagcctcctgttccaattcctgcagatcctgaccgcatgcttcgggtcctttgcacacggtggaaacgacgtgagtaatgccatcgggcctctggtggctctgtatctcgtgtacgacaccggtgacgtgtcatcaaaagtagcaactcctatctggctgttatgttag

SEQ ID NO: 134953 - DNA, 1959 bp, synthetic construct
  misc_feature 1..1959: note = Description of Artificial Sequence: Synthetic coding sequence
  source 1..1959: mol_type = other DNA
atggcaatggatgaatatttatggatggttattcttggatttattatagctttcatcctggctttctcggtaggggctaacgatgtggctaactcattcggcaccgcagtggggagcggcgtcgtcacacttcgtcaggcctgtatactggcctctatatttgaaacgaccggcagcgtgttgcttggagctaaggtcggagagacaatcagaaagggtattatcgatgtcaatctctataatgagaccgtagaaaccctgatggcaggcgaagtttctgcgatggtggggtcagccgtgtggcagcttattgcgagctttttgcgattgccaatcagtgggactcattgtatcgtgggcagtaccatcggattttctttggtggcgattgggacaaaaggcgttcagtggatggagctggtcaagatcgtcgcatcctggtttatctcgccacttctgtccggctttatgagcggcctcctttttgtcctgatccggatattcatcctgaaaaaggaggaccctgtgcctaacggcttgagagccctacccgtgttctatgccgcaacaatcgcaattaacgtattctctatcatgtataccggggcccctgtgttaggtctggttctgcccatgtgggctatcgccctaatttcctttggggtggccctgctgtttgccttcttcgtatggttgttcgtatgtccatggatgaggcggaaaataacaggaaagctacagaaagagggagccctttcccgggtgtctgacgagtccctgtccaaggtccaagaggctgagagccctgtgtttaaggaattgccaggagccaaggcaaacgacgactcaactataccactgactggcgccgcgggcgaaactcttggaacctcagagggaactagcgctggctctcaccctcgggccgcctatgggcgggccctgtctatgacacacggctccgtcaagtctccaataagtaatggcacattcggattcgacgggcacacacgatccgatgggcacgtttatcataccgtccacaaggacagtgggctgtacaaggatttgctgcataagatccatatcgatcgcgggccagaagagaaacctgcacaagagtcaaattatagactgcttcggagaaataacagctatacatgctacacagcagccatttgtggactgccagtgcatgccaccttcagagccgcagactcgagtgccccggaggatagtgagaaattggtaggggatacagtgtcatactccaagaaacgactgcgttacgacagctacagttcctattgtaacgccgtcgccgaggccgagatcgaggctgaggagggcggggtcgagatgaagctcgcttccgagttagcagaccccgatcagccacgggaagacccggcggaggaggagaaagaagagaaagacgcccctgaggtgcatttgctgtttcacttcctccaggtcctgactgcctgcttcgggagcttcgcccatggcggtaatgatgtgagcaatgctatcgggccactggtggcattgtggctgatttacaagcagggcggcgtgactcaggaggcagccacaccggtttggctcctgttttatggaggtgtggggatctgtactggcctatgggtgtggggcagacgggttattcagactatgggaaaggacctcacccccatcaccccttcatctggcttcaccatcgaattagcatccgcattcacagtggtaatagccagcaatatcggacttccggtgagcaccacccattgtaaagtgggaagtgtggtggcagtaggatggatccgaagccggaaagcagtcgactggcgactctttagaaatatattcgtcgcatggttcgtgaccgttcccgtcgctggcttgttttccgctgccgttatggccctgcttatgtacggaatcttgccttacgtatag

SEQ ID NO: 134954 - DNA, 216 bp, synthetic construct
  misc_feature 1..216: note = Description of Artificial Sequence: Synthetic coding sequence
  source 1..216: mol_type = other DNA
atggcgatggatgagtacctgtggatggttattctgggcttcatcattgcctttatactggccttcagtgtcggtgcaaacgacgtagccaacagcttcggtaccgctgtggggtcaggtgttgtgactctcagacaggcttgtatacttgcaagcatttttgagacgacgggaagcgtactcctgggggccaaggtgggagaaaccatcagatag

SEQ ID NO: 134955 - DNA, 87 bp, synthetic construct
  misc_feature 1..87: note = Description of Artificial Sequence: Synthetic coding sequence
  source 1..87: mol_type = other DNA
atggccatggacgaatacctgtggatggtcatacttgggttcatcatcgcgttcatccttgccttctctgtgggcgctaatgattag

SEQ ID NO: 134956 - DNA, 237 bp, synthetic construct
  misc_feature 1..237: note = Description of Artificial Sequence: Synthetic coding sequence
  source 1..237: mol_type = other DNA
atggccatggatgaatacttgtggatggtgattctgggattcatcatcgcctttatactggccttttccgtgggagcaaacgacgtggccaattctttcgggacagcagtgggcagtggagtggtgactctacgtcaggcttgtatccttgcctcaatttttgaaaccacgggcagtgtactgctgggcgcaaaggtaggggaaaccattcggaaaggtattatcgacgtgaattag

SEQ ID NO: 134957 - DNA, 1959 bp, synthetic construct
  misc_feature 1..1959: note = Description of Artificial Sequence: Synthetic coding sequence
  source 1..1959: mol_type = other DNA
atggccatggatgaatatttgtggatggtgatcctgggcttcattatcgcattcatcctggccttctccgttggcgctaacgacgtggccaatagcttcggcactgcggtgggctcaggtgtggtgaccctgcgacaagcttgtatactggcttccattttcgaaacgactggctcagtgttgcttggtgcaaaagtgggggagacaatccgcaagggaatcatcgacgtaaacttatataacgaaacagtagagacgttgatggccggcgaggtgtccgccatggttggcagcgccgtttggcagttgattgcttcatttctgcgcctgcctatctccgggacccattgtattgtcggaagtactattggattctcattggttgctatagggactaaaggcgtgcagtggatggaactggttaaaattgtcgcatcttggttcatctctcccctcctcagtggcttcatgtccgggttgctctttgtgctgatacggatcttcatcctgaagaaggaggaccccgttccaaacggcctaagagcgctacccgtcttctacgccgctactatagccataaatgtctttagcataatgtacaccggggccccggtgctcggccttgtattgcctatgtgggctatcgcgttgattagctttggagtggccttgctgttcgcgttcttcgtgtggctatttgtatgcccttggatgaggaggaaaatcacagggaaacttcagaaagagggggccctgagccgggtgagtgatgaaagcttatcaaaagtgcaggaggctgagagccctgtctttaaggaactccctggcgcaaaggcgaatgacgatagtacaattcctctcacaggggcagcgggtgaaacattggggacctctgaaggtacctccgcgggttcacatccccgagctgcctatggcagggcactctcaatgacacacggctctgtcaagtctcctatcagcaacgggacctttggatttgatggacacacacgaagcgacggacatgtttatcatacggttcacaaggatagcgggctgtacaaggatctgctgcacaagattcacatcgaccgcggaccagaagagaaacccgcccaggaaagtaactaccgcctcctgcgcaggaacaactcgtacacctgttacaccgccgcgatttgcggactgcccgtccacgctaccttccgggcagctgattctagcgcccctgaagactcagagaaactggtaggcgataccgtatcctactccaaaaaacgcctccgctatgattcctatagctcttattgcaatgcggttgctgaagccgagatagaagccgaagaggggggagtggagatgaaactagctagcgagcttgccgatcccgaccaaccaagggaggatcccgccgaggaggaaaaggaggagaaagatgctcccgaggtccacctgctgtttcactttctgcaggtgctcaccgcctgcttcggttcatttgctcatggtggcaacgacgtttctaatgctatcggccctctagtagcgctatggctcatttataagcagggcggggtgacccaggaggccgctacgccagtttggttgctgttttatgggggtgtcgggatctgtacgggactttgggtgtggggtagaagggtgatccagactatgggcaaggacctgactcctattacaccctctagcgggttcactatcgagctggccagtgcttttaccgtggttatcgcatctaacattggcctcccggtttcaacaacacactgtaaggtaggcagtgtcgtggccgtgggctggatcaggagtcgcaaggctgtagactggcggttgtttcggaatattttcgtcgcatggttcgtgacagtacccgtagctggtctgtttagtgcggctgtgatggctttattgatgtatggcatactgccctatgtctag

SEQ ID NO: 134958 - DNA, 1959 bp, synthetic construct
  misc_feature 1..1959: note = Description of Artificial Sequence: Synthetic coding sequence
  source 1..1959: mol_type = other DNA
atggctatggacgagtatctgtggatggttatcctaggcttcattatcgcattcattctcgcctttagtgtaggcgcaaacgacgtggccaactccttcgggacagctgtgggttctggcgtagtaacgctccggcaggcttgtatcctggcgagtattttcgagaccaccggcagcgtgctgctcggggccaaggtgggcgagacaatcaggaagggcatcatcgatgtcaatttgtataatgaaaccgtggaaaccctgatggctggcgaggtttctgccatggtcgggagtgcagtatggcaactcattgcctcattccttagacttccgatctccggcacccattgtatcgtcggatccaccatcggtttcagcctggtggcaattggaacaaagggggttcaatggatggagctggttaagattgttgcaagctggttcatctcgccactgctctccggattcatgtctggactcctgttcgtcctcattagaatttttattttgaaaaaggaagaccccgtccccaatggccttcgcgctctgcctgtattttacgccgcaacaatcgctatcaacgtgttctcaattatgtataccggcgctccagttctgggcctggtccttcccatgtgggccatcgccttaatcagttttggcgtcgccttgctcttcgccttcttcgtgtggctgttcgtctgcccttggatgcgcagaaagataactgggaagctccagaaggaaggcgctctgtcacgagtaagcgacgaaagtctatccaaagtccaagaggctgaaagccccgtcttcaaagagctgcctggagccaaagccaatgatgatagcactatacccttgacaggcgcagcgggcgagaccctggggacgagcgaagggacgagcgctgggtcccacccgagggcagcttatggtagggcgttgagtatgacccatggcagcgtgaagagccctatctcaaatggcactttcggattcgacgggcatactcgcagcgacggccacgtgtatcataccgtacataaggactctggactgtacaaagacctactccacaagattcatatagaccgtggacctgaggagaaaccagcgcaggagtcaaactacagattgctgagaagaaacaattcttatacctgttataccgcagcaatctgcggactgcccgtgcatgccacattccgagctgccgatagctccgccccagaggattccgaaaaacttgtgggggacaccgtctcctacagcaagaaaaggctgcgttacgacagttacagcagctattgcaatgctgtagccgaggctgagattgaggctgaagagggaggagtggagatgaagctggccagtgagctcgctgacccggatcagcctcgggaggatcctgcggaagaagagaaggaggaaaaggacgctcccgaagttcacttattgtttcatttcctccaagtgctcacagcttgcttcgggtccttcgctcatggaggaaacgacgtgagtaatgccatcgggcccttagtcgcactgtggctgatttataagcagggtggagtgacccaggaagcagctacacctgtgtggctcctcttctatggcggcgttggaatctgcacgggcttgtgggtttggggccgtagggtcatacagactatgggcaaggacttaacccccatcacgccctcgagtggcttcacaattgaacttgctagtgctttcacagttgtgatagcatcaaatatcggtctcccagtctcaacgacccattgtaaggttgggtctgtggtggctgtaggctggatccgatcccggaaggcagttgactggcgacttttcagaaacattttcgtggcctggttcgtcacggttcctgtggccgggcttttttccgctgccgtgatggccctgctcatgtacggcatcctgccatatgtttag

SEQ ID NO: 134959 - DNA, 144 bp, synthetic construct
  misc_feature 1..144: note = Description of Artificial Sequence: Synthetic coding sequence
  source 1..144: mol_type = other DNA
atggctatggacgagtatctgtggatggtcatattgggattcataattgcatttattctcgcatttagcgtgggagcaaatgatgtggctaacagctttggcactgctgtaggatccggagtggtcacgctgaggcaggcctag

SEQ ID NO: 134960 - DNA, 1260 bp, synthetic construct
  misc_feature 1..1260: note = Description of Artificial Sequence: Synthetic coding sequence
  source 1..1260: mol_type = other DNA
atggcccagtctatcttcatggctggtatactgatcggcggattggttctaggagacttgagcgatcgattcggacggagacccatccttacttgcagctacctattactggctgcatcaggttcaggtgcggcattctcaccaaccttccctatctacatggttttcaggttcctctgtggctttggaatttctgggattacactctccaccgtgattctgaatgtcgagtgggtcccgacacgtatgcgggctatcatgtctactgcactgggctattgttacacattcgggcagttcattttgcccgggctcgcctatgctattccccagtggagatggctgcagcttaccgtgagtatcccatttttcgtttttttcctctccagttggtggacacccgagtcaattcgatggctggtactctccggcaagagctctaaggcactcaagatccttcgacgggtcgcagttttcaatggaaagaaggaagagggcgagagactctcactcgaggagctgaaattgaatcttcaaaaggagatcagcctggccaaggctaagtataccgcaagtgacctgtttaggatacctatgctgcgaagaatgaccttttgcctgagcctggcctggtttgcaacaggtttcgcctattactctctggccatgggcgtggaagagtttggcgttaatctgtatatactccagattatcttcggaggtgtagacgtccccgctaagttcatcactatcctgtccctgtcatatctgggccgccataccacccaggcagcggcactactcctcgccgggggagcgatacttgctctgacttttgtccctctggacctacaaacagtcaggacggtgcttgctgtcttcgggaagggatgcttgagttcttcctttagttgcctgttcctttacacctctgagttgtaccctacagtgattagacagaccggaatgggggtttcaaatttgtggactagggtcggcagtatggtaagtccactggtaaagatcaccggcgaggtacaacccttcatcccaaatattatttacgggattacagcgctactgggaggaagcgcagctcttttcctccctgaaacgctaaatcagcccctgcctgagactatcgaggacctcgaaaactggtcactccgggcaaagaagcctaagcaggagcccgaggtcgagaaagcctcacaacgcatccccttacaaccacatggccccgggttaggttcttcatag

SEQ ID NO: 134961 - DNA, 1356 bp, synthetic construct
  misc_feature 1..1356: note = Description of Artificial Sequence: Synthetic coding sequence
  source 1..1356: mol_type = other DNA
atggagccgtgtctcgacggttgggtttataatagcaccaaggacagcatcgttacagagtgggacttggtctgtaatagtaataagcttaaggagatggctcagagcatctttatggccggaatcctcatcggcggtcttgttttgggcgacctgagcgaccgattcgggcggaggcctatattgacctgtagctatttgctgctggctgcatccggcagcggagcagcgttttctccaactttcccaatttacatggtcttcagatttctttgtggcttcgggatcagcgggattactctgagtactgtaattctcaacgtggaatgggtgccaactagaatgagggcaatcatgtcaaccgcactgggctattgttatacatttggacaatttatcctgccgggacttgcctatgctatcccacagtggagatggctccagctgacagtttccataccttttttcgtgtttttcctgagcagctggtggacacctgaatcaattcgttggctggtacttagcggtaagagctctaaagctttaaaaattctgaggcgggtggccgtgtttaatggtaagaaggaagagggtgagcgcctttcattggaggagttgaaattgaatctccagaaggagatcagcctagccaaagctaagtatacggcttctgatctatttcgcatcccaatgctccgccgcatgaccttctgtctgagtctggcttggttcgcaactggctttgcctactatagccttgccatgggagtcgaagagtttggagtaaacctctatatcctccagataatattcggcggggtggatgtgcccgccaaattcataaccatcctgtctctgtcttacttggggcggcatacaactcaggcagctgctttgctattggctggcggcgcaatcttagctctaacttttgtccccttggatctgcaaaccgttagaactgtgctggccgtcttcggaaaaggatgcctttccagcagtttcagctgtctgtttctgtatacttctgaactgtatccaaccgtcatcagacagacgggcatgggcgtgagtaacctgtggacgagagtgggctcaatggtttcccccctggtgaagattacaggcgaagtgcagcccttcatcccgaacatcatatacggcataactgcactgctgggaggtagcgctgccctgtttctgccggagaccctgaaccagcctctccccgagaccatagaggatttggagaactggagtcttcgcgccaaaaagccaaaacaggagccggaggtggaaaaagcaagccagcggattcccctgcagcctcatggtcccggcttgggctcttcatag

SEQ ID NO: 134962 - DNA, 1653 bp, synthetic construct
  misc_feature 1..1653: note = Description of Artificial Sequence: Synthetic coding sequence
  source 1..1653: mol_type = other DNA
atggcattcaatgacctgctgcagcaggttggaggcgtcggaaggttccaacagattcaggttactctggtggtgctgccactactgctgatggcctcacataacacgttacaaaattttaccgctgcgatcccgacccaccattgtcgccctcccgcagatgcgaacctgtcaaagaacggtggcctcgaggtttggcttcccagagaccgtcaagggcaaccagagagctgcctgaggtttacgtctccgcaatggggcctgccatttttgaacgggaccgaggcaaatggtaccggtgccaccgagccgtgtactgacggctggatttatgacaattccacgttcccctctactattgttacggagtgggacctggtctgttcccacagggctttacggcagcttgctcaatctctctatatggtcggtgtgctgctgggtgcaatggtttttggctacctggcagatcgtcttgggagacgcaaagtgctgattctcaactacctgcagaccgccgtgtccggtacttgcgctgccttcgccccaaacttcccgatttactgcgcctttagactgctgagcgggatggctctggccggcattagtttgaactgcatgacccttaatgtggaatggatgccgattcataccagagcttgtgttgggacgttgatcggctatgtatacagtttagggcagttcctgctggcgggagtcgcttatgccgtgccacactggcgccacctgcaactgctcgtaagcgcaccgtttttcgcatttttcatatatagttggttcttcattgagagtgcacgctggcactccagtagcgggcgtttggacctgaccttacgggcactgcaaagagtggcccgcattaatggcaaacgggaggaaggcgcaaaattgtccatggaggtgctgagagcttctctgcaaaaggagctgaccatgggaaaaggtcaagcatcggcgatggagctgcttagatgtcctactctgagacacctgttcctgtgtttatccatgttatggttcgccacctccttcgcatactacggcttggtgatggatctccagggattcggtgtctctatatacctgattcaagtgatctttggggctgtggacctgccggccaagctcgtagggttcctggtaataaactccctgggtagacgccctgcccagatggcagcccttctgctggcggggatctgtatactgcttaatggcgttatcccacaggatcagtccattgtgcgtacttctctggctgttctggggaagggctgtttggctgcaagctttaactgtatcttcctatacactggtgaattatatcctaccatgatacggcagaccggcatgggcatgggaagcaccatggcgcgcgttggcagcatagtctctcccctggtctctatgacggcagagctctacccatccatgcccctgtttatttatggtgccgtgcccgttgccgcctctgccgttaccgtgctgctgcctgagactctcgggcagcctctacccgatacagtccaggacttggagtcaagaaaaggaaaacaaacccgccaacagcaggagcaccagaagtatatggtgcccctgcaggcttccgcacaggagaagaacgggctgtag

SEQ ID NO: 134963 - DNA, 1692 bp, synthetic construct
  misc_feature 1..1692: note = Description of Artificial Sequence: Synthetic coding sequence
  source 1..1692: mol_type = other DNA
atggctttcaacgatctgttacaacaagttggcggagtgggtagatttcaacagattcaagttactttggtggttctccccctgctcctcatggcaagccataacaccctgcagaatttcaccgccgccattccgacacaccattgcaggcctcccgcggatgctaacctgagcaaaaatggcggcctggaggtctggcttcctcgagataggcaggggcagccagagagttgcctgcggtttacatctccacagtgggggctgcccttcctcaacggcacagaggcaaacggcactggagccactgaaccctgtacggatggctggatttatgataacagtacctttcccagcacaatcgtgaccgaatgggatctagtgtgcagccaccgcgctttgcgccagctggcacagtctctttatatggtaggcgttctactcggggccatggtgtttgggtaccttgctgaccgattgggccgtcgcaaggtattaatcctcaattatctgcagactgcagtgtcaggcacatgcgccgcattcgccccaaatttcccaatatattgtgctttcagacttttaagtgggatggctctcgcagggatcagcctcaactgcatgacactgaatgtggaatggatgcctatccacacaagggcctgtgtgggtactctgatcggttatgtttactccttgggtcagtttcttctggctggcgtcgcatatgctgtcccacactggcggcacctgcagctgctggtgtcagcaccctttttcgcattttttatctactcttggttttttattgaaagtgcccgatggcactcaagctcaggacgtttagatcttaccttacgggcactccagcgggttgcccggatcaacggcaagagagaggaaggagccaaactgtcaatggaagtgctgagagcctctctccaaaaggaactgacgatggggaaaggacaggcatctgccatggaacttctcagatgtccgactctgcggcatttatttctttgcctgagcatgctgtggttcgcgacctctttcgcgtactatggactggtgatggacttgcagggatttggcgtgtctatttacttgattcaggtcatcttcggggccgttgacctgccagctaaactggtgggcttccttgtgatcaactccctgggcaggcggcccgctcaaatggctgccctcctgcttgcagggatttgtatcctcctgaacggggtgattccacaggatcagtcaatcgtgcggaccagccttgcagttctgggtaaaggttgcctggcagccagttttaattgtatttttctgtatacgggcgagctgtaccctacaatgatacgacaaaccggcatggggatgggctcaacaatggcacgcgttggcagtatagtgtcccctctcgtgtcgatgaccgccgaattatatccttctatgcccctatttatctatggcgcagtgccagtcgcagccagcgcagtgacggtgctgctgcccgaaacacttggccagccactgccagataccgtacaggacctcgagagcaggtgggcgcccacccagaaagaggctggcatttatcctcggaagggaaagcaaacacgacagcagcaggagcaccagaagtatatggttcctctgcaggcttccgctcaagaaaagaatggcctgtag

SEQ ID NO: 134964 - DNA, 1590 bp, synthetic construct
  misc_feature 1..1590: note = Description of Artificial Sequence: Synthetic coding sequence
  source 1..1590: mol_type = other DNA
atggctttcaatgatcttctgctcctcatggcctcacataataccttgcaaaacttcaccgcagctatcccaacccatcattgccgtcccccagctgatgctaacttatcaaagaacggtggcctcgaagtatggctgccacgcgacagacaagggcaacctgagtcctgcctgaggttcacttccccccaatgggggcttccctttctgaacggaactgaggccaatggcacaggagcaaccgagccctgcactgatggatggatctacgacaattcaacattcccgagcaccattgtcacagaatgggacttggtctgctctcacagggcattgcggcagctggcgcagagcctgtacatggtgggtgtgctcctgggagccatggtgttcggctatctcgcagatagattaggacgacgaaaggtcctgatcttaaactatttgcaaaccgcggtaagtggcacctgcgccgcttttgctcctaattttcccatctattgtgctttccgcttactcagcggcatggctctggccggcattagtctgaattgtatgactctgaatgtagaatggatgcccattcatacacgcgcttgtgtgggtactctaattgggtatgtctactcattaggccagtttcttctagcaggagtggcgtatgcagtcccacattggagacacctgcagctactagtttcggctccattctttgctttttttatctactcttggttctttattgagagcgcacgctggcattcctcttcaggaaggctggatctcacattgagggctctccagcgtgtggctagaataaatggaaaacgggaagagggcgccaagctgagcatggaggtgttgagagcttctctacagaaggagctaaccatgggcaaaggacaggcctcagcaatggaactgcttaggtgccctacacttagacatctcttcttatgcctgtctatgctttggtttgccaccagcttcgcttattacggactcgtgatggatcttcagggcttcggtgtttctatctatcttatacaggtcatcttcggtgccgttgaccttccagcaaagctggtcggctttctggtgattaacagcctgggcaggcgaccagcccagatggctgccttgctgctagccggaatttgcatactcttgaatggggtcattccacaggaccagagcatcgtccggaccagcctagccgtactgggcaaaggttgtctagccgcgagtttcaattgtattttcctgtacacaggcgagctctaccccacaatgatcaggcagaccggtatgggtatgggatcaacaatggccagggtgggttccattgtttcaccgttggtctccatgaccgcagaactttacccctctatgccactgtttatctacggtgccgtgcccgtggccgcaagtgccgtgacagtcctgctcccagagaccctgggccaaccgttgcccgataccgtgcaggatctcgaatctcggaagggaaagcagacaagacagcagcaggagcaccagaagtacatggtgccgctccaagcaagcgcacaggagaaaaacggcttatag

SEQ ID NO: 134965 - DNA, 1560 bp, synthetic construct
  misc_feature 1..1560: note = Description of Artificial Sequence: Synthetic coding sequence
  source 1..1560: mol_type = other DNA
atggccttcaacgatctgctacaacaggtgggcggggttgggcggtttcaacaaattcaagttacattggttgtgttacccctgctcctgatggcctcccataacacactgcagaattttacagcagccattcccacccatcactgtcgccctcctgcagatgccaatctgagcaaaaatggaggactggaagtctggctgccaagggaccggcagggtcaaccggagtcctgtctgaggttcaccagtcctcagtggggtcttccttttctcaatggaactgaagccaatgggacaggagctactgagccttgtactgatggatggatttacgacaacagtacatttccatccacaatagttaccgagtgggatctggtgtgcagccacagggccctcagacagctcgcccaaagcctttatatggtcggcgtcctgcttggcgctatggtatttgggtatctcgccgaccgactgggaaggaggaaagtactcattctgaactatcttcagacagcagtgtcaggcacgtgcgctgcctttgctcccaacttcccaatttattgcgcattccgtctactgtctgggatggccctggccgggatatccctgaactgtatgacgttaaacgtggaatggatgcctatccacacacgcgcatgcgtggggactctgataggctacgtgtactctctgggccaattcttgttagccggagtggcttatgccgttccacactggcgtcatttgcagctgctggtctccgcgccattcttcgccttcttcatatactcttggttctttattgaatccgcgcgctggcattcttccagtggccgcctagacttaactctgcgggcccttcagcgcgtggcccgcatcaatggcaaaagggaagagggggctaaactatcgatggaggttttgcgggcttccttgcagaaagaactgacaatgggtaagggccaggcctcagctatggaactcctgaggtgccctacactccgccacctgtttctgtgcttgtctatgttgtggtttgcaactagctttgcttactacggcctggtgatggacctccagggctttggcgtgtcaatttacctgatccaagtgatctttggcgcagtggacctgcctgccaagttggttgggtttctggttatcaatagcctgggacgtcgtcctgctcagatggccgctctactgctggcagggatatgtattctgctgaacggtgttattccgcaggaccagagcatagtcaggacaagtctagccgtcttgggcaaagggtgcctggccgcaagtttcaactgtattttcctttacacaggtgaactctacccaaccatgatccgcgcggtcaccgtgctgctgcctgaaacgcttggtcaacctcttcccgatactgtccaggacttggaaagtaggtgggctccgacccaaaaagaagccggcatttatccacgcaagggcaagcagacaaggcagcaacaagagcatcagaagtatatggtgccgctccaagccagcgctcaggagaaaaacgggctctag

SEQ ID NO: 134966 - DNA, 1521 bp, synthetic construct
  misc_feature 1..1521: note = Description of Artificial Sequence: Synthetic coding sequence
  source 1..1521: mol_type = other DNA
atggcattcaacgacttgttgcagcaggtcggcggcgtgggcaggttccagcaaatccaggtcaccctcgtggtcttgccattgctgttgatggcgagccataacacccttcaaaattttacagccgccattccaacccatcactgccgtcctcctgccgatgcgaacctaagtaaaaatggaggtctggaggtttggctcccccgtgacagacagggacagcccgagtcctgtctgcgcttcacttcaccccagtggggattaccctttcttaacgggactgaggccaatggcaccggtgctactgaaccatgcaccgatgggtggatttacgacaacagcactttcccctcgaccatcgtcactgagtgggatctggtgtgttcgcatagagctttgcggcaacttgcgcagagcttatacatggtcggcgtactgcttggtgccatggtcttcggctatctggccgaccggcttgggaggagaaaggtcctgatcctgaattacctgcagaccgctgtgtcaggcacctgtgccgctttcgcacctaattttcctatctattgtgcgttcaggctgctcagtggcatggccctggccggaatctccttgaactgcatgaccttgaacgtggagtggatgccaattcacacccgcgcttgtgtagggactcttatcggctacgtttactccctcggacagttcctgctggcaggtgtagcttatgctgtgccacattggcgccaccttcagcttttagtgtcagcacccttctttgctttcttcatttacagctggttcttcatagaaagcgctaggtggcatagtagttccgggaggctcgacttaactttacgggctttgcagcgggtggccaggataaacggaaaaagggaagagggggctaagctctctatggaggtgctcagggcctctctccagaaagaactgactatggggaaaggacaagcttccgctatggagctgctgcgctgtcccaccctgcgccatctgtttttatgcttatcgatgctatggttcgccacctcctttgcttattatggtttagtaatggacctgcagggatttggtgtgtccatttacttgattcaggttattttcggggccgtggacctccctgccaaactggtcggctttctagtaatcaactccttgggacggcgaccagcccaaatggccgctcttcttctggccgggatttgcatattgttaaacggtgtaatcccacaggaccaatctatcgtacgcaccagtctcgcagtgctgggaaaaggctgcttagccgccagcttcaactgcatttttctgtacaccggagagctttatcctactatgatccgtgcagtgacagtactcttgcccgagacccttgggcagccccttcctgataccgttcaggacctggaaagcaggaaagggaaacagacccggcagcagcaggagcaccagaaatatatggtgcccctgcaggcgtccgcacaggaaaagaacggcttgtag

SEQ ID NO: 134967 - DNA, 1620 bp, synthetic construct
  misc_feature 1..1620: note = Description of Artificial Sequence: Synthetic coding sequence
  source 1..1620: mol_type = other DNA
atgggattcgaagagctgttggagcaggtggggggctttgggccgtttcagctgaggaatgtcgcacttctggcattacctagagtcctgctgcctcttcatttcctcctgcctatcttcctcgctgcagtgcctgcccacagatgcgctcttccaggggctcctgcaaatttctctcaccaagatgtttggctagaggctcatctgcctcgggagccggatggaacattaagctcttgtcttcggtttgcctacccgcaagccctacctaatacaactctaggggaggagcggcaaagccgaggggagcttgaagatgagcccgccactgtgccatgtagccaagggtgggagtacgaccatagtgagtttagctctacaatagccaccgaatgggatttggtttgcgaacaaaaaggtctaaatagggctgcgtccaccttttttttcgccggcgtgcttgtgggtgctgttgcgttcggctatttaagtgataggttcgggcgcaggaggctgttacttgtggcctacgtttccactctggtgctgggtttagcttcggccgcaagtgtctcatacgttatgttcgcaataactagaactttgactgggtctgccctcgccggatttactatcatagtgatgccacttgagctcgagtggctggatgtggagcacagaaccgtggcgggggtgttgtcctccactttttggacaggaggggtgatgttactggctttggtaggatacctgatccgagattggcggtggttgctgctcgcggtgactctgccatgcgcccccggaatcctctccttgtggtgggttccagagtctgctagatggctgctaacgcaaggtcacgtgaaggaggcccatcggtacctactccattgcgcaaggctcaatggcaggccagtgtgcgaggattctttttcccaggaggctgtcagcaaggtcgcagctggggaaagagtcgtgcgccggcccagttatctggatttgtttcgcactcccagactgagacatatcagcctatgttgtgtcgtcgtctggtttggcgtcaacttttcctattatggcctgagcttggacgttagtggactcgggttgaatgtttatcagactcaactgctgtttggagccgtagagctgccatctaaactgcttgtgtacctgtccgtccgatatgcaggacggcgactaactcaggcggggaccttacttggcaccgccctggcctttggcacaaggctcctggtttccagtgatatgaagtcttggtcgaccgtattggccgttatgggcaaagcatttagcgaagccgctttcactaccgcctatctttttacttctgaactatatcctactgttttaagacagactggcatggggcttacagcattggtaggaagattaggcggctcgctggcaccactggctgccctactcgacggggtctggctgtcgctgccgaaactcacatatggcggaattgcgctcctggcagctgggaccgctcttctgctacccgagactagacaggctcaactgcccgagacaatccaggacgtggaaagaaaaaggtgcgtgcaccggacagtctctgtgtatgtctag

SEQ ID NO: 134968 - DNA, 1647 bp, synthetic construct
  misc_feature 1..1647: note = Description of Artificial Sequence: Synthetic coding sequence
  source 1..1647: mol_type = other DNA
atggggtttgaagaactccttgagcaggtgggcgggtttgggcccttccaacttaggaacgtggctctcctggcactaccacgcgtcttgcttcctctgcatttcctgttacctatcttcttagctgccgtaccggcacaccgctgcgccttgcccggcgcgcctgccaacttctctcatcaggacgtatggcttgaagcacacctcccacgagagcctgatggcacgctgtcgagttgcctgaggttcgcgtacccccaagctctgccaaataccacattaggcgaggaaagacagtcaaggggggagttggaggatgagccagcaaccgttccttgttctcaaggatgggagtatgatcactcggaattcagctctaccatcgcaacagagtcccagtgggacttagtgtgcgagcagaagggcttgaaccgcgccgccagcactttcttctttgcgggtgtgctagtcggcgctgttgcattcggatacctgtcagataggtttggcaggagaagacttctcttagtcgcgtacgtcagcacccttgtcctgggcctagcatcagccgcctcggtgtcatacgtgatgtttgccattactagaactcttacaggttctgcattagcaggcttcaccattattgtgatgccactggaactggaatggctggacgttgagcatcggacggtggccggcgttctctctagcacattttggacaggtggggtgatgctcttggcactggtggggtacctgattcgcgattggcgttggttattgctggccgttacattgccatgcgcaccagggattttgagcctatggtgggttcccgaatctgcacgctggctgttgacgcaagggcacgtgaaggaagctcatcggtatttgcttcattgcgccagactgaacggccgcccagtctgcgaagattctttttcccaggaggctgtctcaaaggtggccgcaggggagcgggtcgtgagacgcccatcgtacctggacctgtttcggacccctaggctcaggcacattagcctgtgctgtgtcgtcgtgtggtttggtgtgaacttctcgtattacggattgtcactggatgtgagtggcctgggccttaacgtgtaccagacccagttactgttcggcgccgtggagctgccgagcaaactacttgtctatctctccgtcaggtacgcaggacgccggctgactcaagcgggaacattattggggacagctctggcttttgggaccaggctgcttgtttctagcgacatgaaatcctggtcaactgttctggcggtgatggggaaggcctttagcgaagcagctttcaccacagcctacctgttcacgagcgagctttaccccactgtgttgcgccaaactggcatggggttgaccgccttagtaggcaggcttggagggagcctggccccgctggccgccctgctggatggcgtgtggttgtcattgcctaaattaacatacggcggcattgcactactcgcagctggtacggctctcctcctgcccgagacacgacaggcacagttgccagagacgatccaggatgtggaaagaaaatctgctcccacttctttacaggaggaggagatgcccatgaagcaggtgcaaaattag

SEQ ID NO: 134969 - DNA, 1641 bp, synthetic construct
  misc_feature 1..1641: note = Description of Artificial Sequence: Synthetic coding sequence
  source 1..1641: mol_type = other DNA
atgggattcgaagaattactggaacaggtcgggggctttgggcctttccagctacgtaacgtggcactccttgctctccccagggtcctcctccctctgcatttccttttaccaatttttctcgctgccgttccagctcaccgctgcgccttgccgggcgctcctgctaattttagccaccaggacgtgtggctggaggctcatttgccccgagagcccgacggcacactaagctcctgcctaagattcgcttatcctcaggccctgcctaataccacactaggggaggaaagacagtcaagaggcgaactagaggatgagcctgctactgtgccgtgttcacagggctgggaatatgatcactcggagttctcctccaccatagccacagagtgggatctggtgtgtgagcagaagggcctgaaccgggccgctagcaccttcttctttgcaggtgtattggttggagcagtggcctttgggtacctgtcagaccgctttgggaggagacggctactgctagtggcctatgttagcacgctcgtgttgggtctggcctcagccgcgagcgtgtcttatgtgatgtttgccatcacccggactcttacaggttctgccttggcgggttttaccatcatcgtgatgcccctagaactggagtggttagatgtggagcatcgcaccgtggccggagtcctttccagcaccttttggactggcggcgtcatgttgttggcccttgtggggtatctcattcgtgactggcggtggctccttctggccgtgaccttgccttgcgcacccgggattttgtcactctggtgggtaccagagtcagctcgttggctactcacacaagggcacgttaaagaagctcaccgatatttgctccactgtgcgcgacttaatgggcggccggtgtgcgaggattctttctcacaggaggctgtttctaaagtggcggccggggagagggtggttcggaggcctagttatttggacctgtttcgtacacccagactgcggcacatttccctgtgttgtgtcgtggtatggtttggcgtgaatttttcatattatgggctatccctcgacgtgagtgggctcggtctgaatgtgtatcagacgcaactcttgttcggtgccgtagagctgcccagtaagctcctcgtctatttgtccgtacgctatgcaggaaggcgcctgacccaggctggtacactgctcggtacagctcttgcgtttggcacgcgcctgctagtctccagtgatatgaaatcttggtccacggtgcttgccgttatgggaaaagccttttccgaagccgcttttacgactgcctacctcttcacgtctgagctgtatcctacagtgttgcggcagactggaatgggtcttacagcccttgtcggacgactggggggaagtctggctccactggcagccctgctggacggcgtctggctctctctgcccaagctcacgtatggaggcattgctcttcttgccgcagggaccgcgttgctccttccggagactagacaggcgcagcttccggagactatccaggatgtggagcgtaagtctgccccgacttccctacaggaggaagagatgccaatgaagcaggtgcaaaattag

SEQ ID NO: 134970 - DNA, 636 bp, synthetic construct
  misc_feature 1..636: note = Description of Artificial Sequence: Synthetic coding sequence
  source 1..636: mol_type = other DNA
atgctgcagccccatcttctgccttatcaagccgtgtctaaggttgcagccggtgaaagagtggttcggaggccaagctatcttgacttattcaggactcctcgattgcgccacatttctctctgctgtgtcgtggtgtggtttggagtcaatttcagctactatgggctgagcctagacgtgtctggcttaggcctcaacgtctaccagactcagctcctctttggggcagttgagctgcccagcaaacttctcgtgtacctgtccgtccgttacgctggacggaggctcacacaggccggcaccctgttgggaactgcactcgctttcgggactcgcttgctagtttcctctgacatgaaatcctggtcaaccgttctggctgtcatggggaaagcgtttagcgaagcagcatttaccactgcttatctgtttactagtgaactttaccccaccgtcttgaggcagaccggaatgggacttacagccctagtgggtcgcttaggcggcagtctggcccctcttgccgcactgctggacggagtgtggctgagcttgccgaagcttacatacggcgggattgctctactagcggctggaacagccctcttactcccagagaccaggcaggcctag

SEQ ID NO: 134971 - DNA, 837 bp, synthetic construct
  misc_feature 1..837: note = Description of Artificial Sequence: Synthetic coding sequence
  source 1..837: mol_type = other DNA
atgggctttgaggaattattagagcaggtggggggcttcggaccattccagctgcggaacgtcgccctgttggccttgccaagagtgctgctccctctccacttcttgttgcccatcttcctggccgcagttcccgcccatagatgcgccttacccggcgcacctgccaatttctcccatcaggatgtgtggctggaagcacatctgccccgggagcccgacggaaccctgtctagttgtcttaggttcgcatacccccaggctctgcctaacaccaccctgggagaggagaggcagtcacgaggcgaattagaggatgagcccgccacggtcccgtgttctcagggatgggagtacgatcatagcgaatttagcagtacaatcgccacagagtctcaggtcggcatctacataatccacttggaggtggaatgtcgatggagacagtctccctgggaagcggccggtaggggcctgccctgggaagaagcggaggccgccggactggggcgggacaaggtctcctatagcccaagctggagagaatctctagggggtctgctgagcggtatggaatgggacctggtgtgcgagcagaagggactcaatagagccgctagtacattcttcttcgcaggtgtcctcgttggggccgtcgctttcggttatctatcagatcgatttggacggcggcggctccttttagtcgcctatgtctcgactctggtcttggggctagcatcagctgcaagcgtgagctacgtgatgtttgctatcaccaggacgcttaccggctccgccctcgcgggcttcacaattatcgtcatgccactctag

SEQ ID NO: 134972 - DNA, 444 bp, synthetic construct
  misc_feature 1..444: note = Description of Artificial Sequence: Synthetic coding sequence
  source 1..444: mol_type = other DNA
atggaatgggacctagtctgcgaacaaaaaggattgaatcgtgccgcaagcacgttcttttttgcaggtgtgctcgtaggagcagttgcctttggctacctgtcagaccgctttggccggcgaaggctcctgctcgtcgcctacgtctccacacttgtgttgggcctggcttctgctgccagcgtcagctacgttatgttcgccatcacaaggactctcactggatctgccctcgctggcttcactatcattgtgatgcctctgggcgaggcggagctggaatggctggacgtcgagcaccgtaccgttgctggcgtactgagtagcaccttttggactggaggcgtcatgttgctggccctcgtcggatacctgattagggattggcgctggttactacttgcggtgacactgccatgtgcccccggtatcctcagtctgtag

SEQ ID NO: 134973 - DNA, 1629 bp, synthetic construct
  misc_feature 1..1629: note = Description of Artificial Sequence: Synthetic coding sequence
  source 1..1629: mol_type = other DNA
atgacattctctgagatacttgatagggttggatccatgggccactttcagtttctgcatgttgcgattttaggcctccccattcttaacatggctaaccataacttactgcagattttcacagccgctacgcccgtacatcactgccgcccacctcacaacgcttcaacggggccttgggttctgccgatgggcccaaacgggaagcccgaaagatgtctccggttcgtgcacccaccaaacgcaagtctgccaaatgacacacagagagctatggaaccttgtttggatgggtgggtatataacagtacaaaagacagtatcgttaccgaatgggacctggtctgcaattctaataagctcaaggaaatggcacagagcatctttatggccggcatcctgatcggcggtttagtgctcggagacctgtcggatcgcttcggccgccggcctatcctgacttgctcatacctcctcctagctgcctctggctccggtgcagctttctcccccacgttccccatctatatggtcttccgctttttatgcggattcggaatcagtggcatcacactcagcactgttatcctgaatgtggagtgggtgcctactcggatgcgagctataatgtcgacagcactcggctactgttacacctttggccagttcattctgcctggactggcctacgccatacctcaatggcgctggctgcaactgacagtgtcaatcccattctttgtctttttcctgagtagctggtggactcctgaatctattaggtggctggtgctgtcagggaaatcttcgaaagcactgaagatcctgcgcagggtggccgtatttaatggcaagaaggaggaaggagagaggctgagcttggaggaacttaagctgaatctccagaaggaaattagtttggccaaagctaagtatactgctagtgacctgttcagaatacctatgttgcgccgcatgacattctgtctttcactagcttggtttgccactggcttcgcttattactccctggctatgggtgtggaggagttcggagttaatttgtatatacttcaaattatttttggtggagtcgatgttccagccaagttcatcaccatcctcagcctgtcttaccttggacgacacaccacacaggcggccgccctgctccttgccgggggggctattctcgccctcaccttcgttcctctggacctgcagactgtccgcacggtactagcagtgtttggaaaaggttgtttatcaagcagtttcagctgtctcttcctttacacctcggaactctaccccactgtgataagacaaactgggatgggggtgtcgaacctgtggacccgggtggggagcatggtgagcccactggtcaagataacaggggaggtgcagccatttatcccaaacatcatctacgggataaccgcgcttttgggaggatccgctgcattgtttctacctgagactttgaaccaaccactgcccgagacaattgaagacctcgagaattggagtctacgcgctaagaagcccaaacaggagccagaagtggaaaaggccagccagcgcattcctctccagccacatggaccgggactcggtagcagttag

SEQ ID NO: 134974 - DNA, 1629 bp, synthetic construct
  misc_feature 1..1629: note = Description of Artificial Sequence: Synthetic coding sequence
  source 1..1629: mol_type = other DNA
atgacatttagtgaaattctcgatcgcgtaggcagtatgggtcactttcagtttctccacgttgccatacttgggttacccatcttgaacatggcaaatcataatctactgcaaatcttcactgcagctaccccggtgcaccattgtagacctcctcacaacgcatcaactgggccctgggtgctgccaatgggccctaatggaaagcctgagcggtgcctgcggtttgtgcatcctcctaatgcatccctgccaaatgatactcagcgagctatggagccctgcctcgacgggtgggtctacaattcaacaaaagacagcatcgtcactgagtgggatctagtttgcaatagtaataagctcaaggaaatggcccagtccatctttatggccggcatcctcattgggggtcttgtgctgggcgatctgagcgatcggtttggccgccggcctattctgacctgtagctacctgctgctcgcagcatccgggtcaggggctgccttttccccaacatttccgatctacatggtttttcgttttttgtgcgggtttggcatcagtggcattaccttgtccacagttattctgaacgtggagtgggtccccaccaggatgcgcgccataatgtctaccgcactaggatattgctacacgttcgggcagttcatcctgcccggactggcctacgctattccccagtggagatggctgcagctcacagtctctattcccttctttgtgttctttttgagttcttggtggactccagaaagcattaggtggctggtcctgtctggaaagtcttctaaagccctgaaaatcctcagacgagtggctgtcttcaatggcaagaaagaagaaggcgaacgactgagcctggaagaattaaaacttaatctccaaaaggagatatccttggcaaaggccaaatacacagcctccgacctgtttaggattccaatgttgcgtcgcatgacattctgtctgtccctggcatggttcgccactggattcgcctactactcacttgctatgggagtcgaagagtttggtgtgaatctctatatccttcaaatcattttcggaggagtcgacgtgccggccaaattcattacaattctgagcctcagctacctcggtagacataccacacaagcagccgcccttctgttggcagggggcgcgattctggcgttgactttcgtgccgctggacttgcagactgtacggacagttctggctgtgtttggcaagggctgcctatcatcgtcatttagttgcctgtttttgtacacaagtgaactgtaccccactgtcatcagacagacgggtatgggcgtcagcaatctgtggacaagagttgggtctatggtcagtcctctggtgaagatcacaggcgaggtacagccatttataccaaacatcatctacgggatcacagctctcctcggaggcagcgcagccttgtttctccccgagactttaaatcagccactcccggaaaccatcgaggatcttgagaattggagcctacgggcaaaaaagccaaagcaggagcctgaagtcgaaaaagctagtcaacggattccactgcagccacatgggccggggttaggatccagctag

SEQ ID NO: 134975 - DNA, 1587 bp, synthetic construct
  misc_feature 1..1587: note = Description of Artificial Sequence: Synthetic coding sequence
  source 1..1587: mol_type = other DNA
atgacattctctgaaatcctggaccgcgtcgggtccatgggccattttcaatttctccatgttgctattctcggcttgccgattcttaacatggccaaccattgcagaccaccccataacgcttcaacaggaccatgggtcttaccaatgggtcctaacgggaaaccggagagatgtttgagatttgtacacccaccgaacgcttcactgccaaacgacactcagcgtgccatggaaccttgcctggacggttgggtgtacaatagcaccaaagacagcatcgtcacggagtgggaccttgtatgtaatagtaataaactgaaggaaatggctcagagcatttttatggcaggtatcttgataggggggctggtccttggagatttatccgatcgctttgggcggcgcccaattctgacatgtagttacttgctactcgccgcatctggttccggagccgctttcagtcctacattcccgatctacatggtcttcaggttcttatgcggcttcgggatctcagggataaccttatctactgtgatcttaaacgtggagtgggttcctacaagaatgagggctataatgagcaccgcactaggttattgctatacctttgggcaatttattcttcctggcctggcctacgccataccacagtggaggtggctgcaattgacagtttctataccattttttgtgttttttctaagttcatggtggacacctgagagtattcgctggttagtactctccggcaagtcatccaaagccttaaagattcttcggagagtagcagtatttaacggaaagaaggaagagggggagaggctaagtttggaggaactcaagttgaacctgcagaaggagatttcattggcaaaggcaaaatataccgccagcgaccttttcaggatccccatgctcagaaggatgaccttttgtctaagcctcgcgtggtttgctacaggttttgcctactatagcttggctatgggcgttgaggagttcggtgtgaacctgtacatcctccaaatcattttcgggggcgtggacgtcccagcgaagttcatcaccattctgagcttaagttacctggggcgccatactacccaggccgccgccctcctgttggcgggcggggcgatcctggccctgacgtttgtgccactggacctgcaaaccgtccgtaccgtgctggccgttttcggtaaaggctgcctcagcagctctttctcatgtctattcctgtatacatcagaactttatcctaccgtgatccgacagacaggaatgggtgtgtccaacctttggacacgcgtgggcagcatggtttcgcctttggtgaagattacaggcgaggtccagccctttatccctaatatcatctacggcatcacggccttgctcggaggttccgccgctctgtttttacctgaaacgttaaatcagcctctccctgaaacaattgaggatcttgagaactggtctttgagggccaagaagcctaagcaggagccagaggtcgaaaaagcgtctcagagaatacccctccagccccacggccccggcctgggatctagctag

SEQ ID NO: 134976 - DNA, 1653 bp, synthetic construct
  misc_feature 1..1653: note = Description of Artificial Sequence: Synthetic coding sequence
  source 1..1653: mol_type = other DNA
atggcattctccaaattgctagagcaagccggcggggttggcctgtttcaaacactgcaggtacttacctttattctaccttgtctaatgattccttcacagatgctgctggaaaattttagcgcggccattccaggccacagatgttggactcatatgcttgataacggatcagccgttagtacaaacatgacccctaaagctttgcttacaatctctattccgccagggcccaatcagggaccccaccagtgtaggcgtttcagacaaccccagtggcagctcctcgatcctaatgcaacagctacgagttggtcagaggccgacacagagccctgtgtggatggatgggtgtacgacaggtccgtgtttaccagtacgatcgtggcaaagtgggacctggtctgctcatctcaagggctgaaacctctcagtcagagcatcttcatgtcaggcattctcgtgggatcctttatctgggggctcctgtcctaccgcttcggtaggaagccaatgctttcctggtgttgcctgcagctagctgttgccgggacctctacaatattcgccccgaccttcgtgatctattgcgggctgcggttcgtcgcagcctttggcatggccggcatcttcctttccagtctgacactgatggttgaatggacgaccactagccgtcgggcggtcaccatgactgtggttggctgcgctttctccgctggacaagcagcactcggcggcttggcattcgcactgagagactggcgcacactgcagctagcggcaagcgtgcccttctttgcaatctccctgatctcctggtggctccccgagtctgcacggtggctaatcattaaaggaaagccggatcaagcgctgcaagagctgagaaaggtggcacgaattaacgggcacaaagaagccaaaaatctgacaattgaggtcctcatgagttcggtgaaggaggaggtggcctcggccaaagaaccaagaagcgtcttagacttattttgcgtccccgtgctgagatggagatcatgtgctatgttggtggtgaacttctcgctcctgatcagttactacggcctggtgtttgacttgcagagcctggggcgcgacatcttcctcctccaggcacttttcggcgctgtggactttctcggccgggccactaccgccttgctgctctcttttcttgggagacgcaccattcaggcaggatctcaggccatggctggactggccatcctggctaacatgctggtgccacaggatttacagaccttgagggtagtatttgctgtactgggtaaggggtgtttcggaatctccctcacatgccttaccatctacaaagcagaactattccccacccctgttcggatgacagccgatggaattctccacaccgtgggcaggcttggcgccatgatgggccctctcattttgatgagccgccaggctttgccactgctgccacctctgctgtatggagtcatcagtatagccagttccctcgtggttctcttttttctgccggagacccagggactacctctccccgacaccattcaggatcttgagagtcagaagagtacagcagcacaaggcaaccgacaggaggccgtaaccgtggagagcaccagcctctag

SEQ ID NO: 134977 - DNA, 1338 bp, synthetic construct
  misc_feature 1..1338: note = Description of Artificial Sequence: Synthetic coding sequence
  source 1..1338: mol_type = other DNA
atggccttttctgagctgctggacctggtgggtggcctggggcgcttccaggttctccagactatggcccttatggtgagcattatgtggttatgcacacagagcatgctcgagaacttttcagccgctgttccctcacacaggtgttgggcaccgctcctcgataatagtactgcacaggccagcattctggggagtctgtctccagaggctctgctggctatctcgatcccaccagggccgaaccaacggccccaccaatgtcgaagattcagacagccacaatggcagctgctggatcctaacgctacggctacctcatggtcagaagcagatacagagccatgtgtggatgggtgggtttacgacagatcgattttcacgagcacgattgtggcgaagtggaatctggtttgcgactcccatgctctgaaaccgatggctcaaagtatatatctggccggaatcctggtcggcgctgcggcgtgcggaccggcgagcgaccgctggttagccgagagcgcacggtggctgctcactacaggacggctcgattgggggttgcaggaactgtggcgcgtcgccgctattaacggcaagggagccgttcaggacaccctgactccagaggtcttgctgtcagcgatgagagaagaactgtccatggggcagccccccgcaagtctcggcaccttgctgaggatgcctggattgaggtttagaacttgtatatccactctttgctggttcgccttcggtttcaccttctttggactcgccctggatctgcaggccctaggctcaaacatctttttgttacagatgtttattggggtggtcgatatccccgcgaagatgggcgccctgctcttactgagccatctggggagacgtcctaccttggcagccagcctacttttagccggactgtgtatcctcgccaacacccttgtcccacatgagatgggagctcttaggagtgcactcgccgtccttggtttaggcggggtcggtgccgcatttacttgcattaccatttatagctcagagctgttccctacagtactgaggatgacagccgtgggtctggggcagatggcagcaagagggggtgccatcctcggacctttggtgcgcctcttaggggttcacggcccatggctgcctctgctcgtgtatgggacggttccagttctgagcggtctcgctgccttacttctgcctgagactcagtcgctgccgctccctgacaccatacaggatgtgcagaatcaggccgtgaaaaaagcgacccacgggacgctcggcaacagcgttctaaaaagtacgcaattctag

SEQ ID NO: 134978 - DNA, 1662 bp, synthetic construct
  misc_feature 1..1662: note = Description of Artificial Sequence: Synthetic coding sequence
  source 1..1662: mol_type = other DNA
atggcattttcagagctgttggatctggtcggggggcttggccgcttccaggtgctgcaaaccatggcactgatggtctctattatgtggttgtgcacacaatctatgctggagaacttttccgccgcagtgccctcccatcggtgctgggctcctcttctggacaattctaccgcacaggcgtccatcttgggctcgttgtccccggaggccttgctggcaatcagcattccacccggccctaatcagagacctcatcagtgtaggcgcttccgacaacctcagtggcagttgctggacccaaatgccacagctacctcgtggagtgaagctgacaccgaaccctgtgtcgatggatgggtctatgaccggtctatatttacgagcacaattgtggcgaagtggaacttggtctgtgactcacacgcactcaagcctatggcacagtccatctaccttgcaggaattctggttggggccgccgcctgcggccctgcctctgatcggttcggcagacgtcttgtcctcacgtggtcatatctgcaaatggctgtaatgggaacggccgctgcattcgctcccgcctttcctgtctattgtctgttcagatttttgctggcttttgccgtcgctggcgtgatgatgaataccggtaccttattgatggagtggacagctgcccgggccaggccgctggtgatgaccctgaattctctcggattttccttcggccatggactcaccgccgccgtggcatacggcgtcagagattggaccttgttacagctcgtggtctccgtccctttctttctatgttttctgtacagctggtggctggcggagagtgcacgatggcttctgaccaccggccgcctcgactggggcttgcaagaattgtggagggtggccgccataaatggcaagggggcggtgcaagacacactgacccccgaagttctactcagtgccatgcgcgaagaactctcaatggggcagccacctgcgagtctgggcactctgctgcggatgcccggcctgcgcttcaggacttgtatctcaaccctgtgttggtttgcttttgggtttactttttttggcctggccctggaccttcaagccttggggtcaaatatatttctgttacagatgtttatcggtgtggttgacatccctgccaaaatgggcgccctcctattactatcacatctgggaaggcgcccaacgcttgccgcctctctgttattagctggactgtgtatacttgccaacacactggtccctcacgaaatgggtgccctgagatcagcattagctgtgctgggcctgggtggggtgggggccgcctttacttgtataaccatttactccagtgagctgtttcctaccgtgctccgcatgacggcagtggggctcggacaaatggccgcgagaggaggggcaatattagggcctctggtgcgcctcctcggagtgcacggaccctggctgcctttgctggtgtacggtacagtgcctgtcctgtcgggactggccgctctgcttctccctgagacccagtccttgccactgcccgacacaatccaagacgtgcagaatcaggccgtcaagaaggccactcatggcacgttgggcaatagcgtccttaagtcaactcagttttag

SEQ ID NO: 134979 - DNA, 999 bp, synthetic construct
  misc_feature 1..999: note = Description of Artificial Sequence: Synthetic coding sequence
  source 1..999: mol_type = other DNA
atggaatggacggcggctagagccaggcctctggtgatgacccttaattccctgggcttcagtttcgggcacggccttacagccgctgtcgcatacggggtgagggactggaccctgcttcaactggttgttagtgtgccctttttcctctgcttcctgtactcctggtggctggctgaaagtgcccggtggctcctgaccactggcaggctcgattgggggctccaggagctgtggcgtgtcgccgctatcaacggtaagggagctgtgcaggacacacttaccccagaagtgctactgagtgccatgcgcgaggaattaagcatgggacagcctccggccagccttgggaccctgctcagaatgcccgggctgcggttcaggacttgcatatcaacactatgttggttcgccttcggattcacattcttcgggcttgcgctcgatctgcaggctctagggtctaacatctttttgctgcagatgttcattggcgtcgtcgacatccctgccaagatgggagccctcctcctgttgagtcatttaggccgtcgtccaaccctggccgcatcgcttctactggctggcctgtgcatcctcgcaaacacactcgttccccacgagatgggggctctcagatctgcacttgcagtgctgggtcttggtggggtgggtgccgcttttacatgtataaccatttactcgtccgagctgttcccaactgtgctcaggatgaccgccgtggggctgggccagatggcagcccgtggcggggcaatcctcgggccattggtgcggctcctgggggtccacggcccctggctcccgcttctagtgtacggaaccgtacctgtgctgtctggactggccgccctgctgctgccggagactcagtccttaccacttccggacactattcaggatgtgcagaaccaggccgtcaaaaaggcgactcatggcacactggggaacagtgtcctgaaatccacccagttttag

SEQ ID NO: 134980 - DNA, 1665 bp, synthetic construct
  misc_feature 1..1665: note = Description of Artificial Sequence: Synthetic coding sequence
  source 1..1665: mol_type = other DNA
atgcctacagtggatgatattcttgagcaggttggggaatcaggctggtttcagaagcaagcgttcctgatcctatgccttcttagtgcagccttcgcccccatctgtgtgggcattgtgttcttaggatttacacccgatcatcactgccaaagtcctggcgtggcggagttaagccagagatgcggttggtctcctgccgaggagctgaactacactgtgccagggcttggacctgccggtgaagccttcttaggccagtgtcggcgatacgaagtggactggaatcaatccgccctctcgtgtgtagaccctctcgcctccttggctaccaaccgctcacatcttcccctagggccttgccaagatggctgggtgtacgataccccagggtcgtccatagtgactgagtttaacctggtatgcgctgattcctggaagctcgatctcttccaatcctgcctaaatgccggttttttgttcggcagtctgggtgtgggatacttcgcagatagattcggacgcaagctgtgcctgctggggaccgtcctggtgaacgcagtctctggtgttcttatggcctttagtccgaactatatgagcatgctcctattccgcctgcttcagggccttgtgtccaaggggaattggatggccggctacactctcatcactgagttcgtgggctctgggagtagacggactgtcgcgatcatgtaccagatggccttcacagtcggtttagtcgctttgactggtttggcctatgcactgccccattggcggtggctgcaactcgcagtttctttacccacttttctctttctgctgtactattggtgcgtgcccgagagcccacgctggctgctgtcccagaagaggaacactgaggctataaagattatggaccacattgctcagaagaatggaaagctaccaccggccgacctgaagatgttatcgttagaggaggatgtcacagaaaaactgtcaccctcctttgcggatctgttccgcacccctcggctgcgcaagagaacttttattttaatgtatctgtggttcactgacagcgtcctgtatcagggcctgattttacatatgggggccacgagcggcaatctgtacctagacttcctgtattctgcccttgttgagatcccaggcgcattcatcgccctcattactattgatcgggtcggacggatataccccatggccatgtccaatctcttagccggcgccgcctgtttagtgatgatattcatctcccccgatctgcactggctgaacattatcatcatgtgcgttggacggatgggtatcaccattgccatccaaatgatctgccttgttaatgccgaattataccccacgttcgtgagaaatttgggtgtaatggtgtgttcatccttatgcgatataggtggcatcattaccccattcatcgtgtttagattacgggaggtgtggcaggccctgccgctgatcctgtttgccgtgcttggtctactcgccgctggggtcaccctgcttttacccgaaacaaagggggttgcactccctgagacaatgaaggatgctgagaatttaggccgcaaagcaaaaccaaaagagaacaccatttatctgaaggtacaaaccagtgagccatctgggacctag

SEQ ID NO: 134981 - DNA, 1005 bp, synthetic construct
  misc_feature 1..1005: note = Description of Artificial Sequence: Synthetic coding sequence
  source 1..1005: mol_type = other DNA
atgttctttttgctggcactgctgagcgcaacctttgcccccatctatgtgggtattgtatttctgggatttactcctgaccatcgctgccggtccccgggagttgctgagctttcactgcgatgtggttggagtcccgctgaagaactcaattataccgtgcccggacccggccccgccggtgaggcatcacctcgccagtgtagacggtacgaagtggactggaaccagtctacattcgattgcgtggacccgctggcttctttggataccaacaggagcagacttcccctcggaccctgtcgagatggctgggtgtatgaaacacccggcagctccatcgttacggagtttaatctagtttgcgcgaactcgtggatgcttgatttattccagagcagcgtgaatgtgggcttctttatcgggtcgatgtcaatcgggtacattgccgacaggttcggacgtaaactgtgcctgctgactactgtgctgatcaacgccgccgctggtgtattgatggctatttcacccacatatacatggatgctgatcttccgtctcattcagggacttgtctcgaaagctggctggttgatcggttatatcctgattacagagttcgtaggaagacggtaccgccggaccgtagggatcttctaccaggtggcgtacacagtcggcttattggtactcgctggggtggcttatgcacttccacactggcgctggttgcaattcaccgttagtttacctaacttcttcttcttgctgtattattggtgtatccctgagagtccacgctggctgatcagccagaataagaacgctgaggctatgcgcattattaagcatatcgccaagaagaatgggaaatctctgccagcaagtctgcagagattaagactcgaagaagaaacaggcaagaagctgaatccaagcttcctagatcttgtacggactccccaaattcggaaacacacgatgatcttaatgtacaattggtag

SEQ ID NO: 134982 - DNA, 1668 bp, synthetic construct
  misc_feature 1..1668: note = Description of Artificial Sequence: Synthetic coding sequence
  source 1..1668: mol_type = other DNA
atgccaactacagtagatgatgttctcgaacacggcggcgaattccacttctttcagaagcaaatgttcttcttgctggctctcctctctgcaacatttgcccccatctatgtggggatcgtgtttttgggattcacgccagatcacagatgtcggagccccggtgtcgccgaattgtccttgcgctgcgggtggtcccctgccgaggagttaaactacaccgtccctggccctggccccgccggggaggcttctccacggcagtgcaggcgctacgaggtagattggaaccagtcaacattcgactgtgtggatccccttgcttcactggataccaaccgcagcagactgcctcttggaccctgtcgagatggatgggtctacgagacacctgggtccagtattgttacagaattcaatctagtgtgcgctaatagttggatgttggacctcttccaaagtagtgtcaatgtggggttttttatcggaagtatgagtatcggttatatcgctgatcgatttggacggaaactctgcttattgaccacagtgctcataaatgcagccgctggagtactcatggcaatcagccccacttacacatggatgctgattttcaggttgatacagggcttagtcagtaaggccgggtggctgatcggctacattctgattacagagtttgtaggccgtaggtaccggcgcacagtaggaatattctatcaggttgcctacacagtgggcttgttggttctggctggcgtcgcctacgcgcttccccattggcgctggctccagttcactgtgagtctcccaaattttttctttctgctctattactggtgcattcctgagtccccccggtggttaatctctcagaacaaaaatgctgaggccatgcgcattattaaacatatcgcaaagaagaatggaaagtctctgccggccagcttgcagcggttgcgcctggaggaggagacaggtaaaaagctgaaccccagcttcctcgacctggtacggacccctcagatccggaagcacacaatgatcctaatgtataattggtttacaagttccgtgctgtaccaggggctgataatgcacatgggcttggcaggggacaatatctacttggactttttttatagcgctctcgtggaatttccggcagcattcatgatcattctaaccatcgaccggataggacggcggtacccctgggctgcgtccaacatggtggcaggagccgcctgcctcgcctcagtgttcattccgggcgatcttcaatggctcaagattatcatctcatgtctcggccgtatgggaattaccatggcctacgagattgtgtgtctcgttaatgcggagctgtatccaacatttatccggaatttgggggtacacatctgcagtagtatgtgtgacattgggggcatcataacgccgttcctggtataccggctgaccaatatctggctagagcttccactcatggtctttggggtcctcggccttgtcgctggtggtttggtcctgctcctgcccgagacgaaaggaaaggcactcccagagacaatcgaggaagccgaaaacatgcagagaccaaggaaaaataaggaaaagatgatctatttacaggttcagaagctcgacattcctcttaactag

SEQ ID NO: 134983 - DNA, 1632 bp, synthetic construct
  misc_feature 1..1632: note = Description of Artificial Sequence: Synthetic coding sequence
  source 1..1632: mol_type = other DNA
atgcgaactctgcatgcagtgtcccatccatatagtaatagtatgcgctttcaaagagtcctctatttcatttgcgccttccaaaatatctcctgtgggattcattatcttgcttcagttttcatgggggtcacaccccatcacgtctgtcgccctcctggcaacctgcagaatggcgagatctgggagctgtcacgctgcagtagaaataaaagggagaatacttcttcactcgggtatgagtacaccgggagtaagaaagagttcccttgtgttgacggctatatttacgaccagaacacttggaaatctaccgcagttacccagtggaatctggtttgcgatcggaagtggctggcgatgctgatacaacctctttttatgttcggcgtgcttctgggaagtgtaaccttcgggtacttctcggatagactgggtcgaagagtggtcctgtgggctacatcatcgtcaatgttcctgttcggaatcgcagccgcatttgctgtggactactatacatttatggctgctcgcttcttccttgctatggtagccagcggatatctcgtggttgggtttgtgtacgtaatggaatttataggtatgaagtctcgaacctgggcttccgtccacctgcactctttctttgctgtgggaaccctcctcgtcgctctcactggttaccttgtgagaacctggtggctttaccagatgattctgagcaccgtgactgttccctttattctctgctgctgggtgctgccagagactcccttctggttgctgagcgagggccggtatgaagaagcccagaagatcgtggacataatggctaagtggaaccgcgctagttcttgtaaactgagtgagctgttatccctggacctacagggaccagtgtcgaatagtcctacggaagttcagaaacacaatcttagttacctgttctataattggtctattaccaagcgaactctgacggtctggctgatttggtttactggctctctcgggttctacagtttctctctcaatagcgtaaatctaggtggcaatgaatatctgaatctattcttactgggcgtggttgaaattccagcttacaccttcgtgtgcattgccatggacaaagtgggtagacgcacagtcctggcgtacagcctgttctgttccgcactcgcctgcggagtagttatggtaatcccccaaaaacattacattctgggcgtggtaacagccatggtgggcaagtttgccatcggggcagcgtttggcctgatctacctatatactgcagaactatatcccacgattgtccgaagtctggctgtgggcagcggaagcatggtatgtcgactggcatctattctggcccccttttctgtagatctttcttcaatttggatttttataccccagcttttcgtgggcacgatggctctactgagtggagtcctaacactgaagctaccagagaccttgggcaagagactggctactacgtgggaggaggcagcaaaactcgagagtgaaaatgagtccaagtcatcaaagctgttgctgaccactaataacagtgggcttgaaaagaccgaggcaataaccccacgcgattcgggacttggggaatag

SEQ ID NO: 134984 - DNA, 1734 bp, synthetic construct
  misc_feature 1..1734: note = Description of Artificial Sequence: Synthetic coding sequence
  source 1..1734: mol_type = other DNA
atgggttcacgccacttcgagggcatctatgaccacgtcggacacttcgggcgtttccagagggttctgtactttatttgtgcctttcaaaatattagctgtggcattcactacttggcctcagtgttcatgggggtgaccccacatcacgtatgtagaccgccaggcaacgtctctcaagtcgttttccacaaccactccaactggtccctggaggatacaggggcccttctttcctcaggccagaaggactacgtcactgtacaacttcagaatggggagatttgggaactgagccgctgctccagaaataagcgggaaaatacatctagtctgggctacgagtacactggctctaaaaaagagtttccctgcgtggacggctacatctatgatcaaaacacctggaagagcaccgccgtgacacagtggaatcttgtgtgcgatcggaagtggctggccatgctgatccaacctctgtttatgtttggagtactgctggggtccgtgaccttcggatactttagtgaccgcctgggccgacgcgtagtcctatgggctacctcatcatcaatgtttctctttggtattgcagctgcatttgccgttgactactacacctttatggccgctcgcttcttcctggcaatggttgcctccgggtacctggtcgtcgggttcgtgtacgtcatggagttcatcggcatgaaaagtcgaacatgggctagtgtgcacctccattctttcttcgccgtcggcaccctgctggttgcccttaccggctatctggtgcgcacttggtggttgtaccagatgatactgtctaccgtgacagtgcccttcatactgtgctgttgggtactcccagaaacacccttctggctcctcagcgagggacgctatgaagaagcccagaaaatagtcgatatcatggccaagtggaatagggcctcgtcttgcaagctctccgaactcttaagcttggacctccagggtcctgtgtccaactctcccactgaagtacagaagcataatttgagctatctgttctacaactggtccatcactaagcgcaccctaaccgtgtggcttatttggttcaccgggtctctgggcttttattcgttctccctgaacagcgtgaatctgggcgggaacgagtatcttaatctctttctgttaggagtggtggaaatccccgcatatacatttgtgtgtatcgctatggataaagtggggaggcgtactgtgctagcatattcactgttttgttccgcccttgcctgcggagtggtgatggtgatcccccaaaaacattatatacttggggtcgtaacggcaatggtagggaaatttgccattggagccgcgtttggcctgatctatctgtatactgctgagctgtaccctacaatcgtgcgctcactcgctgttggtagcgggagtatggtctgtcgcctggcttcaatcctggcacctttctctgtggacctgtcctccatttggatttttattccccagttgtttgtgggcaccatggcgctgctttccggtgttttgactctaaaactgcctgagaccctagggaaaaggctggcaactacctgggaggaagccgctaagctggaatctgagaacgagtcaaaatcaagcaagctgctactgacaactaacaactctggtctggagaagacagaggccatcacacctcgggactcaggccttggggagtag

SEQ ID NO: 134985 - DNA, 525 bp, synthetic construct
  misc_feature 1..525: note = Description of Artificial Sequence: Synthetic coding sequence
  source 1..525: mol_type = other DNA
atgggcgtaaccccacatcatgtgtgtcgaccccccgggaacgtgagccaggtggtcttccataaccacagcaactggtcgctggaagatacaggagccctgctttcatcgggccagaaggactatgtcaccgtgcagttgcagaatggagagatctgggagctgtccagatgcagtcgcaacaaaagagagaacacgtcctctctgggctatgagtacactgggtctaaaaaggagttcccttgtgtggacggttatatttacgatcagaacacgtggaaatcgacagctgtcactcagtggaacctagtctgcgaccggaaatggctcgcaatgttaattcagcccctatttatgttcggggtgttactcggctcagtgacctttggatatttctccgacagactggggcgtagggtggtgctgtgggctaccagcagttctatgtttctgtttggcattgcagccgccttcgcggtcgattactataccttcatggccgcgagattctttctcgccatgtag

SEQ ID NO: 134986 - DNA, 804 bp, synthetic construct
  misc_feature 1..804: note = Description of Artificial Sequence: Synthetic coding sequence
  source 1..804: mol_type = other DNA
atgtcagccggcccacaggccatgctgggacgtcgagtggttctgtgggctacttccagctcaatgttcctctttgggatagcagccgcctttgcagtggattactacacctttatggccgctcgtttctttctcgcaatggtggcttctgggtatctcgtggtcgggtttgtgtacgtgatggagtttatcggtatgaagagccggacatgggcatctgtgcacctccactcattctttgcggtaggcaccctgttggtggcacttaccggatacttagtgcgcacctggtggctgtatcaaatgatcctgtccaccgtgaccgtgccttttattctgtgctgctgggtcctgccagagactccattctggcttctgtcggaaggccgctacgaggaagcgcagaagattgtggatatcatggccaaatggaatcgggcatcatcttgtaagttgtcagaactcctgagtttagacctacagggacccgtgtcaaatagcccgaccgaggtacagaagcataacctgtcctatctgttttataactggtcaataaccaagcgcaccctcaccgtgtggctcatttggtttacaggatccctcggattctattccttcagcctgaattcagtgaatctgggagggaatgaatacttaaacctgtttttgctaggagttgtcgaaatccccgcttataccttcgtgtgcattgcaatggacaaggttggccgcaggaccgtgcttgcttattcactgttctgttccgcattagcttgtggcgtggtgatggtgatcccacagtag

SEQ ID NO: 134987 - DNA, 1056 bp, synthetic construct
  misc_feature 1..1056: note = Description of Artificial Sequence: Synthetic coding sequence
  source 1..1056: mol_type = other DNA
atgggggtcacacctcaccacgtatgcagaccccccgggaacgtgtctcaagttgtattccacaatcacagtaactggtctcttgaggatacaggagcgcttctgtcctctggacagaaggactacgtgaccgtgcagttacagaacggcgagatttgggaactttccagatgttcccggaacaagagagaaaataccagttcacttggctatgagtataccggctccaaaaaagagtttccgtgcgtggacggttatatctacgaccagaatacctggaagtctactgcagttacacagtggaacttagtctgcgacagaaaatggcttgcgatgcttattcagcccctgtttatgttcggcgtcctcctcggaagcgttacttttgggtattttagcgatcggcttggcagaagggtggtgttgtgggctactagtagcagcatgttcctattcggcattgccgctgccttcgcagttgactactacactttcatggcggcgagatttttcctggctatggtagcctccggatatttagtggtcggatttgtatatgtgatggagttcataggtatgaagagtaggacctgggcttctgttcacctgcactccttctttgccgtgggaacactgcttgtagctcttaccggctatctggtcagaacctggtggctgtaccaaatgattctgagcacagtaaccgtcccatttattctttgttgctgggtgctgcccgagacccccttttggctgttatctgaaggacgatacgaggaagcacaaaagatcgtcgacatcatggcgaagtggaaccgggccagctcctgtaagctcagcgagctcttatccttggatctacagggtccggtgtccaattctccaactgaggtccagaaacataatctgtcctacctcttctataattggagcattacaaagcggacactgacggtctggcttatttggttcacgggttctctgggcttctactcatttagcctgaacagcgtgaacctgggaggtaatgagtacttaaacctgtttctgctgtag

SEQ ID NO: 134988 - DNA, 1548 bp, synthetic construct
  misc_feature 1..1548: note = Description of Artificial Sequence: Synthetic coding sequence
  source 1..1548: mol_type = other DNA
atgggaagtcgccattttgagggaatatatgaccatgtgggccatttcggtagattccagagggttctgtatttcatttgtgcattccagaacatttcttgcggcatacattaccttgcaagcgtattcatgggcgtgactccacatcacgtctgccgtccccctggaaacgtgtctcaagtggtatttcacaaccattcaaattggagcctggaggatactggcgcacttctgtcctcgggccagaaggactacgtgaccgtccagctgcagaatggagagatttgggagctcagcagatgctcccggaataagcgcgaaaacaccagctcgttgggatatgaatacacaggctcaaagaaggagttcccatgtgtggatggatatatttacgatcaaaacacgtggaaaagcaccgcggttacccagtggaacttagtgtgtgaccggaagtggctagcgatgttgatacaacccttattcatgttcggtgtattacttggctcagttaccttcgggtacttctccgacaggttgggccgccgtgtcgttctttgggccacaagttcttcgatgttcctgttcgggattgctgccgccttcgccgtagattattatacatttatggctgcccgcttctttctggcaatggtggcctcaggatacctggtggtgggcttcgtctatgtgatggagttcataggcatgaagtcaaggacctgggcctccgtgcatctgcactcattttttgcagtaggaaccctgctggtggctctgacaggatacttagtgcgaacttggtggttataccagatgatcctcagtacagtgacggtaccattcattctatgttgttgggtcctgccagagacacctttttggctgttgtcagagggaagatatgaggaggcgcagaaaattgttgacatcatggctaaatggaatcgggcgtcatcttgcaagctgtctgagcttctctccctagacctgcaaggacccgtttcgaactcccctacggaggtgcagaaacataacctgtcatatctgttttacaattggtccatcaccaaaaggactctgaccgtgtggctgatttggttcactggttccctcggtttctacagcttctcactcaatagcgtgaaccttggcggcaacgaatacctgaatctgttcctactcggtgtagttgagattccagcttacacctttgtctgtatagcgatggataaagtagggaggcgcacagttctagcctactctctcttttgctcagcattggcttgcggagtggtcatggtgatcccacagaagcactatattctgggcgttgtgactgctatggtcggcaagttcgcgattggggccgcctttggcctcatctacttatatacggcagagttataccctaccattgtacgctccctggccgtgggatcagggtcaatggtttgtaggctcgccagcatcttggcgccttttagcgtggacctatcatctatctggatcttcattccacagctgctggggcagcatcttcaggaatag

SEQ ID NO: 134989 - DNA, 1299 bp, synthetic construct
  misc_feature 1..1299: note = Description of Artificial Sequence: Synthetic coding sequence
  source 1..1299: mol_type = other DNA
gactacgtgactgtgcagctacagaacggggagatctgggagctctcgcgttgtagtcgcaacaaacgggaaaacacaagttctttaggatatgagtacacagggagtaagaaagaatttccatgtgttgacggctacatatacgaccagaatacctggaagagcactgccgtcacacaatggaacttggtctgcgacaggaaatggctggcaatgttaatccaaccactattcatgtttggggttcttctcggaagcgtgacatttggttatttctctgaccggctgggcaggagagttgtgctgtgggccacctcatcctctatgttcctatttgggatcgctgccgcctttgctgttgactactacacctttatggcagcaagattcttccttgcaatggttgctagcgggtatctggtcgtgggcttcgtgtatgtcatggagttcatcggcatgaaaagtcgcacatgggcatcggtgcaccttcattccttctttgccgtcgggaccttgctggtcgcactgactggctacctggttcgtacatggtggctgtaccaaatgatcctctccaccgtcaccgtaccatttattctgtgttgctgggtgctgcctgagacaccattctggctcctaagtgaagggcgatacgaggaggctcagaaaatcgtcgacattatggccaagtggaatcgtgcttcctcatgtaagctctcagaactgctttcacttgacctccagggacccgtaagcaactctccgactgaggtgcagaagcacaacctgtcttacctgttctacaactggagtatcactaagagaactttaacggtatggctgatctggttcactggttcactggggttctattcattttcactgaatagcgtgaatcttggcggtaacgagtatctcaacctcttcctccttggtgtggtcgaaatcccagcgtacaccttcgtttgtattgcaatggacaaagtcggccgcagaactgtgttggcatattcactcttttgttccgctttagcctgtggagtggtgatggtcatcccacagaaacactatattctcggagtggtgacagccatggtgggaaagttcgcaatcggtgctgctttcggtctgatctatctttacactgccgaactttacccaaccatcgtcagaagcctggcggtcgggtcggggagcatggtctgtcgcctcgcctccatcttggcgccattctctgtagacttgtcaagcatctggatcttcattcctcagttactgggtcagcatcttcaggagtag

SEQ ID NO: 134990 - DNA, 600 bp, synthetic construct
  misc_feature 1..600: note = Description of Artificial Sequence: Synthetic coding sequence
  source 1..600: mol_type = other DNA
atgggctcccggcattttgagggcatctacgaccatgtgggtcactttgggcgcttccagcgagtgctctacttcatttgcgccttccagaatatctcttgcgggatccactacttagcctctgtgttcatgggggtcactccccatcatgtttgcaggccgcctggtaatgtgagtcaggtggtcttccataaccactcaaactggagcctagaggacacgggggcactgctgagctcagggcaaaaagactatgtgacagtccaactccagaacggagagatttgggaactgagtcggtgcagccggaacaaacgagagaatacgtctagcctgggctatgaatacactgggtctaagaaagagttcccttgtgtggatggatatatttatgaccagaatacttggaagtcgaccgccgttacccaatggaacctggtttgtgacagaaagtggttggcaatgctgattcagccattgtttatgtttggcgtgttgctcggatctgtgaccttcggatatttcagcgatagggtggggtttctcaccgcgtggtacaaaactagtggatttccgactagcagcgccccccctctctag

SEQ ID NO: 134991 - DNA, 1674 bp, synthetic construct
  misc_feature 1..1674: note = Description of Artificial Sequence: Synthetic coding sequence
  source 1..1674: mol_type = other DNA
atgagggattatgatgaggtcacagccttccttggggagtggggaccgttccagaggttgatcttcttcctcctctctgcctccatcattccaaacggttttaccggcctgtcttctgtgttcctgatcgcaaccccggaacaccggtgtcgcgtacctgatgctgcgaacctatcttcagcttggcggaaccataccgtccctcttagattgagggatggcagagaggtgccacactcctgtcgacgttaccgactggcaaccatcgccaatttcagtgcccttggcctcgaaccgggaagagacgttgacctgggacagctcgagcaggagtcctgccttgatggatgggaattctcacaggatgtctacctgagcacgatcgtgacggagtggaacctcgtgtgtgaggatgactggaaagcgccactcactataagtctgttcttcgtcggtgtactgctgggctccttcataagcggacagctctccgacagatttggcaggaaaaacgtgctctttgtcacgatgggaatgcaaaccggatttagctttctccagatattttcgaagaatttcgaaatgttcgtcgtgttattcgtgttggttgggatgggtcagataagcaattatgtagctgcctttgtactcggtactgaaatactgggaaaaagtgtgagaatcatttttagcaccctcggagtgtgtatcttttatgctttcggctacatggtgctgccactgtttgcttactttatccgggattggcgcatgttgcttgttgcgctgactatgcctggagttctttgcgtggccctgtggtggtttataccagaatctcctcgatggctcatatctcaaggtagatttgaagaggccgaggtaatcatacgcaaggccgctaaggcaaatggcatcgtcgtcccctccactattttcgatccaagtgaacttcaggacctctcatcaaaaaagcagcaatcccacaacattcttgacctgctcagaacctggaacatcagaatggtgacaatcatgagtatcatgctttggatgacaatatctgtgggctatttcggcctatcgctcgacacacccaatttgcacggcgacatctttgtcaactgtttcttgtctgccatggttgaggttccagcttatgtgctggcctggctgctactgcagtacctgcctagacggtatagtatggctacagctctcttcctgggggggagcgtgctcctatttatgcagctcgtcccaccagatctgtactacctggccacagtattagttatggtcgggaagttcggggtcaccgctgctttctcaatggtgtatgtttacacggctgagctgtatccaacggtggtccgcaatatgggcgtgggtgtcagctctacagcctcacgcttgggctcgatcctgtcaccctactttgtgtacctgggggcttacgatagatttctcccatacatcttgatggggagcttaacgattctcacggcaattttgacactgtttctgccagagagctttggcacccccctcccagatactatcgatcagatgctcagggtgaaaggtatgaagcacagaaaaacaccctcacataccagaatgctaaaggatggacaggagaggcctacaattctaaagagcacagccttctag

SEQ ID NO: 134992 - DNA, 1746 bp, synthetic construct
  misc_feature 1..1746: note = Description of Artificial Sequence: Synthetic coding sequence
  source 1..1746: mol_type = other DNA
atgcgcgactatgacgaagtgacagccttcctgggcgagtgggggcctttccaacggctcatattcttcctcttgtccgcctcaattattccaaacggctttaccgggctgtccagcgtattcctgatcgcaaccccagagcaccgatgccgcgtgccagatgctgcaaacctctcgtctgcttggcgaaatcataccgtacctctgagattaagggatggacgcgaagtacctcactcatgccgacggtaccgactggccaccatcgctaatttctccgcgttgggacttgaacctgggagggatgtcgacctcggacagttagaacaggagagttgtctggatggctgggagtttagccaggacgtatatctgagtaccattgtgacagagcaggattccggagcatataacgctatgaaaaataggatgggcaaaaagcctgccttgtgccttcctgcgcagtggaatcttgtctgcgaagacgattggaaggctccactgacgattagcctgttctttgtgggagtcttgctgggctcgtttatttctggccagctgtccgatcgctttggacgaaagaacgtgctgttcgtcacgatgggtatgcagactgggttttcattcctccagatcttctccaagaatttcgagatgtttgtggtactgttcgtcctcgtgggcatgggccagatctcaaactacgttgctgcattcgtcttaggaacagaaattttggggaagagcgtgaggatcatttttagcaccctaggagtatgcatattttacgccttcggatatatggtccttcctttgtttgcatattttattcgggattggcgtatgcttctggttgccttgaccatgcccggggtcttgtgcgtagcgttgtggtggtttatccccgagagcccgaggtggttgatcagccaagggagatttgaggaggcggaagtaattatcaggaaggctgctaaggctaacggcatagtggtgccctccaccatcttcgatccgagtgagcttcaagatttatcaagtaagaaacagcagtctcacaacattctcgatctgttgcggacctggaatatccgaatggtcaccatcatgtcgattatgctgtggatgaccatttctgtgggttattttggtctctctctggatacccctaacctgcatggtgacatcttcgtcaactgttttctgagcgccatggttgaggtgcctgcatatgtgctggcctggctgctgctacagtacctgccacgcagatacagtatggccaccgctctgttcttaggcggatctgtcctgctttttatgcagttggtaccccctgatctctattatctggcaacagtcctggtgatggtggggaagttcggagtaacagctgccttctctatggtctacgtgtacacggccgaactctaccctacagttgtcaggaatatgggcgttggtgtttcatccaccgcttcacgtcttggatccattctgagcccttattttgtgtacctgggggcatatgatagatttttaccctatatactgatgggaagccttaccatactcactgcaattctcaccttgttcctccctgagagtttcggtacacctttgccagatacaatcgaccagatgctgagagtaaaaggcatgaagcatcgtaaaactccatctcacactcggatgctgaaagatggccaggagcgccccacaatcctgaaatctaccgcattctag

SEQ ID NO: 134993 - DNA, 1656 bp, synthetic construct
  misc_feature 1..1656: note = Description of Artificial Sequence: Synthetic coding sequence
  source 1..1656: mol_type = other DNA
atgcgggactatgatgaagtgattgctttcctgggcgagtggggccctttccagcgtcttatcttctttctcctgtccgcctctattatcccaaacggattcaatggaatgagtgtagtgttcctcgcaggtacaccagaacatcgatgcagagtgccggatgctgctaatcttagctcggcctggagaaacaattccgttcccttaagactgcgcgatggaagggaagtaccccacagctgctcccgctaccggttggctacaattgccaacttcagtgctctaggcctagaaccaggccgcgatgttgatttagggcagcttgaacaggaaagctgcctagatgggtgggagtttagccaggatgtgtatctgtctacggttgtaaccgagtggaatctggtgtgcgaagacaattggaaggtgcctctcacaacatcactttttttcgtcggagtcctgctcggatcgttcgtgtccggccagttgagtgatcggttcggaagaaagaatgttttgttcgctacgatggctgtccagaccggcttttcgtttctacagatcttcagcatctcgtgggagatgttcaccgtgctgtttgtgatcgtaggcatgggccagatctctaactacgtggtcgcgttcattctgggaaccgagattcttggaaagagtgtccgtatcatattttccactctcggtgtgtgcacattcttcgccgtgggctatatgctgttgccattgttcgcttacttcatcagggattggagaatgctcctgcttgccctcactgtccccggcgtgctctgtgtacctctctggtggtttatcccagaaagccctaggtggctaatcagtcagaggagattccgggaagccgaggacattatccagaaagcagcgaagatgaacaatattgctgttcccgccgtcatcttcgattctgtggaggaattaaatcctctcaaacagcagaaggccttcatattggacctcttccgaactcggaatatagcgatcatgaccattatgagccttctgctgtggatgctgacctctgtgggttatttcgccctctccctcgatgcccctaatcttcacggtgacgcttatctgaattgtttcctgtccgcattgattgagatccctgcgtacattactgcctggctccttttacgtaccctgcccagaagatacataatagcagcagttctcttctggggcggcggcgttctgctttttatccagcttgttccagttgattattattttctctcaataggactggtaatgctggggaagtttggaatcacgagcgccttcagcatgttgtatgtgtttaccgccgaattataccctacattggtgcggaacatggcagtgggggtgacatctacagcttccagagtgggatccatcatagctccatattttgtgtatctgggcgcatacaatcgcatgctgccttacattgtaatggggagcctgaccgtgttaattggcatcctcactctgttctttccagagtctctaggaatgaccctgccagagacactggaacagatgcaaaaagtaaaatggtttcgctccggaaagaaaaccagggacagtatggagactgaggagaatccaaaagtgttaattacagctttttag

SEQ ID NO: 134994 - DNA, 1656 bp, synthetic construct
  misc_feature 1..1656: note = Description of Artificial Sequence: Synthetic coding sequence
  source 1..1656: mol_type = other DNA
atgggtttcgacgttttgttggatcaggtgggcgggatgggtcggttccagatctgccttattgcctttttctgtatcacgaacattctcctgtttccgaatatcgtacttgaaaacttcacagcctttaccccctctcaccggtgttgggtgccgctgctcgataatgacactgtgagtgataatgataccggtactctgtccaaggatgatctcttgagaattagcatcccccttgactcaaaccttaggcctcaaaagtgtcagaggtttatccatcctcagtggcagttgctgcacctcaacggcacgttccccaatacaaatgaacccgacacagaaccgtgtgtggatggatgggtttacgacagatcaagctttctgtcaacaatcgtcactgaatgggacctggtctgcgagagtcaaagcctgaaatccatggtgcagtcgctgtttatggccggcagtctcttaggagggttgatttatgggcacctttctgacagggtgggcaggaagataatatgcaagctttgctttcttcagcttgctattagcaacacttgtgccgctttcgccccaacatttctggtctactgcatcctgcgctttctcgccggattctcaacaatgactattctcgggaatactttcatcttgagcctggagtggaccctgcctcggtctaggagtatgactataatggtacttctctgcagttattctgtgggccagatgctactgggcggattagcattcgctatccaagactggcacatattgcagcttacagtgagcacccctatcatcgtgctgttcctgtcgtcttggaaaatggtcgagtctgccagatggctgataatcaacaaccagctggatgaggggctgaaggagctccggcgggttgcccatatcaatggaaaaaaaaacaccgaggaaacgcttaccactgagctggtgaggtccactatgaaaaaagagttggatgcagtaaggattaagacctcaattttttcattgtttagagctcccaagctgaggatgcgcgtctttggcctgtgttttgtaaggttcgctatcactgtgcccttttatggactgatactcaacctgcagcacttaggatcgaacgtgagtttgtttcaaatcctctgcggcgcggtgacattcaccgccaggtgtgtatcgttactgactctcaaccatatgggccggaggatatcccagattcttttcacatttcccgtgggtctcttcatactggtcaacaccttcctgcctcaggaaatgcagattttgcgggtcgtcctggctacactcggaattgggtctgtcagtgcggcatccaattcagcttcagttcaccataacgaactggtgccaaccatcttgaggtcaaccgtggctggtataaacgctgtgagcgggagaactggagcggccttggctccgctcctcatgactctgatggcctattccccacatcttccatggatcagttatggagtgttcccaatcttagccgtccccgtgatcctactgttgcccgaaaccagagatctgcctttgccaaacacaatccaggatgtggaaaatgagaaagattcaaggaatatcaagcaggaagatacatgcatgaaggtcacccagttctag

SEQ ID NO: 134995 - DNA, 738 bp, synthetic construct
  misc_feature 1..738: note = Description of Artificial Sequence: Synthetic coding sequence
  source 1..738: mol_type = other DNA
atggaggtggaggaggcttttcaggccgtgggtgaaatgggcatctatcaaatgtacctgtgcttcttactggctgtcctgcttcagctgtacgtggctactgaagcaattcttatcgccttagttggcgcgacgcccagttatcactgggaccttgccgaactccttccgaatcagtctcacggtaatcaatccgcaggcgaagaccaggccttcggcgattggctgttgaccgctaacggctcagaaattcacaaacacgttcacttttcctccagcttcaccagcatagccagcgagtggttcttaatcgcaaatcggagctataaagtgtccgccgcttcctcctttttcttttcaggagtgtttgtgggggtgattagcttcggtcagcttagcgacagattcggacgcaaaaaggtgtacctgacaggctttgctttggacatactgtttgccatagctaacggtttcagtccctcatatgaattctttgccgttacacggtttcttgttggcatgatgaacggtggaatgagcctcgtcgcctttgtccttcttaacgaatgcgtaggaacagcatattgggccctcgcaggatccataggtggattgtttttcgctgtaggaatagcccagtacgcactcctaggatattttattaggtcctggaggactcttgccatcctcgtcaatcttcagggcaccgtggtgttcctactgtccctggttgactag

SEQ ID NO: 134996 - DNA, 1644 bp, synthetic construct
  misc_feature 1..1644: note = Description of Artificial Sequence: Synthetic coding sequence
  source 1..1644: mol_type = other DNA
atggaagtggaagaagcctttcaagctgtgggtgagatggggatataccaaatgtacttgtgctttttactcgccgtgctgctacagctctatgtggcaaccgaggccattcttatcgcactggtgggcgccactcccagttatcattgggacctcgctgaactgctgccgaaccagagccatgggaatcagagtgccggagaagatcaagcttttggtgactggttgctgacagccaacggcagtgaaatccataagcatgtgcactttagcagcagttttacctctatcgcttcagagtggttcctgatcgccaaccgaagttacaaggtgtcagcagccagttctttcttcttcagtggtgtgtttgtgggcgtgattagttttgggcagctgtccgatcgtttcgggcgcaagaaagtgtacctaactggattcgcccttgatatactctttgctatagccaatggatttagccctagctacgagtttttcgctgtgactcggttcctggtagggatgatgaatgggggcatgagccttgttgcgttcgtgctcctgaacgaatgtgtgggaaccgcctattgggcccttgccggaagcatcggagggcttttcttcgccgtcggaattgctcagtatgcgctattaggatactttatccgctcatggaggaccctggccattctcgtaaacttgcagggcaccgttgtcttcctgttaagcctcttcatccccgagtcaccgagatggctttattcccaggggcgcctctctgaagccgaagaagccctctatctgatcgctaaacggaaccggaagctaaaatgtacatttagcctaactcatccggcgaataggtcatgtcgggagaccggcagtttcttagatttgttccggtaccgggtgttactggggcataccctcatactcatgtttatatggttcgtctgttctttggtgtattacggactcactctgtctgccggggatctggggggatcaatatacgctaatcttgcgttatcaggactgatagaaatcccaagctaccccctctgcatctacctcataaaccaaaagtggttcggacggaagcgaacactctctgcctttctttgtcttggcggcctggcctgcctcatcgtgatgtttttgccggaaaaaaaagatacaggagttttcgctgtggtaaattctcattcccttagcctgctcgggaagttgactatatcggcagcctttaatattgtatatatttacacttcagagctctaccccaccgtcatcaggaacgtggggcttgggacttgtagcatgttttcccgcgtcggtggcatcattgccccgtttattccaagcctgaagtacgtccaatggagccttcccttcatcgtgttcggagctactggattaactagtggactcctctcactgctcctccctgagacactcaacagcccactgctggaaacctttagtgatctgcaagtgtatagttacagacggctgggtgaggaggctttatcccttcaggcgctggatccacagcagtgtgtggataaggagtctagcttaggctcggaaagtgaggaggaggaggaattttatgatgctgatgaagaaacacagatgattaagtag

SEQ ID NO: 134997 - DNA, 1008 bp, synthetic construct
  misc_feature 1..1008: note = Description of Artificial Sequence: Synthetic coding sequence
  source 1..1008: mol_type = other DNA
atgcctgctgtcctgggctttgagggatccgccaataagattggagtcggtgtcgtgcgcgatggtaaagtgcttgctaatccaagaaggacatatgtgactccccccggaactggctttctgcccggcgacactgccaggcaccaccgcgctgtgatcctggatctgctgcaggaagcccttacagaaagcggactcaccagccaggatattgattgtattgcctacaccaagggtcctggaatgggcgcccctcttgtgtcagtggctgtagtggccaggacggtggcgcaactctggaacaagcccctcgtgggggtcaatcactgcatcggtcatattgaaatgggtcgtctgatcacaggtgcgacatctcctacggtgctttatgtgagcgggggtaacacccaggtgatcgcatacagtgagcatagatatagaatcttcggagagactatcgacatagcagtagggaattgtctggacagatttgccagagtgcttaaaatatcaaacgacccctcccccggctataacatagaacagatggccaagcgcggcaaaaagctggttgagctcccttatactgtgaagggcatggacgtctccttctctggcatcctctcgtttatcgaggacgtcgcccaccggatgctggcaactggggagtgtacacccgaagacctgtgtttctcacttcaggaaacggtctttgccatgctggtggagataaccgaaagggccatggctcactgcggaagccaggaggctctgatagttggcggggtgggatgtaacgtgcgccttcaagagatgatggccacgatgtgccaggaacgtggcgcgcgcctctttgcaactgatgaaagattttgcatagacaacggggccatgattgcacaggccggctgggagatgttccgggcgggccataggacacccctgagtgactccggcgtgacacagagatacaggactgacgaggtggaagtgacctggcgggattag

SEQ ID NO: 134998 - DNA, 1563 bp, synthetic construct
  misc_feature 1..1563: note = Description of Artificial Sequence: Synthetic coding sequence
  source 1..1563: mol_type = other DNA
atggccagcgacccaatatttaccttggccccacccctgcactgccattatggcgcctttccgcccaacgcttcggggtgggaacagcctcccaacgccagcggagtgtcagttgcatctgctgccttggccgcatcagccgcttcaagggttgctacttctactgatccctcatgcagtggattcgcgccacccgattttaatcactgcctaaaagactgggactacaatggcctgcccgtattgacgacaaatgctattggtcagtgggatttggtgtgcgatctcgggtggcaggtcatacttgagcaaattctatttattcttggcttcgccagcggctacctattcctcggctaccccgcggaccgatttggccggcgcggcatcgtcttgctgactctgggcttagtcggcccttgtggagtgggcggtgccgcagcaggctcgagcaccggtgtgatggctttgcggttcctgctgggtttcttgctggcaggcgtcgacttgggggtgtaccttatgcgcttagagctatgtgatccaacccagcggcttcgcgttgctctcgccggggaactggttggggtcggcggacatttcttattcctcggactagccctcgtttcaaaggattggaggttcctccaaaggatgatcactgcaccttgtatactcttcctcttctacggatggcctgggttattcctcgaatccgcaagatggcttattgtgaagcggcagattgaagaagctcagtccgtgctacggatcctggctgagagaaacaggccccatggacaaatgttgggggaggaggcccaagaagccttacaggatctggaaaatacatgcccactcccagccacttcctccttttcttttgcttcgttactgaattaccgcaatatttggaagaatctgctcattctaggcttcacgaactttatcgctcacgccatcagacattgttatcagccggtcggcgggggaggttcaccttctgatttttatctttgctctctcttagcatccggaaccgcagctcttgcatgcgtgtttctgggcgtcacagtggaccggtttggacgcagaggaatccttttactgtctatgacgctgactggaatcgcttcccttgtccttctggggctttgggattaccttaacgaagccgccattacaacattctccgtactcggtttgttcagctcgcaggctgctgctattttatctactcttctcgcagccgaagtgatcccaactaccgtaagaggcagaggcctgggcctgattatggcgttaggtgctctgggtggtctctctggcccagcgcagcgcctgcatatgggacacggggcctttctgcagcacgttgtgctggccgcctgtgcactgctgtgcatcctatctatcatgctacttccagaaacaaagaggaaacttttacctgaggtgttgagggatggagagctgtgcagaaggccgagcctgcttcgccagccaccgcctacacggtgtgatcacgtcccactactcgctacaccaaatcccgccttgtag

SEQ ID NO: 134999 - DNA, 1617 bp, synthetic construct
  misc_feature 1..1617: note = Description of Artificial Sequence: Synthetic coding sequence
  source 1..1617: mol_type = other DNA
atggcgtccgaccctatattcacattggccccgcccttacattgccattatggcgcattccctccaaatgcttcaggttgggaacagccacccaatgcaagcggcgtaagcgtggcgagcgcggctctcgctgcatctgcagcctctcgcgtcgctaccagtaccgatccttcatgctctggcttcgcaccgcctgactttaaccattgcctgaaagattgggattataacggcttgcccgtcctaaccaccaacgcaattggtcagtgggaccttgtctgcgacctcggctggcaggtcatccttgagcagatacttttcatattgggtttcgcaagcggctacctctttctgggatatcccgcggacaggtttggaagacgcggcattgtccttctgacccttggcctggttggtccttgtggagtgggcggagctgctgctgggtcttcaacgggcgtaatggccttgagattcttgctgggttttctcctggctggcgtcgacctgggagtttatctgatgagactcgagctctgtgacccgacccagagacttcgagtcgctctggctggagagcttgtgggcgtgggaggccacttcctttttctgggactcgcgctggtatccaaggattggcgcttcttacagcgcatgattacagccccatgtattctgttcctgttctacggctggcccgggctgttcctggagtccgcgcgttggctgatcgtgaaacgtcagatcgaggaggctcagtctgtgctgaggattctggcagagcggaaccgtcctcacgggcaaatgttgggagaagaagcgcaggaggcactgcaagacctggagaatacctgtcccttaccagctacatcatccttttcgttcgcctccctgcttaactatcggaatatctggaaaaatctcctgatcctgggctttacgaatttcatagcccatgcaatcaggcactgttatcagccagttggcggtgggggctccccctcggatttttatctctgctccctcctggcctccgggaccgccgcactggcttgtgtttttcttggtgttaccgttgacaggtttggacggcgcggaatcctactgctcagtatgacactgaccggcatcgcatcactggtgctcctggggctgtgggactgcgagcatcccatcttcccaaccgtgtgggcgcagcagggcaaccccaaccgcgacctgaatgaggctgccataactaccttcagcgtgctcggactcttctccagtcaggcagcggccattctgagtaccctgctagccgcagaagtcataccaaccacagttagaggtcggggcctgggcctgattatggcactgggggctctgggaggcctgagcgggccagcgcaacgtttgcatatgggccacggagccttcctccagcacgtagtgcttgctgcctgtgccctgctctgcatcctgagcatcatgctgctgcccgagacaaaacgaaaacttctgcctgaggtcctccgggatggggaactttgccgccgaccttctctactgcggcagcccccccccacgcgctgcgaccacgtaccccttctcgcgacaccgaatcctgctctgtag

SEQ ID NO: 135000 - DNA, 1086 bp, synthetic construct
  misc_feature 1..1086: note = Description of Artificial Sequence: Synthetic coding sequence
  source 1..1086: mol_type = other DNA
atggcaatcgacagacgtagagaggctgctggcggcggtccagggcggcagcccgctcctgcagaagaaaatggatctctaccgccaggagacgctgccgcaagtgcaccactgggaggacgggcaggtcctggaggcggagcagaaattcaaccattaccaccactccacccgggggggggaccgcacccatcttgttgttccgcagccgctgcccccagcctgcttctcttggactacgacgggtccgtcctccccttcctgggaggactgggaggagggtaccagaaaactctggttctgctaacatggatccccgcacttttcatcgggttctcccagttctctgattcgtttttactggatcagcctaatttttggtgtagaggcgctggaaaaggtaccgagttggccggggtcaccacaaccggacggggcggagacatgggcaactggactagtctgcccacaaccccattcgccactgctccatgggaggcagccggcaaccggagcaatagcagcggtgctgacgggggcgacacacccccacttccatcacctcccgataaaggcgataatgcctccaattgtgattgtagggcttgggattacggaattcgagccggcctcgtacagaacgtggtctcaaagtgggacctggtttgcgataatgcctggaaagtgcacattgccaaattttccttgctggttggtttaattttcggctatttgataacaggctgtatcgccgattgggttggcagacgaccagtgctgctgttctccatcatcttcatcctgatattcgggctgaccgtagctctgtccgtgaatgttactatgttcagcacccttaggttcttcgagggcttttgtcttgccggcataatcctaacgctatacgctctccgtatcgagctgtgcccacctgggaaacgtttcatgattactatggtggccagcttcgtagccatggcgggtcagttccttatgcccgggctggctgctttatgccgcgattggcaggtccttcaagccttaattatctgtccctttctcctgatgttactgtattggtcatag

SEQ ID NO: 135001 - DNA, 1218 bp, synthetic construct
  misc_feature 1..1218: note = Description of Artificial Sequence: Synthetic coding sequence
  source 1..1218: mol_type = other DNA
atgttctccaccctaaggttttttgagggcttttgtctagccgggattatcttgactttatacgcccttcgcattgaactttgtccaccaggtaagagattcatgatcaccatggtggcctccttcgttgctatggctgggcagttcctcatgccagggcttgctgctctctgtcgggattggcaagtgttgcaggcgttgatcatttgtccgtttctgctgatgcttctttactggagcatattccccgaatccttaagatggctgatggccacccagcaattcgagagtgccaaacgactgattcttcacttcactcaaaaaaataggatgaatcctgagggggacatcaagggagtcatccccgaattggaaaaggagctgtctcgtagaccaaagaaggtgtgcatcgtgaaggtggtcggaacacgcaacttgtggaaaaatattgtggtcctgtgtgtaaactcgctgacaggatacggcatccaccactgctttgcaaggtcgatgatgggccatgaagtgaaagtcccactgctggagaacttctatgctgactactatactacagcttctattgcactcgtatcttgtctcgccatgtgcgtggtcgttcgctttttgggtcgtcgcggagggctgctcctcttcatgattctgacagcactggcctcactgctgcagctaggtctactgaatctgatcggaaaatactctcagcatcctgactctgggatgtccgacagcgtcaaagataagttttcaattgcattctcaattgtcggtatgtttgcctcgcatgccgtgggctccctgtctgtctttttctgcgcagagatcacccctactgtcattcgatgtggtgggctaggtcttgtcttagcctccgctgggtttggcatgttgactgctcctattatcgaattgcataaccagaagggttatttcctgcatcacataatttttgcatgctgcacacttatttgcattatctgcatcctgctactgcccgagagtagagatcagaatctgcccgaaaatatctcaaacggcgagcattacacaaggcagcctctcctcccacataaaaagggcgaacagcccctgctgctcacaaatgctgaacttaaagactacagcggccttcatgatgcggctgctgcgggcgatacactgccagaaggcgcaacggccaatgggatgaaggccatgtag

SEQ ID NO: 135002 - DNA, 2061 bp, synthetic construct
  misc_feature 1..2061: note = Description of Artificial Sequence: Synthetic coding sequence
  source 1..2061: mol_type = other DNA
atggcgatcgatagaagacgggaagcagccggtgggggtcccgggcgtcaaccggcccccgccgaagagaatggctcccttccaccgggagatgctgccgcctccgcccctctcggcgggagggccgggcccggagggggagccgaaatacagcccctcccaccccttcaccccgggggaggtccacatccttcctgttgcagtgccgcggctgctccaagtttactcctgctggactatgatgggagcgtgctgcccttcctgggtggcttgggtggggggtaccagaagacgcttgtcctgctgacttggataccagccctttttataggcttctcacaattttctgattcatttttgctcgatcagcctaacttttggtgtagaggggccgggaaggggactgaactcgcaggagtgactaccacgggcagggggggcgatatgggaaattggaccagtctgcccacgacacctttcgcaacagctccatgggaggcagcgggtaaccggagtaattctagtggagctgatggtggagacacccctcctctgccttcacctccagataagggcgataatgcctccaattgtgattgcagagcctgggactacggcattcgggcaggtctggtccagaacgtcgtctcaaaatgggatctggtctgcgacaacgcttggaaagttcatattgcaaaattttccctgttagtgggccttatcttcggatatcttataactgggtgcatagccgactgggtaggacgcagaccggttctcctgttttccattatcttcatactcatctttggcctgacggtggccctttccgttaatgtaaccatgttcagcaccctgcggttctttgaaggcttttgcctggcggggattatcctgaccttgtacgcactgaggatcgagttatgtcctcctggcaaacgattcatgattaccatggtcgccagcttcgtggctatggcggggcaattcctaatgcctgggctggccgctctctgccgcgactggcaggtccttcaggcactcatcatctgtcctttcctgctcatgttgctatattggagcatattcccggagagtttgagatggttgatggccacgcaacagtttgagtctgccaaacgcttgattctgcactttactcagaagaaccggatgaatcccgagggcgacattaagggagtgattcccgagctcgagaaagaactcagccggaggcctaaaaaggtgtgtatcgtcaaagtcgttggaaccagaaacctctggaagaacatcgtggttctgtgcgtgaattcactcacgggctacggcatccaccattgttttgctaggtcaatgatgggacatgaggtcaaagtcccactactggaaaacttctacgcagactactatactacagccagcattgccctagtgagctgcctggccatgtgcgtggtagtccgattcctgggtcggcgaggaggcctgttattgtttatgatcctgaccgccctagcttctctgttgcagctgggtctgctgaacctcattggcaaatacagtcagcaccccgacagtggcatgtctgattcagtcaaggataaattctcaatagccttttctattgttggcatgttcgcctctcacgccgttggcagcctgtcggttttcttctgtgcggaaataacacctacggtgatacgctgtggaggactgggattggtgctcgcttcagccggcttcggaatgttgacagcaccaatcatcgagctgcacaatcagaaggggtattttttgcatcacatcatattcgcctgctgcacactgatctgcatcatttgtattttacttctgcccgaatcacgagatcagaatctcccagagaacatctcaaatggggaacattacacccgtcaacctctgctgccgcacaagaagggggaacaacctctcctgcttacaaatgccgagcttaaggactactcagggctccatgacgcagctgccgccggagacactctccctgagggtgccactgcaaacgggatgaaagccatgtag

SEQ ID NO: 135003 - DNA, 1218 bp, synthetic construct
  misc_feature 1..1218: note = Description of Artificial Sequence: Synthetic coding sequence
  source 1..1218: mol_type = other DNA
atgttctccacgctacgcttttttgaaggcttttgtctcgccggaattattttgacactctatgctctgaggattgagctgtgcccgcctgggaaaagattcatgatcaccatggttgcaagctttgtggccatggctggacagtttctgatgcccggcttggctgccctctgtcgggactggcaagtcctccaagccttaattatctgccctttcttacttatgctcctttactggagtatctttccggaaagcctgagatggctaatggctactcagcagtttgagagcgcaaagcgcttgatcttacattttacacagaagaatcgaatgaacccggaaggcgatatcaagggagtaatccccgaactggagaaggaattatccaggcggcccaagaaagtctgcattgtgaaagtggtgggcacccgcaatctgtggaaaaacattgtggtactctgcgtgaattctctgaccgggtatggcatccaccactgcttcgcccgaagcatgatgggtcacgaagtgaaagtgcctctccttgaaaacttctacgccgattattacaccacagcttcgatcgctctggtcagttgtctggccatgtgcgtcgtcgtccgcttcctgggtcgtcgcggaggactgttgctgtttatgattctgacagcccttgcctccctgcttcaattgggcttgttgaatctgattggcaaatatagtcagcatcctgactcaggcatgtcagactctgttaaagataagttcagtatcgcttttagtatcgtggggatgtttgcctcacatgcggtgggaagtttgagcgtgttcttctgcgctgaaatcactcccaccgtgatccgatgcggcggcttagggctggtcctggcaagtgctggtttcggcatgctaacagccccgatcatagaactccacaaccaaaagggctatttcctgcaccacattatcttcgcttgttgtactctgatatgtatcatatgtattctgctgctccctgagtcgcgcgatcaaaatctgccagagaacatttccaatggcgagcactatacccggcagcctctgctgcctcacaaaaagggggagcagcccctgctgctaacaaacgccgagcttaaagactattccggcctccacgacgccgcggctgcaggtgacacactgccagagggcgcaaccgctaacggcatgaaagccatgtag

SEQ ID NO: 135004 - DNA, 969 bp, synthetic construct
  misc_feature 1..969: note = Description of Artificial Sequence: Synthetic coding sequence
  source 1..969: mol_type = other DNA
atggggttcgatgtgctcctggatcaggttggggggatggggcgctttcagatctgcttaattgccttcttctgcattacgaatattctattgtttcctaatattgttctggaaaactttactgctttcacgccctcacatcgctgctgggtgcctctgcttgacaacgatactgttagcgacaacgatacgggaacacttagcaaagatgaccttctcagaatcagcattccactggactccaacctccgccctcagaagtgtcagcgcttcattcaccctcagtggcagttactccacctgaatggaacctttccaaacactaacgagcctgatacagaaccatgtgtcgacgggtgggtgtatgaccgctcgtctttcctctctacgattgtcacagagtgggacctggtctgtgaaagccagtcacttaagagcatggtgcagtccttattcatggctggatctctccttggcggtttgatttacggccatctgagcgacagagtgggacgcaaaattatatgcaagctgtgtttcctgcaacttgctatcagcaacacctgcgcggccttcgcccccacttttttggtgtactgcatactgaggtttttggccgggtttagcacaatgacaattctgggtaataccttcattttgtccctggaatggacgcttccccgaagccgcagcatgactatcatggtgctgctttgttcatattcagtaggccagatgctgctgggtggcctggcattcgctatacaggactggcacatcttgcagttaactgtgtccacgccaataatcgtcctttttctctccagctggtatgagcaatcccctcactccttgccagtttccgaggcaatggtggacattgaacgtaaaatcctgacccccggcatctgctcagtctctggccttgttttgagccacgatgtacacagcacctactgtgtgacctag

SEQ ID NO: 135005 - DNA, 780 bp, synthetic construct
  misc_feature 1..780: note = Description of Artificial Sequence: Synthetic coding sequence
  source 1..780: mol_type = other DNA
atgcgggcacaggaagatctggaaggtcgcactcaacacgaaactacccgtgatcccagtacccccctcccgacggaacccaaatttgacatgctgtacaaaatagaagacgtgcctccatggtacctctgtatattgctgggattccaacactatctgacatgtttttctgggacaatagcagtaccgtttttactcgcggaggcactttgtgtgggacacgaccagcacatggtaagtcagttaataggtacaatcttcacctgcgtcgggatgttctgtaccctctttgggatgataactgctgttggactctcgaatctgcagttcgtcgacatgaatagcagtaggaacctgtttgttttggggttctcaatgttttttggtctcactttgccgaactatctggagagtaatcctggtgcaatcaacactgggattcttgaagttgatcagatcctcatagtcctgctcacaacagagatgttcgttggcggctgtttggcttttatcctcgataacaccgttcctggctccccagaagaacgaggcctgatccagtggaaagcaggggcacacgctaattccgatatgagcagctcgctgaaatcttacgatttcccaatcggcatgggaatcgtgaagcgcatcactttcctcaaatatatccctatatgtcctgtcttcaagggtttctccagctctagcaaggaccagatcgcaatacccgaagacacccctgagaatacagaaactgcaagcgtttgcaccaaggtctag

SEQ ID NO: 135006 - DNA, 1797 bp, synthetic construct
  misc_feature 1..1797: note = Description of Artificial Sequence: Synthetic coding sequence
  source 1..1797: mol_type = other DNA
atgcgggcgcaggaggacttagaaggacgcacacagcatgaaaccactagggacccaagtaccccattgcccacagagccaaagtttgatatgctctacaaaatagaggatgtcccaccctggtacctctgtatcttactgggttttcagcattatctgacttgtttttcagggaccattgccgttcccttccttctggccgaggctctgtgtgtcgggcacgaccagcacatggtctcacagctcatcggaacaatcttcacctgcgtggggattaccacactcatacagaccactgtggggatccgattgcctctgtttcaggcctctgccttcgccttcttggtgcctgccaaagccatcttggccctggagcgatggaagtgtcccccagaagaggaaatctacgggaattggagtttgccattgaacacctcccacatttggcacccacgaataagagaagtccagggcgccattatggtatctagtgtggtagaggtggtcatcggactcctcggattgccgggggcactactcaactatatagggccattgaccgtcacgcctacagtgtccctgatcggcctgtctgtgttccaggctgccggcgaccgtgccggaagccactggggtattagcgcctgtagtattctgctgattattctctttagccagtacctgaggaatcttacatttcttcttcctgtctatagatggggaaaaggattaactcttttgaggatccagatctttaaaatgtttcctattatgttggcaatcatgactgtgtggcttctctgttacgtcctgactctaaccgacgttctgcccactgatcccaaagcctacggttttcaggcacggaccgatgctcggggggatatcatggccattgcaccatggatcaggataccctacccctgtcagtgggggctgccaactgtgacagccgccgccgttctgggaatgttcagcgctacccttgccggcattattgaaagtatcggggattattatgcttgtgctcgtctggcaggggccccccccccccctgtgcatgccataaacagaggcatattcaccgaagggatctgttgtataatagctggactgctggggacaggtaacggcagtacctctagcagccccaacattggggtgttagggatcactaaggtgggaagtaggcgcgtggtgcagtatggagcagctatcatgctagtcctcgggacaatcggaaagtttaccgctctattctcgagcctgcctgatccaattctaggtggcatgttttgcactctgttcggtatgatcacggctgtggggctttcaaatctgcagttcgttgatatgaatagctctcgcaatctatttgttcttgggtttagtatgtttttcggcctgacgcttccgaattatttagaatccaaccctggagcaatcaacacaggaatcctggaagtcgatcagatcctcatagttctgcttactacagagatgtttgttggcggatgcctagctttcatcctggataatacggtccccggctcacccgaagagcggggactgatccaatggaaggctggcgcccacgccaattcggacatgtcctcatccctgaagagctatgattttcccatcggaatgggaatagtcaaacgcatcacatttctcaagtatattccaatatgcccagtgtttaagggatttagcagctcaagcaaggatcagatcgcaatacctgaagacaccccagagaataccgaaacagccagtgtttgcactaaagtgtag

SEQ ID NO: 135007 - DNA, 1809 bp, synthetic construct
  misc_feature 1..1809: note = Description of Artificial Sequence: Synthetic coding sequence
  source 1..1809: mol_type = other DNA
atgcgcgctcaggaggacctggaaggcagaacccaacacgaaacaacgagggaccccagtacaccgctcccaacggagccaaagtttgatatgctttataagatcgaagatgtcccaccgtggtatctttgtattctattgggttttcagcactacctgacatgtttcagtgggacaatagcagttccttttctccttgctgaggcattgtgcgtgggacacgaccagcatatggtgtcccagctaatcggcaccatttttacttgtgtgggcatcaccacactgattcagactacggttggcataaggctgccattgtttcaggcttcggcgtttgcctttctggtgcctgcaaaggctatactggccctcgagcggtggaagtgccctcccgaggaggagatatatggcaattggagcttgcctctcaatacctctcacatttggcaccccaggatccgggaagtcggccttcacgtgcaaggtgccataatggttagttcggttgtggaggtcgtgattggactgcttggactgcccggagctctgctcaattatatcggacccctcacagtgacgccaactgtgtctttaattggactcagcgtgtttcaagccgctggcgatagggctggttcccactggggtattagtgcctgctctatcctcctgattatcctgtttagccagtacctaaggaatctgacattccttctgcccgtgtatcgatggggtaagggattgacactgctacggatccaaatcttcaaaatgtttcccattatgctggccataatgaccgtctggctcttgtgttatgtgctcacactcactgatgtgctgcctactgatccaaaggcatacggcttccaggcaaggacagacgcccgcggggatatcatggctatcgcaccctggattcggattccctacccatgtcagtgggggctgcccaccgtcacagcggcggctgtccttgggatgttcagcgcaacgctggcgggcatcatcgaaagcatcggagactattatgcatgtgcacggctcgccggcgctcctcctccaccagtgcacgctatcaacaggggcatattcactgagggaatttgctgtattatcgcagggctgctgggaactgggaacgggtccaccagcagttcaccaaacatcggcgtcttaggcatcaccaaggtgggctcccggagggttgtccagtacggggctgcaattatgcttgttttagggaccatcggaaaatttactgccctttttagttcgctgcccgacccgatcctcggcgggatgttttgcaccctgtttggaatgattacagccgtcggactgtctaacctacagttcgtggatatgaacagcagtcggaatctctttgtgctgggcttttccatgtttttcgggctgacactcccaaactacctagaaagtaaccccggcgccattaataccgggattctcgaagtcgaccagattttaatcgtgttactcacaactgaaatgttcgtgggcggctgtcttgccttcatcctcgacaatactgtccccggctcccccgaggaaaggggcttgatccagtggaaagcaggggcccacgctaactccgatatgagttctagtctgaagtcttatgattttccaattggcatgggaattgttaaacggattaccttcctgaagtacattcctatttgtcctgtgtttaagggattctcttcttcaagcaaggatcagattgctatcccggaagacacccctgagaacacagagactgcttccgtgtgtacaaaagtgtag

SEQ ID NO: 135008 - DNA, 1179 bp, synthetic construct
  misc_feature 1..1179: note = Description of Artificial Sequence: Synthetic coding sequence
  source 1..1179: mol_type = other DNA
atgcgagctcaggaggaccttgaaggcagaacccagcatgagactacaagggacccttccacacctctcccaaccgagccaaaatttgacatgctttataaaatcgaggacgtgccaccctggtatctgtgtattctgttaggctttcagcattacctaacttgcttttcgggcacgatcgccgttccctttcttcttgcagaagccctgtgtgtgggacacgatcaacacatggtgtcccagcttatcggaaccatttttacttgcgtggggataacgacactgatacaaaccaccgtgggcataagacttccactgttccaggcttccgcatttgccttcctcgtcccagccaaagccattctggccctggaacgctggaaatgcccacccgaggaggaaatatacgggaattggtcactcccgctcaatacgtcccatatatggcacccacgcatccgcgaggtcgggctccatgtatcaattgaggaggctggaggctacatgggagtgagagtggcggcagagtttggcgatctgcggagatggtcgcgaagctttgttcccgcctcgagctcccaagttcagggggctatcatggtgtcttccgtggtagaagtggtcattggcttgctgggtcttcctggagcgctgcttaattatatcggacctctgaccgtcacaccgactgtgtccctcatcggactctcagtgtttcaggctgctggagatcgagccggatcacattggggaataagtgcctgctcaatcctgcttatcattcttttcagccagtacctgcgtaacttaacttttttgcttccgtgtgctcagcagagtgcgcccctgtggcaagctagcctgtccccgagtgaaattacaacccctgttcctgcctggctagtccaccatcctctccagtatatgttatccactggagccagctcacctaaagcctttgctgcgagttctagaggttactgggctcgcgcaaccgggcccccccgccccgtaccaaccctagcttcttgggaactgcctcgctgggctgcaggcgcttggtgttctatggtcaggctttcctgctggagctgggctccctccgcatcttcacggccaagttctcctaggtccctcactccttcctggggggcctgctctgcactgtcgctcgcttag

SEQ ID NO: 135009 - DNA, 1953 bp, synthetic construct
  misc_feature 1..1953: note = Description of Artificial Sequence: Synthetic coding sequence
  source 1..1953: mol_type = other DNA
atgatgggaattgggaaaaataccacttccaaatctatggaggctgggtcctctacagagggcaagtacgaagatgaggccaagcacccggcctttttcacgctgcccgtggtgatcaacggaggcgcaacttcgagcggggagcaggacaacgaagatactgaactgatggccatttacacgacggagaatggaatcgcggaaaagtcttctctcgccgagactctcgatagcacggggtctctagacccgcagcgcagtgacatgatatacactatcgaagacgtccctccttggtatctgtgcatttttttaggtctccagcattatctcacctgtttctccggcactattgcggtgcccttcctgctcgcagatgccatgtgcgtggggtatgaccaatgggcgacgtcccagctaattggaactatattcttttgcgtgggaatcaccaccctgctgcagaccactttcggttgccgactgcctctgttccaggcatctgcatttgctttcttagcacctgcccgagcaatactatccctggataaatggaaatgcaatacgacagacgtctccgtagcaaatggcactgctgaattactgcataccgaacatatctggtatccgcgtatcagagaaatccaaggggccattatcatgagctcacttatcgaggtggtaatcggcctcctaggattacccggtgctctgctgaagtatatcgggccattaactatcacccctacggttgcattaatcgggctgtccgggtttcaagcggcaggagaaagggccgggaagcattggggcatcgctatgttgaccatctttctggtgctgttgtttagtcaatacgcaaggaatgtcaagttccctctgccgatctacaaaagcaagaagggctggaccgcttataagttgcagctgtttaaaatgtttcctattatactggccatcctggtctcttggttactctgctttatctttacagtcactgacgtgttccctcctgactcaacaaagtatggattttacgctcgcacagacgcaagacaaggggtactgcttgtggctccttggttcaaagtcccgtatccattccagtggggattacctaccgtttcggccgctggagtgattggaatgttaagtgccgtcgtcgcatctataatagaatcgatcggtgactactatgcttgcgcaaggctgtcatgcgcccccccccctcccatacacgcaatcaaccgtgggatattcgtcgagggactctcatgtgtgcttgatggcatctttggtacaggcaacgggagcacatcatcatcacctaatatcggagtcttggggattaccaaggtgggctcccggagggtaatccagtgtggcgctgccctgatgttagcccttggaatgataggcaagttttccgcattgtttgcctccctccctgatcctgtgcttggagccctcttctgtacacttttcgggatgatcacagctgtgggtttatccaacctgcagttcatagacttaaattcttcccggaacctcttcgttctggggttctccatcttttttggcttggtgttacccagctatcttcgacaaaatccgttggtgacagggattaccggtattgaccaggtgttaaatgtcttgcttaccacggccatgtttgttggcggatgcgttgccttcatcctcgacaatacgatccctgggacaccggaagaaaggggcataaggaagtggaagaaaggagtcggaaaaggcaacaagtctctggatggcatggaatcttataatctcccattcgggatgaatataatcaagaaatatcgctgttttagttacctccccatttcccctacgtttgtgggatatacctggaagggtctgagaaagtccgacaatagtagatcgtctgacgaggattcgcaagccaccggatag

SEQ ID NO: 135010 - DNA, 1953 bp, synthetic construct
  misc_feature 1..1953: note = Description of Artificial Sequence: Synthetic coding sequence
  source 1..1953: mol_type = other DNA
atgatgggcattggaaagaatacaacctcgaaaagtatggaggccggatccagcaccgagggtaaatacgaggatgaagctaagcatcccgcctttttcactcttccagttgtgatcaacggcggcgctaccagcagcggagaacaggataacgaagatactgaacttatggcaatttacaccaccgagaacggaatcgccgagaagtcctccttagccgagactctggacagcaccgggagcctggacccacagagatcagacatgatctataccatagaagacgttcccccctggtacttgtgcatctttttaggcctgcaacactacttaacatgctttagcggcactatcgccgttcccttcttactggccgacgccatgtgtgtcggttatgatcagtgggctacaagccaactcatcggcacaattttcttctgcgtgggaattactacactgttgcagactactttcggttgccgcctaccgctgttccaggccagcgcttttgcattcctggcacccgcccgagcaattttgagcttggataagtggaagtgcaataccaccgacgtgtcagtggcgaatggcactgctgagctcttacataccgagcacatctggtaccctagaattcgtgagatccagggagcaataataatgtcttctcttatcgaagttgttatcgggttgctaggcctccccggcgctctcctgaaatatattgggcccctgaccatcacgcctaccgtggccctcattggactttcaggatttcaggcggctggggaacgcgctggcaagcactggggcatcgctatgcttactatcttcttggtattactgttcagccagtacgcaaggaacgtgaaatttcccctgcctatctataaatccaaaaaaggatggacagcctacaagcttcagttgttcaaaatgtttcctattatactggccatccttgtgtcctggctcttgtgctttatcttcacagtgacagacgtgtttccccccgacagcaccaagtacggtttttacgccaggacggatgctcgccaaggggtgctgttggtagcaccatggtttaaggtgccctacccattccagtggggattgcccacagtttcagccgccggcgttatcggcatgctgagtgccgttgtcgcttcaatcatcgaatctattggcgactactacgcctgcgccagacttagctgtgcacccccccctccaattcacgccattaatagggggattttcgtggaggggcttagttgtgtgcttgacgggattttcgggaccggcaacggtagcactagttccagccctaacattggagtcttaggaatcaccaaagtcggatccagacgtgtgatccaatgtggcgcagccttgatgctggcccttggaatgatcggcaagtttagtgcacttttcgccagtctgccagatccagtgctgggtgccctgttctgcaccctgtttggcatgattacagcagtgggcctgagtaatctacagtttatcgatctaaatagcagcaggaatctgttcgtgctcggcttttctatatttttcgggctggtgctaccaagctatctccgtcaaaatcctcttgtcactggaatcaccggcatagatcaagttcttaacgtgctgctgactactgccatgtttgtgggcggttgtgtggctttcatcttggacaacaccatccctgggaccccagaagagcggggaatccgaaaatggaaaaaaggcgtagggaaaggcaataagtccctggatggaatggagagttataaccttccctttggcatgaacataatcaagaagtacagatgcttctcttatctccctatttcgcctacattcgtcgggtatacgtggaagggcctgcggaagtccgacaacagccgttcaagcgacgaagatagccaggccacgggatag

SEQ ID NO: 135011 - DNA, 915 bp, synthetic construct
  misc_feature 1..915: note = Description of Artificial Sequence: Synthetic coding sequence
  source 1..915: mol_type = other DNA
taagggtatgatcaatgggccacttctcagttaataggtaccatcttcttttgcgtgggcattaccactctgctacagactacattcgggtgtcggacaatttttctagtcttactgttttctcagtacgctcgcaacgtgaagttccctctgccaatctacaagtctaaaaaaggctggactgcatacaaactgcagttatttaagatgttccccatcatcctggcgatcttggtttcatggttgctgtgtttcattttcaccgtgacggacgtgttccctcccgacagcaccaagtatggtttctatgcccgcacggacgctcgccagggcgtgctactagtggcgccctggttcaaggtaccgtacccattccaatggggcctccccactgtcagtgcagccggcgttatagggatgttatccgcagttgtggcctcaatcattgaatccattggcgattattatgcctgcgctagactgtcatgtgcaccaccaccgcccattcacgccataaatcgtggaatatttgttgagggcctgtcctgcgtgttagacggcatcttcgggacgggcaacggatccacgtccagctctccaaacatcggcgtactaggcatcactaaggtcggatcaagaagagtcattcagtgtggagccgcactcatgctggctctggggatgattggtaaatttagcgccctgttcgccagtttgccagatccagtcctaggggcactcttctgcactttgttcggcatgattacagccgtgggtctttctaatctccagtttattgacctcaactctagcagaaacttgttcgtactcgggttttcaatttttttcggtctcgttctcccgtcctatctgcgacaaaatccccttgtgactgggattactggaatcgattag

SEQ ID NO: 135012 - DNA, 1611 bp, synthetic construct
  misc_feature 1..1611: note = Description of Artificial Sequence: Synthetic coding sequence
  source 1..1611: mol_type = other DNA
atgatgggcattggcaagaacaccacttccaaaagtatggaagctggttctagtacggaaggtaaatacgaagatgaggcgaaacaccctgccttttttactcttccggtcgtcataaacgggggagccacttcttctggtgaacaggataacgaggacactgagcttatggcaatctataccacagagaatgggatcgccgagaaatcaagcctcgccgagaccctggacagcacaggcagtctggaccctcagcgatctgatatgatttatactattgaagacgtgccaccatggtacctgtgtatatttcttgggctgcaacattacttgacatgtttttctgggacaatcgcagtcccttttctgttagcggacgctatgtgtgtgggttatgatcaatgggctacttcacagctcataggtacgattttcttctgtgtgggaataacaacattgttgcagacaaccttcggatgtcggacgattttcctcgtgctgctcttcagccaatacgcccggaacgtgaagttcccccttcccatctacaagtctaaaaagggctggactgcttacaagctccaactgttcaaaatgttccctatcattttggccatcctcgtctcttggcttctatgcttcattttcactgtgacagatgttttccctccagactccaccaagtatggcttttatgccagaacagacgcaagacagggagtccttttggtggctccttggtttaaggtgccctatccattccaatggggactgcccacggtcagcgctgccggggtcattggtatgttgagcgccgtggtcgcctccatcatcgaatctattggcgactattacgcctgtgctagactcagctgcgccccacctccaccgatccatgccatcaaccggggcatattcgtcgagggactctcttgtgtcctggatggaattttcggtaccggcaatggatctacctcttcatcccctaatatcggagtccttggcataaccaaggtagggtcaagacgagtgatccagtgcggcgccgccctcatgttggcactgggcatgattggtaagttcagtgcactgttcgcaagcctgcccgatcctgtgctcggcgccctcttctgtacactattcggcatgataactgctgtggggctgtccaacttacagttcatcgacctgaattcctccaggaatctgtttgttctaggcttctccatttttttcggccttgtgctgccgagctatctgcggcagaatcccctggtcacggggatcacaggcatcgatcaggtgcttaatgtcctgctgaccactgccatgtttgtaggcggctgtgttgctttcatcctggataatactatcccaggaaccccagaagagcgaggcattcgaaaatggaagaaaggggttgggaaaggcaataaatcactggatggcatggagagctataatcttccttttgggatgaacatcattaaaaagtacagatgtttctcatatctgcctattagcccaacattcgtgggatacacatggaaaggcttgagaaagagcgacaattctaggtcttccgacgaggactcacaggcgactgggtag

SEQ ID NO: 135013 - DNA, 3300 bp, synthetic construct
  misc_feature 1..3300: note = Description of Artificial Sequence: Synthetic coding sequence
  source 1..3300: mol_type = other DNA
atgggcaaactcatcaggatgggtccccaggaaaggtggctgctgagaacgaagcgattacactggagtcgcttactcttcctgcttggcatgttgatcatagggagcacataccagcatcttcggcgccccaggggactctcatcactatgggcggccgtcagcagtcaccagccaatcaagctggcctcccgggacctgtctagcgaagagatgatgatgatgtccagctctcccagcaagcctagtagcgaaatgggtgggaagatgctggtgccacaggctagcgttggctcagacgaagccacactctcaatgaccgttgagaacattcccagcatgcccaaacgcaccgccaagatgatcccaacaacgaccaagaataattactcaccgacagcagccggcacagaacggcgcaaagaggacacaccaactagcagccgaactcttacatactatactagcacctcctctagacaaatcgtgaagaaatacactccgactccaagaggcgagatgaagagctatagccctactcaggttcgcgaaaaggtcaagtatacacctagtccccgaggcagaagggtaggcacatacgtaccatcgacattcatgaccatggaaacttctcacgccattaccccccggaccacagttaaggatagtgacattactgcaacctacaagatattggagaccaattccctcaagcgcattatggaggaaaccacacccactaccctgaaaggcatgttcgatagtaccccaaccttcttgacccatgaagtggaagccaatgtgctcacctccccccgtagcgtgatggagaagaacaatctgttccctccccgccgtgtggagtcgaacagctcagcacatccttggggcctggtaggaaaatctaaccccaaaaccccccagggaaccgtgctgcttcataccccagccacttcggaaggtcaggtgactataagcaccatgacaggctcttcacctgcggagaccaaggctttcacagccgcttggtcccttcggaatccctcaccaaggacatcagtctcagcaattaagactgcaccagccatcgtttggaggcttgctaagaagccatccactgccccctctacctctacaacccctactgttagggccaaattgactatgcaggtccaccattgtgtggtagtgaagccaacccccgctatgctcacgacaccatcaccaagtctgacaaccgccttgttaccagaggaattaagtccttcacccagcgtgctgccaccatccctcccagacctgcaccccaagggtgagtacccacccgatctcttttcggtcgaggaacggaggcaggggtgggtggtcctgcacgtgtttgggatgatgtacgtctttgttgctctcgctatcgtgtgcgacgaatattttgtccctgcactcggggttatcactgataagctccaaatttccgaggatgtggctggggctaccttcatggccgcgggcggcagcgccccagaactgtttacttcccttattggcgtctttatttcgcatagtaacgttggcatcggcacaatagtggggagcgctgtgttcaatatactgtttgttatcgggacgtgcagccttttctctcgcgagatcctgaatttgacatggtggccattgttcagggatgtatctttttacattctggacctgattatgctgatacttttctttttggattctctgattgcctggtgggagtctctcttactcctgttagcctacgccttttacgtcttcaccatgaagtggaataagcacatcgaagtctgggtcaaagagcaattgtcgcgccggcctgtcgccaaggttatggctctcgaggacctcagtaagcctggtgatggggccattgcggtggacgagctgcaggacaataagaaactgaagctgccaagcctgctgacccgaggcagcagctccacgtcattgcacaacagcacaattcgtagcacaatctatcagctgatgttgcatagcctcgaccccctcagggaagtccgattggccaaggaaaaggaagaggaatccctgaatcaaggagcccgagctcagccgcaggccaaagctgaatctaagccggaggaggaagaacctgctaagctaccagccgttaccgtcaccccagccccggtaccggatatcaagggcgaccagaaggagaaccccggggggcaggaggatgttgccgaggccgagtccacaggagagatgccaggggaagaaggtgaaacagcaggggaaggggaaaccgaagagaaatccggcggggaaacacagcccgaaggcgagggagaaaccgaaacccaggggaagggagaagaatgcgaagatgaaaatgaagcagagggtaaaggcgataatgagggggaagacgaaggagaaattcacgccgaggacggggaaatgaagggcaacgagggagaaactgagtctcaggaactgagtgcagagaatcacggcgaggcaaagaacgacgaaaagggcgtcgaagacggcggtggaagcgatggaggtgattccgaagaagaggaggaagaagaggaggaacaagaggaagaggaagaagaggaagaacaggaggaggaagaggaagaggaggaggaggaagaggagaaaggcaacgaggagccgttgagcctcgactggcccgagacaagacagaagcaggccatctatctgttcctgttgcctattgtctttccactgtggttaacagtccctgacgtgagacgacaggaatctcgaaagtttttcgtcttcacatttctgggcagcattatgtggattgccatgttttcgtacctcatggtctggtgggcccatcaagtgggagagaccataggcatcagtgaggaaattatgggcctgactatcctggccgctgggacatccataccagatctgattacctccgtgattgtagcaaggaagggcctgggcgacatggcagtgtcgagcagtgtcgggagcaacatttttgacattactgtgggtctgcctgtgccctggctgctgttttcactaatcaacgggctgcagcccgtacccgttagctcaaatggattgttttgtgctatagtcctcctgtttctgatgctactgtttgtcatctcttcaatcgcctcctgtaagtggcggatgaacaagatactcggcttcaccatgtttctgctgtattttgtgttcctgataatttctgtgatgcttgaggacagaatcatctcctgccccgtgtcagtctag

SEQ ID NO: 135014 - DNA, 3246 bp, synthetic construct
  misc_feature 1..3246: note = Description of Artificial Sequence: Synthetic coding sequence
  source 1..3246: mol_type = other DNA
atgggtaagttaattcgcatgggtccgcaggagcgctggctgttgaggaccaagagactccactggagtcggctactttttctgctaggtatgttaatcatcggcagcacatatcaacatctgcgaagacccagggggttgtctagcttgtgggctgcagtgagctcccatcagcccatcaaactggcgagtagagatttgtcctctgaggaaatgatgatgatgagtagttcccccagtaaaccaagctcagagatgggcggaaagatgctagtaccccaagcttccgtgggaagtgatgaggctaccttgtctatgacggtggaaaatatcccctcaatgccaaaacgcacagccaagatgatcccaaccactaccaaaaacaactattcacctactgccgccggcacggagcggcgtaaggaagacactcccaccagctctcgcactctaacctattatacgagcacttctagtaggcaaatcgtgaagaaatacacccccactccacgtggggaaatgaaatcttacagcccgacccaggttagagaaaaagtgaagtataccccaagccctcgaggtcggagagtcggcacatatgtgccatcaacatttatgaccatggagaccagccacgcgatcaccccgagaacaactgttaaagattcagatattacagctacttataaaatcctcgaaaccaatagcctgaaacgcatcatggaagagacaacgcctactactctcaaagggatgtttgactccactccaacctttttaactcatgaagtcgaagccaatgtactaactagcccaagaagcgttatggagaaaaataacctatttccacccaggcgggtcgagagcaactctagcgcacatccctggggtcttgtagggaagtctaatcccaaaaccccacaaggcactgtcttgcttcacacacccgctacttccgagggtcaagtcacaatatctacaatgacaggtagttcccctgccgagactaaagcctttactgccgcctggagcctgcggaacccctccccaagaacttctgtgtccgccataaaaactgcgcccgccattgtctggcggctagccaaaaagccatccacagccccgtctaccagcacaacccctaccgttcgggcaaagttgacgatgcaggttcaccactgtgttgtcgtgaagcccacccccgccatgctgacaacgccttcacctagtctgaccaccgccctgctccccgaggagttgagcccgagcccttcagttctcccaccttctctgccagaccttcatcccaagggcgagtatccaccagacttgttctctgtggaggaaagacggcagggttgggtcgtgctccatgtgtttggtatgatgtacgtcttcgtggccctggcgatcgtgtgtgatgaatatttcgtcccggcattaggggttattaccgataaactccagatctcagaggacgttgcaggtgccacattcatggcggctggaggatcagctcctgaattgttcaccagcctcatcggagtgttcatcagtcacagcaatgtagggataggcacaattgtcggctcagccgtgttcaacattcttttcgtgatcgggacctgcagtctcttcagccgcgaaattctcaacctgacttggtggccactctttcgagacgtgtctttttatattctggatctcatcatgctgatactgtttttcctcgacagcctgatagcttggtgggagtccctgctacttttgctggcatacgctttctatgtgttcactatgaagtggaacaagcatatcgaagtctgggtaaaagaacaattaagtagacgcccggtggccaaggtaatggccctggaggacctgtccaagctgccttccctcctgactcgggggagctcttctacgtccctgcacaacagtacgatcaggtcaaccatatatcagctgatgttgcacagcctggacccactgagggaagtccggctggctaaggagaaggaggaggaatccctcaaccagggggccagagcccagccccaggcaaaagctgagagcaaacccgaggaggaggagccagcaaaactccctgcagtgaccgtgacacccgctcctgtgccagacattaagggtgatcaaaaggaaaatccagggggacaagaggacgtggccgaggcggagtcaactggcgagatgcccggagaagaaggggagactgctggtgaaggagagacggaagaaaaatccggtggggaaacccagccagagggcgaaggggaaacggagacccaggggaaaggcgaggagtgtgaagacgagaacgaggctgagggaaaaggcgacaatgagggcgaagacgagggagagatacacgccgaggatggcgaaatgaagggcaacgaaggcgagaccgaatcccaggaactctccgcggagaatcatggcgaggctaaaaacgatgagaagggggtcgaggatggcggcggctctgatggtggcgacagcgaagaggaggaagaagaagaggaggaacaggaagaagaagaggaggaagaggagcaggaggaggaagaggaggaggaagaagaagaggaggaaaaaggaaatgaggagccgctgagcctagattggcctgaaactagacagaaacaggcgatatacctgtttctcttaccgatcgtgttccctttgtggctgactgttcctgatgtgcgcaggcaagagtcacgcaaattttttgtgtttactttcctgggtagtatcatgtggattgcaatgttttcatatctgatggtgtggtgggcccaccaggtgggtgagaccatcggtatttcggaagagattatggggctcactattctggcagcagggacgtccattccagacctgatcacttctgtgattgtcgccaggaagggtctgggggacatggctgtcagttccagcgttggaagcaacatattcgatattaccgtcgggctgccggtcccttggctgctgttcagcctcatcaacggcctgcagcctgtgcctgtgagtagcaatggcctcttttgcgcaatcgtgctcttgtttctgatgctgctgttcgtgataagcagcatagcaagttgcaagtggaggatgaacaaaattttgggatttacaatgttcctgctctattttgtgttcctgattattagcgtaatgctggaggatcgcattatatcttgccccgtttccgtgtag

SEQ ID NO: 135015 - DNA, 3210 bp, synthetic construct
  misc_feature 1..3210: note = Description of Artificial Sequence: Synthetic coding sequence
  source 1..3210: mol_type = other DNA
atgggtaaattgattcgtatgggaccccaggaacgctggctcctgaggacaaaacgcctacattggagtcgccttttgtttttattgggaatgctgattattggtagtacttaccagcatcttagacggccacggggcctatcttctctctgggcagcagtctcatcccaccaaccgatcaagcttgcttcaagggacttgtcatccgaggagatgatgatgatgagctcatctcctagcaagccatccagcgagatgggaggtaaaatgctcgtgccccaagcttcagtagggtcagacgaagcaacgctcagcatgaccgttgagaatattccttccatgcctaagcgcacagcaaagatgatacctaccacgacgaaaaataactatagtcctacagctgcaggtactgaaagacggaaggaagatacgcctacgtcatctcggacactgacttattacacctccacttcgtcacggcagatcgtcaaaaagtacacacccacaccacgcggggaaatgaaatcatactctccaactcaggtcagagagaaggtcaaatacactccttcgcctcgtgggcgccgagtgggtacttacgtcccatccacttttatgactatggagacatcgcacgccattactccaagaaccacggtgaaggactcggacattaccgcaacatacaagatcctggagacaaatagtctcaagaggatcatggaggagacgacacctactacactcaagggcatgtttgactctacccctactttcctaactcatgaagtggaggccaacgtcctgacctcaccgcggtcagtgatggagaaaaataatctgttccccccgagacgggtagagtcgaactcgtcagcccacccttgggggttggtcggcaagtcgaatcccaaaactccacaaggcacagtgctgctgcacacccctgccacctcagaaggacaagtgactatcagcaccatgacaggaagctcaccagctgaaactaaagccttcaccgcggcgtggagtctcagaaatccatccccacgcacctctgtcagcgccataaagacagcccctgctatcgtgtggcggctcgccaagaaacctagtaccgcccccagcacatctactacaccaaccgtgcgagctaaactgaccatgcaggtacaccactgcgtggtggtgaagcctacgcctgctatgctgacaacaccctcgccatcactgactactgctcttctccccgaggagttatccccgtcaccaagcgttctgccacccagtctgcctgacctgcaccctaagggcgagtatccacctgatctcttctccgttgaagaaaggaggcaggggtgggtcgtgctgcacgtcttcggtatgatgtacgtctttgtggccctggccattgtttgcgatgaatactttgtgcccgcactgggtgtgattactgataaactgcagatcagcgaagatgtagccggggctacttttatggcagccggtgggagtgcgcctgagctgttcacgtctctcataggagtctttattagccactccaatgtgggcataggcaccattgtcgggtcagccgtgtttaacatactttttgtcatcggcacctgctctctctttagcagagagattctgaacctgacttggtggcctctgttcagggatgtaagcttctatattctggaccttataatgcttattctgtttttcctggatagtttgattgcttggtgggaaagcctactccttttgctggcctatgcgttctatgtatttacaatgaagtggaacaagcatatcgaggtgtgggtaaaagaacagctctcaagaagaccagttgccaaggtgatggccctagaggacctctctaaaccgggggacggcgccatcgccgtggacgaactgcaggataacaagaaactgaaattaccttccctcctaacaaggggcagcagctcaacatcattacacaattcaacaattaggtctacaatttatcagctgatgctgcactcactggatcccctcagagaagtccgattagccaaggagaaagaggaggaatctctgaaccagggcgcgcgtgcgcagccccaggcgaaggctgagagcaagcccgaggaagaagagcctgccaaactgcctgcagtgacggttaccccagcgccagttcctgacatcaaaggagatcagaaagaaaatccaggggggcaggaggacgtcgctgaagctgagtctactggggagatgccgggtgaagagggcgagacagccggggagggggaaacggaggagaaaagtggaggcgagactcagcctgagggtgaaggcgagacagaaacgcagggcaagggcgaggaatgtgaggatgaaaacgaagcggaggggaagggtgataatgaaggagaagatgaaggcgaaatacatgcagaggatggtgagatgaagggcaatgagggggaaaccgagtcacaggagctgagcgcagagaaccacggcgaagccaaaaatgacgagaagggggtggaggatggcggaggatccgatggcggagatagcgaggaggaagaagaagaggaagaggagcaagaggaagaggaagaggaagaggagcaggaggaggaggaagaggaagaggaagaggaggaggaaaaaggaaatgaggagcccctttcactcgactggccggagacccgccagaagcaggcaatctatctatttctcctgccaattgtttttccactctggctgactgtcccggatgtgaggcgccaggtcggagagaccatcggaatctccgaagaaattatgggcctaactattctcgccgcaggaacgtctattcctgatcttatcacaagcgtgatagtggccagaaaggggctcggcgacatggctgtgagttccagtgtgggatctaatatattcgatattactgttgggttgcctgttccgtggctcctgttcagtctgattaacggcctgcaacccgtaccagtcagttcaaacggcctgttctgcgccatcgttctgcttttcttgatgttactgtttgttatatccagtattgcgagctgcaaatggaggatgaacaagatcttgggcttcactatgtttcttctgtattttgtgtttcttatcatttccgtgatgttggaggatcgaattatttcatgccccgtgtctgtgtag

SEQ ID NO: 135016 - DNA, 3246 bp, synthetic construct
  misc_feature 1..3246: note = Description of Artificial Sequence: Synthetic coding sequence
  source 1..3246: mol_type = other DNA
atgggaaaacttattcgcatgggcccccaggagagatggctgctgagaacgaaacgcctccattggagccgcctgctgttccttctcggaatgctgatcatagggagcacataccagcatctccggcggccgaggggcttgagcagtctatgggcggctgtgagctcccatcagcctatcaagctcgccagtcgcgacctgagttctgaggaaatgatgatgatgtctagcagtcccagtaaaccatccagcgagatgggcggcaagatgctcgtgccgcaggcgagtgtgggcagtgatgaagcaacattatctatgacagtagagaacatcccctcaatgcccaaacgcacagccaaaatgatcccgacaacaaccaaaaacaactacagtccgacagccgcaggcaccgagcgccgtaaagaggacactccgacatcgtcacggacgcttacctactacacaagcactagctcccgacagatcgtaaagaaatatactcccactccacgaggcgaaatgaagtcttattctcctacacaagtgagagagaaggtcaagtacactccctctcctcgcggtaggagggtgggaacatacgtgcctagcacgtttatgacgatggagacgagtcacgctattacccctcgcaccacagtgaaagactccgacattactgctacctacaaaatcctggaaactaacagcctcaagcgaatcatggaagagactacccccaccactttaaagggcatgtttgattcaacgcctacgtttttgactcatgaggtcgaggccaatgtgctcactagtccacgttctgtgatggaaaaaaacaatctgttcccccctcgtagggtggagagcaactcttccgcgcacccctggggtctggtggggaagtcaaatcccaagaccccacagggcaccgtgctcctgcacacacctgcaacgtctgagggacaggtcacaataagcactatgacgggctcctcacctgctgaaaccaaggccttcacagctgcttggtctctccggaatccttccccgagaacaagtgtgtcagctatcaaaacagcccctgccatcgtctggaggctggccaagaaaccgagtaccgctcccagcaccagcacaacacctacggtaagagcaaaactgaccatgcaggtacaccattgcgtcgttgtgaagccaacccccgctatgctgacaacaccaagtcctagtttgacaactgcgttactgcccgaagaattaagcccatccccgtccgtgctaccccccagcctgcctgatctgcaccctaagggcgagtatccccctgacctcttctccgtcgaggaaagaaggcaaggatgggtcgtcctccacgtgttcggtatgatgtatgtcttcgttgccctcgccatagtctgtgatgagtactttgtaccagccttgggagttataacggacaagcttcagatatctgaagacgtggctggcgctaccttcatggccgctggcggcagtgcccctgaactctttaccagcctgataggtgtgtttattagccacagcaacgtgggcattggcaccatcgttggcagcgcagtcttcaacattctcttcgtcattggcacctgctcccttttctctagggaaatacttaatttaacttggtggccgctcttcagggatgtgtccttctacatcctagatctcattatgttaatcttattctttctggacagcttgatcgcttggtgggaatcattactcttactgttggcctacgccttctatgtgttcactatgaaatggaacaagcatatcgaagtttgggttaaagaacagctgtctcgaaggcctgtcgccaaggtcatggctctggaggatctgtcaaaattacccagcctgctaactagaggttcgtcaagcacctctctgcacaatagtacaatcagaagcactatttaccagttaatgctgcactcacttgacccgctccgtgaggtgcgccttgccaaagaaaaggaagaagaatctctcaaccagggagccagggcccagcctcaagcaaaagctgagtctaagccagaagaagaagaacccgccaagttacccgcagtcacagtaacccctgctcccgttcccgacatcaagggggatcaaaaggaaaatcctggagggcaggaagacgtggcggaggccgagtctacgggggaaatgcctggggaggaaggcgaaacagcaggggaaggagagacggaggagaaatctgggggtgaaacccagccagaaggcgaaggtgagactgagacccagggcaagggtgaggaatgtgaagatgaaaacgaagctgagggtaagggcgacaatgagggagaggacgaaggtgagattcacgcagaggacggcgagatgaaaggcaatgaaggggagacagagagtcaggagctgtctgccgaaaatcacggtgaagccaaaaatgacgagaagggggtcgaggacggaggcgggtctgatgggggagacagcgaggaggaagaagaggaggaagaagagcaggaggaagaggaggaggaagaagagcaagaggaagaggaagaggaggaagaggaggaggaagaaaaggggaatgaggagcccctgtctctagactggcctgaaacccgccagaagcaggctatatatctgtttctactgccgatcgtctttcctctgtggcttacggtcccagacgtgcgtcggcaagaaagcagaaagttcttcgttttcactttcctcgggtccattatgtggatcgcgatgttcagctatctcatggtgtggtgggctcaccaggtgggcgagacaatcggcatctcggaagaaattatgggcctgactattctggcagcaggtacgtcgattcctgatctgattacatccgtgatcgtggctagaaagggcctgggcgacatggcggtatctagcagcgtggggtctaacatctttgacatcacagtgggtttgcctgtcccttggctactgtttagcttaatcaacggactgcaacctgtgcccgttagttctaacgggctgttttgcgcgattgtcttactcttcctgatgcttctctttgttatcagctctattgccagctgcaagtggaggatgaataagattctcggcttcaccatgttcctactctattttgtctttttgattatcagtgtgatgctagaagatcgcattattagttgtcctgtgtccgtgtag

SEQ ID NO: 135017 - DNA, 1935 bp, synthetic construct
  misc_feature 1..1935: note = Description of Artificial Sequence: Synthetic coding sequence
  source 1..1935: mol_type = other DNA
atggacctgcagcagtccacgaccatcactagtctggagaagtggtgtctggatgagtcactgtctgggtgtagacgccactacagcgtcaagaagaaactcaagctcattagggttctgggtcttttcatggggctagtcgccatcagtacggtgtcttttagcatcagcgccttttccgagaccgacacccagagcacgggggaagcctctgtagtgagtggtccgcgcgtggctcaaggttaccaccagagaaccctactagatctgaacgacaaaatcttagactataccccccagccccccctgtccaaggagggcgagtccgaaaattccaccgatcatgcccagggcgattacccgaaggacatcttttctctggaggaacgacggaagggtgcgattattcttcatgtgatcggcatgatttatatgtttatagctcttgctattgtttgcgatgagtttttcgtgcccagcctcactgtgataacagagaagcttggtattagcgacgacgtcgccggagccactttcatggcagccggaggctctgcacctgaactctttacatctcttatcggagtattcatcgcccacagcaatgtaggcattgggaccatcgtagggtcagcagtgttcaacatactcttcgtgattgggatgtgcgcactttttagcagagagattctgaaccttacctggtggccacttttccgagacgtctcattttacattgtcgatcttatcatgttgatcatctttttcctagacaacgtcatcatgtggtgggagagcttactgctgctcactgcatacttttgctatgttgttttcatgaaatttaacgttcaggtggagaagtgggtcaagcagatgattaaccgtaataaagtggtaaaggtcacggcaccggaggcccaggcaaagcccagcgctgcgcgcgataaagatgaaccaactctcccagcaaaaccgaggttgcagcgcggcgggtcctccgcctcgcttcacaacagcctgatgcggaactccatctttcagctgatgattcatacactcgatcccttagcagaaggccgcttcagagagaaggcttctatcttgcacaagatagcaaaaaaaaagtgtcatgtggatgaaaatgagcgtcagaatggggccgccaaccatgtggagaagatcgaactgcctaactcgactagtaccgacgtggaaatgacaccaagcagcgacgctagtgaaccggtgcagaacggtaatttatctcataacatcgaaggggcggaagcccagacagccgacgaggaggaagatcagccactgtctctggcgtggcctagcgaaacacggaaacaggttacttttctcattgtatttccaatcgtatttccgctgtggattacgttacccgatgttaggaaacccagttccaggaaatttttcccaatcaccttttttggctccataacctggatcgctgtcttttcctacctgatggtttggtgggcacaccaggtcggggaaaccattggcatctctgaggagatcatgggtcttaccatcctggcagctggaacctccatccctgacctgatcaccagcgtgatcgtcgctcggaagggcctgggcgacatggctgtgagtagctccgtaggaagcaatatcttcgatatcaccgtcggcctgccgctcccttggctgctgtacactgtaatacaccggttccagcccgtggcggtgagttctaacggactgttttgcgcgatcgtgttactgtttattatgcttctttttgtcatcctgtccattgccttatgtaaatggaggatgaataagatcctgggcttcattatgttcggattgtacttcgttttcttggtggtttctgttctactcgaggatagaattcttacgtgccccgtatccatatag

SEQ ID NO: 135018 - DNA, 1986 bp, synthetic construct
  misc_feature 1..1986: note = Description of Artificial Sequence: Synthetic coding sequence
  source 1..1986: mol_type = other DNA
atggacctccaacagagcacaacaattacttcccttgagaaatggtgcctggatgagagcctgtccgggtgtagaaggcactactcagtgaagaagaaacttaaattgattcgcgtgctcggactgtttatgggcctggtggccatctcaaccgttagctttagtatcagcgcgttctccgaaactgatacccagagcaccggcgaagctagtgttgtaagcggcccccgggttgctcaaggatatcatcagcgtacacttctggaccttaacgacaagatactggactataccccccagcctccactaagcaaggagggtgaaagtgagaattctacagatcatgcccagggggactatccgaaagatattttttccctggaagaacgaaggaaaggcgcaatcatcctgcatgttatcggcatgatttatatgtttatagcactggctattgtttgcgatgagttcttcgtgccatctcttacagtgatcacagaaaaactggggatatcagatgacgttgccggcgccacgttcatggccgccggaggctccgcccccgagctcttcacttctctgatcggcgtgttcatcgctcactctaacgtgggcatcggaacaatagtggggtcagcagtgtttaatatcctcttcgttattggaatgtgcgccctatttagccgcgagattctcaatctgacatggtggcctttatttagggatgtgtcattttacatcgtggatctcattatgctgatcatctttttcttggacaacgtgatcatgtggtgggagtctcttctactcctcacagcatacttttgctatgtggtcttcatgaaatttaacgtgcaggtagaaaagtgggttaagcagatgatcaaccggaataaggttgtaaaggtcacagcgcctgaggcccaggcgaagccttccgctgcacgggacaaggacgagcctactttgccggccaagcctcgcttgcagcggggggggtcctccgcgagcctgcataacagcctaatgcggaattccatcttccaacttatgattcacaccctggatcccctggctgaagaattgggttcttatggcaagctgaagtattatgatactatgaccgaggagggtcgttttcgggagaaggcaagtatattgcataagatagccaaaaaaaaatgccacgtcgacgaaaacgaaagacagaacggtgctgctaaccacgtggagaagattgagctgcccaatagcacatcaaccgacgtcgagatgacaccttcttctgatgcctccgagcccgtgcagaatgggaatctgagtcataacatcgagggggccgaagcacagactgccgacgaggaagaggatcagccattatccctggcatggccatccgagacgcgtaagcaggttacctttctgatagtgtttcccatagtatttcccctctggattaccctcccagatgtccgtaagccctcctcgaggaagttcttcccaattacattcttcggcagcataacatggatagctgtattctcctatctcatggtgtggtgggcccaccaagtgggggagaccatcggaataagtgaggaaatcatggggttaacaatattagccgcggggacatccatcccagacctgattacatccgtgattgtggcccggaaagggcttggggatatggcagtctcaagcagtgtgggcagtaatatcttcgacattactgtcggtcttccgctgccctggctgctctatacagtcattcaccggtttcagcctgtggcagtgtcttctaacggcttgttctgcgccattgtgctgttgtttattatgctgttgtttgttatcctatccattgcactctgtaagtggaggatgaacaagatactgggctttattatgtttggcctttactttgtgtttttggtcgtgtccgttttattggaagacaggatcctcacatgccctgtgagtatctag

SEQ ID NO: 135019 - DNA, 1935 bp, synthetic construct
  misc_feature 1..1935: note = Description of Artificial Sequence: Synthetic coding sequence
  source 1..1935: mol_type = other DNA
atgcggcctagtggtgatgaagatagggctagaagaagacggcgccgaagacgtagacgtgatctgttgttgagtcagttgtgcttcctagcgagtgtcgccctgctcttatggtcactgagctccttgcgcgaacagaaagagctggatctgatggatctcgttggcgaggaccggaagtggatgatggcaaggaaactgatgcaagtcaatgatactctgacctctgaggatgcaggactacgaaactctaagaactgcactgagcccgcacttcacgaatttcccaatgacatttttaccaacgaagatcgccgtcagggagccgtcgtgttacacgtactgtgtgccatctacatgttttacgcccttgccatagtatgtgacgatttctttgtcccttccctggagaagatatgcgagcgcctgcacctcagcgaagatgttgccggagccacgtttatggcagcgggtagcagtgcaccggagctgttcacttctgtcataggggtattcatcactaagggagatgtgggggtgggaacaatcgttggaagcgctgtcttcaacatcctctgtattatcggggtatgcggcctcttcgcaggacaggtggtggcactctcgtcctggtgtcttcttcgggattcaatctattacactttaagcgttatagctttgatagtcttcatttacgacgaaaaggtgtcctggtgggagtctcttgtgttagtgctcatgtatcttatttacattgttataatgaagtacaatgcctgtattcatcagtgcttcgaacgacgcactaaaggggcaggtaacatggttaacggtctcgctaataatgctgagatcgatgacagcagtaactgtgacgctaccgttgttctgcttaaaaaggccaacttccatcgcaaagcctcagttatcatggtcgatgaattattgtcagcctacccccaccagctgagtttctctgaggccggtctgaggatcatgataacttctcatttcccacctaaaacccgactctcaatggcttcccgcatgctcatcaacgaaaggcaacggctgatcaatagcagggcctacacaaatggggagagcgaggtggccatcaaaatcccgatcaaacacaccgtcgaaaacggtaccggacctagctcagcccctgaccggggcgtgaacggcaccaggcgggacgatgtagttgcagaggccgggaatgagacagaaaacgaaaatgaagataacgaaaatgacgaagaggaagaagaagatgaagacgacgacgaggggccttatacgcctttcgacacacccagcggaaagcttgagacagtaaagtgggccttcacttggcctctgagttttgttctctattttacggtccctaactgcaataagcctagatgggagaaatggtttatggtcaccttcgctagcagtactctttggatagcagcattctcttatatgatggtgtggatggttacgattatcggctacaccctgggcattcccgacgtcattatgggcattacctttctcgcggccggaacctcggtgccggattgcatggcttctctgatcgtagcacgtcagggtatgggggatatggctgtatccaactccatcggatctaacgtgtttgatattctgatcggcctggggctaccatgggctctgcagactctagcagtcgattatggttcgtatattcgcctgaacagcagaggactgatttacagcgtgggcttgctcttggcatcggttttcgttacagtttttggcgtacatctgaataagtggcagctggataagaagctgggctgtggttgtctgctgttatacggagtgtttctgtgcttctcgattatgacggagttcaatgttttcacctttgttaatctgcctatgtgcggggaccactag

SEQ ID NO: 135020 - DNA, 1755 bp, synthetic construct
  misc_feature 1..1755: note = Description of Artificial Sequence: Synthetic coding sequence
  source 1..1755: mol_type = other DNA
atggctggaagacgactgaacttgagatgggccctttctgtcctgtgcgtgctgctaatggccgagaccgtatccgggactcggggatccagcaccggggcacacatctccccccagtttccggcgtctggcgtaaatcagacaccagtcgtggactgcagaaaggtctgcggtctgaatgtatctgataggtgtgactttatccggacaaatccggattgtcacagcgatggcgggtaccttgattaccttgagggcatcttctgccatttcccccccagcctcctgcccctggctgtgaccctttacgtgtcctggctcctgtatttgttcctgatccttggggtgacagccgccaaattcttttgcccgaacttgtctgcaatcagcaccaccctgaagttgagccacaatgttgccggggttacttttctggctttcggaaacggggcccctgatattttttccgcattggtggcatttagcgatccccacacagccggccttgcgctgggcgcactattcggggccggcgtactggtgactactgtggtggcagggggcattacaatccttcatccgttcatggcagccagcagacccttctttcgagacatcgtgttttacatggtcgccgtgtttctgactttcctcatgttattccgtgggcgggttacgctggcgtgggctttaggttatttgggcttgtacgtcttctatgtagttacagtgattttgtgtacctggatttaccaacgacaaagaaggggatctttgttctgccccatgcccgtgacgcctgagatactatccgattccgaagaggatcgtgttagctccaacaccaattcttatgattatggcgatgaatacaggccattgttcttttatcaggaaactactgcccaaatactagtccgtgccctcaaccctctggactacatgaagtggcggcggaaatccgcttactggaaggcgttaaaggtgttcaaactgcctgttgaattcctgctcctgctcacagtgcctgtggtagaccctgataaagatgaccagaactggaaacggccgctgaactgcctccatctggtaattagccccctggtggtagtgctgacactacagtccggaacctacggcgtctacgaaatcgggggcttagtacctgtatgggttgtggttgtaatcgctggtactgccctggcttctgtgaccttcttcgctacgtctgacagccaaccccctaggctccactggctctttgctttcctggggttcctgacttccgctctctggatcaacgccgcagccactgaggtggtcaatatcctgcgatctctgggcgtagtattcaggctttcaaacaccgtacttggattgactcttctggcttgggggaacagtatcggggacgctttttccgattttactctggccagacaggggtatccacggatggccttttctgcatgtttcggcggtataattttcaacatccttgtgggggttggcctggggtgtttattacaaatctcaagaagtcacacagaagtcaaactggaaccagatggtctactggtgtgggtgttagcaggggcgctgggactaagcctggtcttctctctcgtcagcgtgccactgcagtgttttcagctcagtcgggtgtatgggttttgcctcctgctcttttatctcaactttcttgtggttgcactgttaacggaattcggcgtcatacacctgaaatcaatgtag

SEQ ID NO: 135021 - DNA, 1587 bp, synthetic construct
  misc_feature 1..1587: note = Description of Artificial Sequence: Synthetic coding sequence
  source 1..1587: mol_type = other DNA
atggcgggaaggcggttaaacctgcgctgggccttgagcgtactgtgtgtgctgcttatggcagaaactgtgtccggtacgagagggtccagtacaggcgcccatatttccccccagtttcccgcctcaggagttaaccagactcccgttgtggattgcagaaaggtttgcggcttaaatgttagtgatagatgtgacttcatccggactaatccggactgccactctgatggtgggtacctggactatctggagggaatattctgccacttcccgccatctttactcccccttgccgtgactctctacgtctcatggctgctgtatcttttccttatcctgggcgtcacagcggccaaatttttctgtccaaatttaagcgctatcagtaccacactgaagcttagccacaacgtcgcaggcgtgactttccttgcatttggcaacggtgcccctgacatcttctcagcgctcgttgcttttagtgatccacacacagctggtcttgcgctcggggccctgttcggctacctggggttatatgtattctatgtggtcactgtaatcttatgtacgtggatctatcagcgacaacgtagaggctcactcttctgcccaatgcctgtcaccccagagatactatctgactccgaggaggatcgtgtcagcagcaacacgaatagttatgattatggggacgagtacagacccctgttcttttatcaggagaccaccgcccagattctggtcagggccctcaatccgcttgattacatgaaatggcggcggaaaagtgcctactggaaagctttgaaggtattcaaactgccggtagagttcctgctgctgctgaccgtgcccgtcgtcgatcctgacaaagatgatcaaaactggaagagacctttgaattgtctgcacctggtgatatcccctctggtggtcgtgctgactctgcaatctggtacatatggcgtatatgagattggcgggctggtcccagtatgggtggttgtggttatcgcagggactgccctggcctctgtcaccttttttgccacaagcgatagtcagcctccaagactgcactggctcttcgcctttctgggatttctgacatccgctctctggattaacgcagcagccaccgaagttgtgaacattttgagatccctcggcgtggtctttcggctcagtaacaccgtactgggcctcacactgctcgcgtggggcaactcaattggagacgctttcagcgactttacccttgctaggcagggctatcctcggatggcattcagcgcgtgcttcggcggaatcatattcaatattctggtaggggtcggtctgggctgtctgttgcagatctctcgctcccacactgaggtaaagcttgaaccagacggtcttctggtgtgggttctcgcaggtgccctcgggctcagtttggtgttcagccttgtgagtgtgcctctccagtgcttccagctgagcagggtgtatggattttgcttgctgctgttttacctgaactttttggttgtggccctacttacagagttcggggtgatccatctcaagtccatgtag

SEQ ID NO: 135022 - DNA, 1587 bp, synthetic construct
  misc_feature 1..1587: note = Description of Artificial Sequence: Synthetic coding sequence
  source 1..1587: mol_type = other DNA
atggctggccgtagattaaaccttaggtgggccctctctgtgctgtgcgttcttctgatggcagagaccgtgtccggcaccagaggatcctcaaccggggcgcacatatctccacagtttcctgcatctggtgtcaatcaaacgcccgtggtggattgtcggaaagtctgcggcttaaatgttagcgatagatgcgacttcatccgtaccaaccccgactgccactccgatggaggttacctggactatttggaaggcatattctgtcacttccccccctccttactacctctggcggtcacattatatgtttcatggctcctttacctcttcttgatattgggcgtgaccgcagccaagttcttttgtcctaatctgagtgcaataagtacaactctaaaactttcccacaacgtggccggtgttacctttctcgccttcggtaatggagcgccagacatcttctcagctttggtcgcattctcggacccccatacggctggacttgcgctgggcgcccttttcggatatctgggcctttacgttttctacgtcgtcactgttattctctgcacgtggatttaccagcgtcaacgcagggggtctctattttgcccaatgccagtaacccccgaaatcctgagcgatagtgaggaagaccgagttagctccaacaccaatagctatgattacggagacgaatatcggcccctatttttttatcaagaaacaaccgcgcaaatcttagtgcgtgccctcaatcccctggactacatgaaatggaggcgcaaaagcgcatattggaaggccctgaaggtatttaagctgccggtggaattcctgctgctgctgactgtccccgtggtggatccggataaagacgatcaaaactggaaacggcccctgaattgcctacatctggtcatcagtccattggtggtcgtccttacgctgcaatcaggaacttacggggtctacgagatcgggggccttgtacctgtgtgggtggtggtcgtgatagccgggaccgctctggcctccgtgaccttttttgccacttctgactcacagccgccccggctccactggctctttgcattcctgggatttctaactagtgcactgtggattaacgccgccgcaactgaggtggtgaacatcctgcggagcctgggtgtagtgttccggctgtccaataccgtgcttggactaaccttgctggcctgggggaactccattggggacgcctttagcgactttaccctcgccagacaggggtacccaaggatggcctttagtgcctgttttggcggaataatcttcaacattctggtgggagtggggttgggatgcctcctgcaaatttctcggtcgcataccgaagtcaaactggagccggacgggctactggtctgggttctggccggagcattgggcctgagtctggtcttctccctggtcagtgttcctctccaatgttttcaactgtcgcgcgtctatggattctgtttgctgctgttttacctgaattttttagtggtcgctcttctgacggaatttggcgtgattcatctgaaatccatgtag

SEQ ID NO: 135023 - DNA, 396 bp, synthetic construct
  misc_feature 1..396: note = Description of Artificial Sequence: Synthetic coding sequence
  source 1..396: mol_type = other DNA
atggctggtcgacgcctgaacttgcggtgggctctctcagtcttatgcgtattactgatggccgagacagtgtccggcacgagaggaagcagtacaggtgcccacatatccccccaattccccgctagcggggttaatcagactccggtggtcgattgccggaaggtgtgcggtctaaatgtctctgaccgctgcgattttatccggactaatccagactgtcattccgacggggggtacttggattacctggaaggaattttctgtcattttccaccctctctcctgccactcgcagtgactttgtatgtgagctggctgctctatctctttctcattcttggcgttacagccgcaaaatttttctgccctaatctgtctgccatcagcacatag

SEQ ID NO: 135024 - DNA, 696 bp, synthetic construct
  misc_feature 1..696: note = Description of Artificial Sequence: Synthetic coding sequence
  source 1..696: mol_type = other DNA
atggctggcaggaggttgaatctccgatgggccctgagtgtcttatgcgttctgttaatggcggagacggtttctggtactcgcggatcaagcacaggggcccatataagcccccagtttcccgcctcaggcgtgaaccagactcccgtcgtcgactgccgtaaagtatgcggcctcaacgtctccgatagatgtgacttcatccgcacaaatccagattgccatagcgatggtgggtatttggattacctggaagggatcttttgtcactttccaccaagtctcctcccgctggctgtaacactttacgtttcttggctcctgtatctatttctgatcctcggggtcaccgccgccaagttcttttgtcctaacttaagtgctatttctacgacattgaaactgagccacaacgtggccggggtgactttcctcgctttcggtaacggcgcccccgacatcttttcagctctggttgcattctcagatcctcacaccgctgggttagccctgggcgctctgttcggcgcaggtgtcctggtcaccaccgtggtagccgggggaatcaccatcttgcatccattcatggcagcctcaaggcctttcttccgcgacatcgtcttttacatggtcgctgtctttctcacatttctaatgctgttccggggacgcgtgacgcttgcttgggcattgtag

SEQ ID NO: 135025 - DNA, 312 bp, synthetic construct
  misc_feature 1..312: note = Description of Artificial Sequence: Synthetic coding sequence
  source 1..312: mol_type = other DNA
atggccgggagacgactcaacctgcggtgggccctgtctgtgctgtgcgtgcttctaatggccgaaacagttagcggaacacgggggtcaagtacgggcgcacatattagccctcagttcccagcctcaggtgttaatcagaccccagtcgtggattgtagaaaagtctgcgggctgaacgtaagtgaccggtgtgacttcatacgaactaatccagactgccactcagacggggggtacctcgattatctcgaaggaatcttttgtcacttccccccatctcttttgccactggcagtgacattgtactag

SEQ ID NO: 135026 - DNA, 1755 bp, synthetic construct
  misc_feature 1..1755: note = Description of Artificial Sequence: Synthetic coding sequence
  source 1..1755: mol_type = other DNA
atggcgggacgcaggctgaacctgcgatgggccctcagcgttctttgcgtgcttctgatggctgaaacagtttctggtacaagaggcagtagtactggcgctcacataagtcctcagtttcctgcctctggagtgaaccagactcccgttgtagactgccggaaagtctgtggcctgaatgtgtccgataggtgtgatttcattcggacaaatccagattgtcacagtgatggcggctatctggactacttggagggtatattctgtcacttcccaccctccttgctccccctagcagtgaccttatacgtatcctggttgttataccttttcctcatcctaggagtgacagcggcaaaattcttctgcccaaacttgagtgcgatttcgacaacactaaagctgtctcataacgtggccggcgtcaccttccttgcttttggcaacggggctcccgacattttcagcgccctggtggcattttctgatccccacaccgctggtttggccttgggagccttatttggggccggagtgctggtcactacagttgtcgccggcggcataacaattcttcaccccttcatggcagcttctaggcccttcttccgcgacatcgttttctatatggtcgccgtcttcttgacgttcctaatgctgttccggggacgggtgacacttgcctgggctttgggctatttagggttgtacgtcttttacgtcgttaccgtgatactttgtacctggatctatcagcgccagcgccgaggcagcctattttgcccaatgccagtcacccctgagattctctcagattcagaagaggacagagtgtcctccaataccaacagctatgactacggcgacgagtatagacccctctttttctatcaggagacaacagcgcagatactggtacgagccctaaatccgttagattacatgaagtggcgcagaaaaagcgcttactggaaagccttgaaagtgttcaagctccctgtggagtttcttcttctgctgactgtgccggttgtagatcctgacaaagacgaccaaaactggaagagacccctgaactgtctgcatctcgtgatctcccccctagtggtcgtactgactctgcagagcgggacttacggcgtgtatgagatcggcggtttggtccctgtgtgggtggtggtcgttattgcaggcactgctctggcctccgtcactttcttcgcaactagcgatagccaaccccccagactgcattggctctttgcttttctgggttttctaactagcgccttatggattaatgctgccgcaacagaggtcgttaacatcctacgtagtctaggggtcgtcttccgcctcagcaatacggtactagggctgaccttgctggcttgggggaactctatcggggatgccttctccgattttaccctcgctagacaggggtatcccagaatggctttcagcgcatgcttcggcggtattatttttaacatactggtcggcgtggggctgggctgcctactgcagatctcccgttcacacaccgaggtgaaactcgaacccgacggtctactggtgtgggtgctagctggcgcactgggactctctcttgtgttttctttggttagcgtgcctttgcaatgtttccagctgtctcgagtatatgggttttgcctcctgcttttctaccttaattttctcgtggtagcacttcttactgaattcggagttattcacctgaaatccatgtag

SEQ ID NO: 135027 - DNA, 906 bp, synthetic construct
  misc_feature 1..906: note = Description of Artificial Sequence: Synthetic coding sequence
  source 1..906: mol_type = other DNA
atggcggatcaacccaaacctatttcgcccctaaaaaacctgctcgccggagggtttggtggtgtgtgtctagtgttcgtgggtcacccattggacacagtgaaagtgcgcctgcagactcaacctccatctctgcccgggcagccgcccatgtactccggtacctttgattgcttccgaaagaccctttttcgggaggggatcacaggattatacaggggcatggccgcccctatcatcggggtgaccccaatgttcgcggtgtgcttttttgggttcgggcttggcaagaaattacagcagaagcacccagaagatgtgctctcatatccccagctgttcgccgccggcatgctttctggcgtattcactacagggattatgacgcctggggagaggataaagtgcttacttcagatccaggcaagcagcggcgaaagcaaatacacggggactctagactgtgctaagaagttgtaccaggagttcggaatcagaggaatctacaaaggtaccgtccttacactgatgcgcgatgttcctgcaagcggcatgtacttcatgacctatgagtggctgaaaaacatatttaccccagaaggcaaaagagtctcggagctgtctgctcctcggatcctggtcgccggggggatcgctggcatttttaattgggccgtagctatcccaccagatgtgctgaagagtcggttccagacagcccccccaggaaaataccccaacggcttcagagatgtgcttcgggaactgatcagagacgagggcgtgacttcactgtataaggggtttaacgcagtaatgatacgggctttccccgcaaacgccgcctgcttcttgggatttgaggtggccatgaagttcttaaattgggcaacaccaaacctgtag

SEQ ID NO: 135028 - DNA, 756 bp, synthetic construct
  misc_feature 1..756: note = Description of Artificial Sequence: Synthetic coding sequence
  source 1..756: mol_type = other DNA
atgtacagtggtacgtttgattgcttccgtaagacactctttcgcgagggtattaccgggctgtaccggggaatggccgctcctataataggggtaactcccatgttcgctgtgtgttttttcggctttggcttgggaaagaagctccagcaaaagcatcccgaagatgtgctgtcctatccccagctgttcgcagccggcatgctgagcggagtgttcacaactggcattatgacgcctggcgaaagaattaagtgtttgctgcagattcaggcttctagcggtgagtccaaatacacgggaaccttagactgtgcaaaaaagctgtatcaggagtttggcataagggggatttacaagggtaccgtcctaacactcatgcgcgatgtgccggctagtggaatgtacttcatgacctatgaatggttgaagaacatcttcacacccgaaggaaagagggtgtccgagttatctgccccccgtatcctggtcgcgggaggtattgctgggatattcaactgggcagtcgccatcccccctgacgttctgaaaagccggttccagactgctcctcccggtaaataccctaatgggtttagggacgtgttaagggagctgattcgggacgaaggcgtgacgtcattgtacaagggatttaatgccgtgatgattcgtgctttccccgccaatgccgcctgttttctgggctttgaagttgcaatgaaatttctcaactgggctacaccgaacctatag

SEQ ID NO: 135029 - DNA, 948 bp, synthetic construct
  misc_feature 1..948: note = Description of Artificial Sequence: Synthetic coding sequence
  source 1..948: mol_type = other DNA
atgacacaccaagatttgtccattacagcaaagctgattaatgggggcgtggcaggcttggttggagtcacctgtgtgttccccattgacctggccaagacaagattgcagaaccagcacgggaaagccatgtataaaggaatgattgattgtcttatgaaaacggctagagcagaaggtttctttggaatgtacaggggcgccgccgtgaacctcactctggttacaccagagaaagccattaaactggctgcaaacgatttttttaggagattgttaatggaagatggcatgcagagaaacctgaagatggagatgctggcgggctgtggggcaggaatgtgccaggttgttgtaacctgcccgatggagatgctgaagatccagctgcaggatgccggtcgcctggcagtgcatcatcaaggttctgctagtgcacccagcacttcccgatcttacacaaccggcagcgcttccacgcatcgccgcccgtctgctacactgatagcctgggagctcctgcggacccaggggctggctggattatatcgtgggctcggcgccactctcctgcgcgacataccttttagcatcatctatttccctctatttgccaacctcaacaacctgggtttcaacgagctcgctgggaaagcctcttttgcgcacagctttgtgagcggctgtgttgccgggtcgatcgcagctgtggccgtgacccctctggatgtactaaagacccggatccagaccttgaaaaaaggcctgggcgaggatatgtacagtggaattaccgattgcgctaggaaactgtggattcaagaagggccctccgccttcatgaaaggagctggatgtcgagccctggtcattgcaccactgtttggaatcgcgcagggcgtgtactttatcggcattggagagagaattctaaaatgtttcgattag

SEQ ID NO: 135030 - DNA, 948 bp, synthetic construct
  misc_feature 1..948: note = Description of Artificial Sequence: Synthetic coding sequence
  source 1..948: mol_type = other DNA
atgacccaccaggacctgagcatcactgcaaagctgattaatgggggagtggctggcctggtgggagttacgtgtgtctttcctatagatttagccaagacaagacttcaaaatcagcatggaaaggctatgtacaagggcatgatagactgcttgatgaagacggcccgcgctgagggtttcttcggcatgtatcggggtgccgccgtcaatttgacattggtgacccctgagaaagctatcaagcttgccgcaaacgattttttcagacgtttgctgatggaggatggcatgcagcggaatttgaagatggaaatgcttgctgggtgcggagcgggaatgtgccaggtggtggtcacatgtccgatggaaatgctgaagattcagttacaggacgcaggccgcctggccgtccatcaccagggctccgcttcggccccttctaccagccgcagctataccactgggagcgcaagcacccatagacgcccctcagccactctgatcgcctgggagttgctgagaacacagggtttggccgggctttataggggcttgggagccacactgctgcgggacatcccctttagtataatatactttccactctttgccaacctgaacaacctcgggttcaacgagctggctggcaaggcgtcttttgctcacagtttcgtctctggttgcgtcgccggcagtatagctgctgtggctgtgactccattagacgtgttaaagactcggatccagaccctcaagaaggggctgggcgaagacatgtacagtggcatcactgattgcgcacgcaaattgtggatccaggaaggcccctcagctttcatgaagggcgccggctgtcgcgccctggttatcgcgcctctgtttggcatagctcagggggtatatttcattgggatcggcgagaggattttaaaatgcttcgattag

SEQ ID NO: 135031 - DNA, 1716 bp, synthetic construct
  misc_feature 1..1716: note = Description of Artificial Sequence: Synthetic coding sequence
  source 1..1716: mol_type = other DNA
atggagaacgtaaaggagatttttgggcagacaattattcaccaccatataccatttaattgggattgcgagttcatccgactacatttcggtcacaacagaaaaaagcacctcaattacacagaatttacccaatttctgcaggaactacagttggagcatgcaagacaggcctttgccctgaaggacaagtctaagagcggaatgatcagcgggcttgatttttcagatattatggtcacaatcagatcccatatgttgacccccttcgtcgaagagaaccttgttagcgcagccgggggatcaatttcccatcaggtttctttctcttactttaatgctttcaattcgctcctcaataatatggaattggtgcggaagatctatagcactcttgccggcacccgcaaagacgttgaggtcacaaaagaggagtttgcacagtccgctatccgttacggccaggtgacacctctagaaattgacattctataccagctcgcggacctgtataatgcttccggcagactgacactggctgacattgagcgaattgcccctctggcagagggtgcgttaccttataatctagccgagcttcaacgacagcaatcccccgggcttggacggcccatctggttgcagattgccgagagcgcatatagattcaccctcggctctgtggccggcgctgtgggcgccactgccgtctatccaattgaccttgtcaagacccgtatgcagaatcaaaggggatcaggttcagtggtgggagagctgatgtacaagaacagctttgattgcttcaaaaaggttttgcgctacgaggggttcttcggtctgtaccgtggccttataccccagctgatcggggtggccccagaaaaagccatcaagctgactgtcaatgattttgtgcgtgacaagttcacaaggcgggacggttcagttccgctccctgccgaggtcctggcagggggttgcgcggggggtagccaggtgattttcactaatcccctcgagatcgtgaaaatccggctgcaagtggccggtgagattaccacaggacctcgggtgagcgcccttaatgtgctgagggatctgggtatctttggactgtacaagggtgctaaggcatgttttctgagagacatccccttttcagccatttactttcccgtgtatgcacactgcaaacttcttctggcagatgaaaacggccacgtggggggcttgaacctgctcgccgccggcgccatggccggagttccagctgcctccctggtgaccccggctgacgtcatcaagaccaggctgcaggttgctgccagagcgggacagacaacatactctggagtcatcgactgctttaggaaaattcttagggaggaaggaccctctgcattttggaagggcaccgctgcccgagtttttcgctcaagcccccagttcggcgtgactctggtcacgtatgagttactacagaggtggttctacatcgacttcggtggcttgaagcctgcgggttcagagcctacccctaagtctcgaatcgcagatttgcctccagcgaatccagaccatattggtggctatcggcttgctacagctacattcgctggaatcgaaaataagtttgggctgtatctacccaagtttaaaagtccatcggtggccgtggtgcaaccaaaggcagcagttgcagccactcagtag

SEQ ID NO: 135032 - DNA, 2037 bp, synthetic construct
  misc_feature 1..2037: note = Description of Artificial Sequence: Synthetic coding sequence
  source 1..2037: mol_type = other DNA
atggcagtcaaagtacaaacgactaaaaggggcgacccacatgaactcagaaacatctttctgcaatacgcctctacagaggttgacggagagcggtatatgacccccgaagactttgtgcagagatatctcgggctgtacaacgaccctaactctaatcccaaaatcgtgcagctactcgcaggcgtggccgatcagacgaaagacggcctgattagctaccaggagtttctggccttcgagtccgttctctgcgcacccgatagcatgtttattgtagctttccagctgtttgacaagtcagggaatggagaggtaacttttgagaatgtgaaggaaattttcggccagactatcatccaccaccacatcccctttaactgggattgtgagttcatcaggctgcattttggccacaatcgtaagaaacaccttaattacactgagtttacacagttccttcaggagcttcaactagaacacgcccgacaagccttcgcactgaaagacaagtctaaatctgggatgatttccggcttggacttttccgatattatggtaaccatccgcagccatatgctcactccttttgtggaagagaacttggtatccgccgccggtggttccatatcccaccaagtgtccttcagctacttcaatgctttcaatagcctgctgaacaatatggaattggtgaggaaaatctactcaactctggctggtacccgcaaggatgtcgaagtcacaaaagaagagtttgcccaatctgcaattcgctatggccaggtgacacctttggagatcgacatcttgtaccaactcgctgatttgtataacgcttctggtcggctcacgctcgcagacatcgagcgcatcgcccccttggcagagggggcactgccatacaacctcgcagagctccaacgacaacaatcccctggactaggcaggcccatatggctgcagattgccgagtctgcttataggttcacactgggttctgtcgctggagcggtaggcgctacagcagtgtacccaattgatctggtcaaaacaaggatgcagaatcaaaggggctcggggtctgtggtaggggagctgatgtataaaaattctttcgattgctttaagaaggtccttagatacgaaggcttctttggtctctataggggcttaataccacagctaatcggcgtcgctcctgagaaagccatcaagctgactgtgaacgattttgtccgggataaattcactcgtagagacgggagcgtgcccctcccagccgaagtactagccggcggctgtgcgggaggctctcaagtcatttttaccaaccccctggagatcgtaaagatcagactgcaggtggccggcgaaattacaactggaccgcgtgtctcagctctgaatgtgctgagagatttaggtatatttggactgtacaagggggctaaagcgtgttttctcagggatatcccctttagcgccatatactttcccgtatatgcccattgtaaattgcttctcgctgatgagaatggccatgtgggtgggctgaatctcttggccgctggcgccatggccggagtaccagctgcgtcactcgttacccccgctgacgtgattaagacacgtctacaggttgcagcaagagccggtcaaaccacttattctggagtcatagactgctttaggaagatactccgcgaagaagggccttctgccttttggaagggcactgccgcccgggtgttccggagtagtccacagtttggagtgaccctggtcacatacgagcttttgcagaggtggttctacatcgactttggcggtctgaagccagccgggagcgaacctactccgaaaagccgtattgcagaccttccacccgcaaatcccgatcacataggtggttatagacttgccacagccacatttgcgggaattgaaaataagttcggcctctatttgcccaaatttaagtcccccagtgttgccgttgtgcagcccaaggccgctgtcgccgcaactcagtag

SEQ ID NO: 135033 - DNA, 1944 bp, synthetic construct
  misc_feature 1..1944: note = Description of Artificial Sequence: Synthetic coding sequence
  source 1..1944: mol_type = other DNA
atggccgcaggccttgcgacctggttgccattcgctcgtgccgcagcagttggctggctgcctcttgcgcaacagccactgccgcccgcgcctggagttaaggcaagtaggggggatgaggtactggtggtgaacgtttccggaaggcgttttgaaacttggaaaaacaccttggatcggtaccccgacaccctgctgggatccagcgagaaagaatttttctacgacgccgactcaggggagtactttttcgatcgagatccggacatgtttcgccacgtgctgaacttttatagaacaggccgtctgcattgtccccggcaagagtgcattcaggcattcgacgaagagctggcgttctatgggctcgtgcccgaacttgtgggtgattgttgcttagaggagtacagggatcggaaaaaggagaatgctgagagactggccgaggacgaagaggccgagcaggccggggatggcccggccctgcctgccggatcctccctccggcagaggctctggcgggcctttgagaatccgcacacaagcacagccgcactggtcttctattacgtgaccggcttcttcatcgcagtgagcgttatagctaacgtcgtcgaaaccatcccctgtagaggctcggcccgaaggtccagtcgtgagcaaccttgcggtgaacggttcccacaggctttcttttgcatggatactgcctgtgtgctgatcttcacaggggagtacttactgcgcctgttcgccgcacctagccggtgccgattcctcagaagtgttatgtctctcattgacgttgtggccatcttgccctactacatcgggttgctggtccccaaaaatgacgacgttagcggcgcatttgtgactctacgcgtgtttagggtctttagaatattcaagtttagtcggcacagccagggccttcgtatactcggctatacactgaagtcctgcgcgagtgagctcggctttctgttgttttctctgaccatggcgattattatcttcgccaccgtgatgttctatgccgaaaagggaaccaacaagactaattttaccagcatccccgccgccttttggtatacgatcgtgacaatgaccacgctcggctacggagatatggttcccagtaccatcgccggtaaaatttttgggtctatctgctccctttcaggcgtgttagtgatagctcttccggtgccagtaatagtctctaatttcagcaggatttaccaccagaaccagcgggctgataagcggcgggctcagcagaaagttcgccttgcaaggatcagattggccaagagcggtaccaccaacgctttccttcagtataagcaaaatgggggactcgaagattctggatccggcgaagaacaggccttatgtgtccgcaacagatcggcctttgaacagcagcaccaccatttgctgcattgcctggagaagacaacttgccacgagttcactgatgagctgacctttagcgaagcgctgggtgctgtcagcccaggaggcagaacctctcggtctactagcgtgtcctcacagccggttggccctggaagtctcctgtcatcttgttgcccacgtagagccaaacgcagagctatcaggctcgccaactccacggcatcagtgagcagagggtcgatgcaggagcttgacatgttggccgggctgaggcggtctcatgcccctcagagtcgtagttccctgaatgcgaagcctcacgatagtctggacctcaactgcgactccagagacttcgttgctgctatcatcagtatccccacaccgccagctaacactcccgatgaaagccagcctagttcccctggaggaggtggccgcgccgggtctacactcaggaattcctcactaggcactccatgcctgtttccagaaacagtgaagatctccagcctgtag

SEQ ID NO: 135034 - DNA, 1062 bp, synthetic construct
  misc_feature 1..1062: note = Description of Artificial Sequence: Synthetic coding sequence
  source 1..1062: mol_type = other DNA
atgggtatctttccgggaatcattcttatcttcctgcgagtgaaatttgcaacagctgctgtcattcaccaaaagagcaccacggtcagtcacgaaatgagtgggctgaactggaaacctttcgtctacggcggcctagcgtcgatagtagccgaatttgggacattccctgtggatctgaccaaaacgcggttgcaggtacaaggacagagcattgatgcgcgatttaaggagattaaatatagggggatgtttcatgctttgttccgcatttgcaaggaagaaggcgtcctggcactgtactcaggcatcgcaccggccctgcttcgacaggcctcttacggaacaataaagatcggaatttatcagagcctcaaaaggctatttgtggagcgactggaagatgagacgctgctgattaacatgatttgtggcgtcgtgagtggtgtcatcagcagcacgatcgctaatcctaccgacgttctgaagatcagaatgcaagcccagggaagcctgttccagggcagtatgattgggtcgttcatcgatatctaccaacaagaaggcacacggggattgtggaggtgtctctgttcaaaggctgtgacggggtgcgtgctgtggctaatgcccgtcatccctgcactgtgggaggctaatgcaggcgggagtctggagggggtggtgcctacagcacagcgggctgcgattgtcgtgggggtggagctaccagtgtacgatatcaccaagaaacacctgatcctttccggaatgatgggcgacaccatcctaacccactttgtttccagctttacttgtggcctggccggggccctagccagcaatcctgttgatgttgttcggacgcgcatgatgaaccagcgagccattgtgggacatgtggatctgtataaggggactgtcgatggcatcctgaagatgtggaagcacgaggggttctttgcactgtacaaaggtttctggcccaactggcttcggctcggcccctggaatatcatcttcttcatcacttatgaacagctgaagagactacagatttag

SEQ ID NO: 135035 - DNA, 969 bp, synthetic construct
  misc_feature 1..969: note = Description of Artificial Sequence: Synthetic coding sequence
  source 1..969: mol_type = other DNA
atggggattttccctgggatcatcctcatcttcctaagagtcaaatttgcaaccgcagccgtgatccaccagaagagtaccactgtctctcacgaaatgagcggactcaactggaaaccttttgtgtacggggggcttgcctcaatagtcgctgaatttggaacttttcccgttgacttgacgaaaacccggctccaagtgcaggggcagagtatcgatgcacgatttaaggagattaaatataggggcatgtttcacgccctcttcagaatctgcaaggaggaaggagtgttggccctgtacagcggcattgcgccagccctccttcgacaggccagttacggaaccattaagataggcatctaccagtccctgaagcgactttttgtcgagcgcttggaagacgagactctgctcataaatatgatctgtggagttgtctctggagtgatttccagtaccatcgcaaaccctactgacgtgctgaaaatccgcatgcaggcccaaggttcacttttccagggcagtatgattggctcattcattgacatttatcagcaggaagggaccagaggattgtggcgcggagttgtcccgacggcccaacgcgccgccatagtcgtgggcgtggaactgcccgtgtacgatattacgaagaaacacctcattctcagtggcatgatgggtgatacaatcctaacccactttgtgtcctctttcacatgtggactcgccggagccctggcttccaaccctgttgatgtggtgcgaactcgtatgatgaatcaaagggcaatagttgggcacgtggatctgtacaagggaacggtcgacggcatactaaaaatgtggaaacacgagggctttttcgcattatacaaaggattctggcccaattggctcagactcggcccttggaatatcatattctttattacgtacgagcagctgaagaggctgcaaatatag

SEQ ID NO: 135036 - DNA, 597 bp, synthetic construct
  misc_feature 1..597: note = Description of Artificial Sequence: Synthetic coding sequence
  source 1..597: mol_type = other DNA
atgggcattttcccgggcataattctgatttttctgcgggtaaaattcgcaacggctgctgtcatagtgagtgggcaccagaagtctacaacggtgtcccatgaaatgagcggactgaattggaagcccttcgtgtatgggggactggcatctattgtggctgagtttggtacgttcccagtcgatctgacaaagactcgactccaagtccagggtcagtccatcgatgcaaggtttaaggagattaagtatagaggcatgttccatgccctctttcgaatctgcaaagaagaaggagttctagcactgtattcaggcatcgctccagcccttctgcgccaggcgtcatatggcacaatcaagattgggatttaccagtcgctgaagagactgttcgtggagagactggaggacgagacacttttgataaatatgatttgcggtgtcgtaagtggggtaattagctctacaattgccaaccctaccgacgtgctgaaaattcggatgcaagcccaaggcagcttgttccagggaagcatgatcggttcttttatcgatatctaccagcaggagggaacaagaggcctctggaggtag

SEQ ID NO: 135037 - DNA, 618 bp, synthetic construct
  misc_feature 1..618: note = Description of Artificial Sequence: Synthetic coding sequence
  source 1..618: mol_type = other DNA
atgtcaggtttgaattggaagccctttgtctatggtgggctggcaagcatcgtggcggagttcgggacatttccagtggatctaacaaaaacccgtctgcaagtgcaaggccagtcaatcgacgcccgcttcaaggaaatcaagtaccgggggatgtttcacgcgctgttccgcatttgcaaggaagaaggagtgctggctctttatagcggaatcgcccccgctctcctcagacaggcctcctacggcacaatcaaaatcggaatataccagagcctgaagcggctgttcgtcgagaggcttgaggacgagactctcctcattaacatgatctgcggagtggtctctggagtgattagcagtactatagctaaccctaccgacgtgcttaagatccgcatgcaagcccaggggagcctcttccaaggcagtatgataggctcttttattgacatctaccagcaggaaggtacacgcggcctgtggcggggtgtcgttcccaccgctcagagagccgccattgtagtcggcgtggagttgcctgtgtatgacattacaaaaaagcatctcattttaagcggcatgatgggggacaccatcctcacccacttcgtgtag

SEQ ID NO: 135038 - DNA, 723 bp, synthetic construct
  misc_feature 1..723: note = Description of Artificial Sequence: Synthetic coding sequence
  source 1..723: mol_type = other DNA
atgggcatctttcctggtataatattgatcttcctgcgagtgaagttcgccacagctgccgtaattgtgtctgggcatcagaagagcacaacagtgtcacacgaaatgtcagggctcaactggaagccgttcgtttacggcggccttgcctccatcgtcgcagaattcggtacatttccagtggacctgaccaaaacgaggctgcaggtccagggccagtccattgacgcacggtttaaagagatcaaatacagaggcatgttccacgctctgttccgcatttgtaaggaagaaggagtacttgctttatactctggaatcgccccagcgctgttgcggcaggccagctacggtacaattaagattggcatctaccagagcctgaaacggctctttgttgaacgcctcgaggatgagacactcctgataaacatgatctgcggagttgtctcaggcgtgattagctcaaccatagctaacccgaccgacgttcttaaaatacggatgcaggcccagggcagtcttttccaaggttcaatgatcggctcattcatcgatatctaccagcaagagggaacacgcgggctttggagaggagtagtgccaaccgcacaacgcgccgctatcgtagtaggagtggagctccctgtttacgacatcacaaagaagcatctcattctcagtgggatgatgggagatactatccttacgcactttgtgtag

SEQ ID NO: 135039 - DNA, 972 bp, synthetic construct
  misc_feature 1..972: note = Description of Artificial Sequence: Synthetic coding sequence
  source 1..972: mol_type = other DNA
atggctgataaacaaatttccctgcctgcaaagctcataaatgggggtatcgctgggctcataggcgttacttgtgtcttcccaatcgacctcgccaaaacacgtctacagaaccaacagaatggccagagggtttacacttccatgagcgattgcctcataaaaacggtgcggagcgagggttactttggcatgtatagaggtgccgctgttaaccttacactggtcactcccgaaaaagccatcaaactggcggcgaatgacttcttccgtcatcaactgagcaaggacggccagaaacttaccctgttaaaggagatgctggcaggttgcggtgcaggaacatgtcaggtgatcgtcactaccccgatggagatgttaaagattcagctccaggatgcggggagaatcgctgctcagagaaagattctggcagctcaggggcagctgtcggcccagggcggcgctcagcctagtgtggaggctccagcagctcctagacccaccgcaacccagttaacgagggacttgctcagatccagggggattgcaggcttgtacaaagggttgggcgccacgctgctaagggacgtgccatttagtgtcgtgtacttccctctttttgctaatctcaaccagctagggaggcctgcgagcgaagagaaaagccctttttacgtgtctttcctcgccgggtgcgttgctggcagcgccgctgccgtggcagtgaacccctgtgatgttgttaagacccgcctgcagagcctgcagagaggcgttaacgaggatacatactccggcatcttggactgtgcacgcaagattctcaggcacgagggaccatcagctttcttgaagggtgcttattgtcgagcccttgtaatcgcccctctttttggcattgcccaagtcgtgtattttctgggaatagcagagtcactgctaggtttgcttcaagatcctcaggcatag

SEQ ID NO: 135040 - DNA, 333 bp, synthetic construct
  misc_feature 1..333: note = Description of Artificial Sequence: Synthetic coding sequence
  source 1..333: mol_type = other DNA
atggccgacaagcagatatccctgcctgccaagctgattaatggcgggatcgcaggcctcataggagtgacatgcgtgttccccattgacctcgcgaaaacccgattacagaaccaacagaatggtcagcgcgtgtatacttcgatgagtgactgtttgattaaaacagtgaggtccgaggggtactttggaatgtaccgcggggctgccgtgaacttgactctcgttactcctgaaaaagcaatcaagctcgccgccaatgacttcttccgacatcagctgtctaaggatggacagaagctgacattgctgaaagaaatgctggccggctag

SEQ ID NO: 135041 - DNA, 384 bp, synthetic construct
  misc_feature 1..384: note = Description of Artificial Sequence: Synthetic coding sequence
  source 1..384: mol_type = other DNA
atggcagataaacaaatctctctcccagctaaactcataaacgggggtatcgcaggccttataggcgtgacatgtgtgttccccatagacctggcaaagacacgcttacagaaccagcagaatggccaacgggtgtatacgagcatgtccgactgtcttataaagacggtcagatccgaagggtacttcggcatgtaccggggtgcagccgtgaacctcaccttagtcacacccgagaaagcgatcaagttggctgctaacgatttcttcaggcaccaactgtcgaaggatggacaaaagttaaccctactcaaggagatgctggccggctgcggagctggtacctgtcaggtaatcgtgacgactccaatggaaatgctctag

SEQ ID NO: 135042 - DNA, 360 bp, synthetic construct
  misc_feature 1..360: note = Description of Artificial Sequence: Synthetic coding sequence
  source 1..360: mol_type = other DNA
atggctgataaacagatttctctgcccgctaagctgattaatggaggcatcgcaggcttaattggggtgacttgcgtgttccccatcgatttagcaaaaacccggctacagaaccaacagaatggtcagagggtctatactagtatgagcgattgcttaattaaaacagtacggagcgaaggatacttcgggatgtacagaggggccgccgtgaatctcaccctggtgacaccagaaaaggctatcaaactggccgccaacgacttctttcgccatcagctgagtaaggatgggcagaaacttacccttttaaaggagatgctcgcaggatgtggcgccgggacttgtcaggtgatatag

SEQ ID NO: 135043 - DNA, 372 bp, synthetic construct
  misc_feature 1..372: note = Description of Artificial Sequence: Synthetic coding sequence
  source 1..372: mol_type = other DNA
atggccgacaaacagataagcctgccggccaaattgattaatggcggcattgctggcctgatcggtgtgacttgcgtgttcccaattgatctcgcaaagacacgcctacaaaatcagcagaatggacagcgagtttacaccagtatgtccgattgtctcatcaaaacggtgcgctccgagggatacttcggcatgtatagaggtgccgccgtgaacctcactctcgtgacaccagagaaggctattaaacttgcagccaacgatttctttaggcatcagctgtcgaaggacggccagaaactcaccctgttgaaggagatgcttgcaggttgtggggcaggcacatgccaggttattgtcaccaccccttag

SEQ ID NO: 135044 - DNA, 342 bp, synthetic construct
  misc_feature 1..342: note = Description of Artificial Sequence: Synthetic coding sequence
  source 1..342: mol_type = other DNA
atggccgacaagcagatatcactgccagcaaagctgatcaatggcggaatcgcagggctgatcggagtaacttgcgtttttcctatcgacctggcaaagacacgtctgcagaatcagcagaatggccagagagtctatacgtcaatgtccgactgtctcatcaagacagtaagatcggagggctacttcgggatgtataggggtgcagcagtgaatctgactctcgtaacaccagagaaagccatcaagcttgccgccaacgacttttttagacatcagctgagtaaggacggacagaagctcaccctgctgaaggaaatgcttgcaggttgtggggcctag

SEQ ID NO: 135045 - DNA, 237 bp, synthetic construct
  misc_feature 1..237: note = Description of Artificial Sequence: Synthetic coding sequence
  source 1..237: mol_type = other DNA
atggccgacaaacagattagcctccccgccaaactaattaacggcggtatcgctgggctaataggcgtcacctgtgttttccctatagatctggccaagaccagacttcagaatcagcaaaacggtcaacgtgtgtatacgtcgatgagcgactgtctaataaagacagtaagaagcgaggggtacttcggcatgtatcggggcgcagcagtgaatctgaccctggtcactccatag

SEQ ID NO: 135046 - DNA, 180 bp, synthetic construct
  misc_feature 1..180: note = Description of Artificial Sequence: Synthetic coding sequence
  source 1..180: mol_type = other DNA
atggccgataaacagatctccctgccagcaaaattgattaacggcggcatcgccggcttaattggggtgacgtgtgttttcccaattgacctggcaaaaactcgattgcagaatcagcagaacggacagcgggtgtatacttctatgtccgattgcttgattaaaaccgtgagaagctag

SEQ ID NO: 135047 - DNA, 972 bp, synthetic construct
  misc_feature 1..972: note = Description of Artificial Sequence: Synthetic coding sequence
  source 1..972: mol_type = other DNA
atggccgataaacaaatctcactaccagcgaaactgataaacggagggattgctgggctaatcggtgtcacgtgtgttttccctatcgacttggcgaagaccaggcttcagaaccagcagaatggtcagcgagtttacacctctatgtcagattgcctgataaaaaccgtccgctccgaggggtattttggtatgtatcggggagctgccgtcaacctgacgctcgtgactccggagaaggcgattaagctcgctgcaaatgattttttcagacaccagctcagtaaggatgggcagaaactgactctactaaaggagatgcttgctgggtgtggggctggcacctgccaggtcatcgtgaccactccaatggagatgctgaagatccagctgcaggacgcaggtagaattgccgctcagcgaaagatactcgcagctcagggtcaactgtcggcccagggtggagctcagccgagcgtggaggcacctgcagcaccgcgcccaacggctacacaactgacccgagacctgcttaggtcccggggaattgcgggcctctataagggtctgggcgcaaccctgctgcgggacgtcccattcagcgtggtatactttcctctctttgccaacctgaatcaacttggcagacccgcgagcgaagagaaatctcccttttacgtaagttttcttgcaggctgcgtcgcaggaagtgcagccgccgtggccgtgaatccatgcgatgtggtcaagactagacttcagtcgttacagcggggcgtgaacgaggatacttactccggcattctggactgtgcccggaaaattctgagacacgagggccccagcgctttcctgaaaggcgcatactgccgagctctggtaattgcacccctctttggaatcgcgcaggtggtgtactttctcggaatcgccgaatctctcttaggcctgttgcaagatccacaagcgtag

SEQ ID NO: 135048 - DNA, 345 bp, synthetic construct
  misc_feature 1..345: note = Description of Artificial Sequence: Synthetic coding sequence
  source 1..345: mol_type = other DNA
atggccgataaacaaattagtcttcctgccaagctgataaacggggggatcgcaggcctgattggggtcacgtgcgttttccctattgacttagcaaaaactcgactgcagaatcaacagaacggacagcgtgtctatacgtctatgtcagattgtctaatcaagacagtgaggagcgaaggatacttcggcatgtacaggggggcagctgtgaacttgactctggtgacacctgaaaaggctatcaagctggccgccaatgacttttttaggcatcaactgtcgaaggacggccaaaaattaacgctgctaaaggagatgctcgcgggctgcggggctggatag

SEQ ID NO: 135049 - DNA, 237 bp, synthetic construct
  misc_feature 1..237: note = Description of Artificial Sequence: Synthetic coding sequence
  source 1..237: mol_type = other DNA
atggccgataagcagatttcattgcctgccaaactgattaacggggggattgctggactgataggagtcacatgtgtgtttcctattgatctcgccaaaacacgcctccagaaccagcagaacggacagcgggtgtacactagcatgtcggactgtttgataaaaacggtcaggagcgaaggatactttggtatgtataggggggccgctgtgaatctgaccctcgtgacaccttag

SEQ ID NO: 135050 - DNA, 321 bp, synthetic construct
  misc_feature 1..321: note = Description of Artificial Sequence: Synthetic coding sequence
  source 1..321: mol_type = other DNA
atggccgacaaacagatttccttaccagctaaactgattaacggtgggatcgccggactgatcggcgtgacttgtgtgtttccgattgacctcgcgaagacgagattacagaatcagcagaatgggcaacgcgtctacacctcaatgagcgactgcctcattaagaccgtcagaagtgaggggtacttcggaatgtatcgaggagccgctgtcaacctgaccctcgtcacccctgaaaaggccatcaaattggcggctaacgactttttccgacaccagctatctaaggatggccagaaactcactctgcttaaggaatag

SEQ ID NO: 135051 - DNA, 408 bp, synthetic construct
  misc_feature 1..408: note = Description of Artificial Sequence: Synthetic coding sequence
  source 1..408: mol_type = other DNA
atggcagataaacagatctcccttcctgccaagctgataaacggaggcattgcagggctgatcggggtcacatgcgtattccccatcgacctggcaaaaacaaggctgcaaaaccagcagaacgggcagcgggtatacacctctatgtcagattgcctgattaagacagtgcgcagtgagggctacttcgggatgtatagaggtgcggctgtgaatttgactcttgtcacccccgaaaaagctatcaagttagccgccaacgactttttcagacatcagctgagcaaagatggtcagaaacttacgttactcaaagagatgctggctggatgcggggccggaacatgccaagtcattgtgacgactccaatggagatgctgaaaattcagttgcaggacgcggggtag

SEQ ID NO: 135052 - DNA, 948 bp, synthetic construct
  misc_feature 1..948: note = Description of Artificial Sequence: Synthetic coding sequence
  source 1..948: mol_type = other DNA
atgcaccgggagcccgctaagaagaaggccgagaagaggctgtttgatgcttcttctttcggtaaagatctgcttgccggaggagtggctgccgccgtgtccaagaccgccgtggcgcccattgagcgtgttaagctgctacttcaagtgcaggctagttcgaagcaaatatccccggaggctagatacaaaggcatggtcgattgtttggtccgcattccgcgagaacagggctttttcagcttctggcggggaaacttagccaacgtgattagatactttccgacccaagctctaaattttgcgtttaaagacaagtataaacagctatttatgagtggagtcaataaagaaaagcaattctggagatggtttcttgcaaacctcgctagcggcggagccgcaggcgctactagtctatgcgtggtctatcctttggatttcgctcgaaccagattaggcgtcgacatcggtaagggaccagaggagaggcagtttaaggggcttggagactgcattatgaagattgccaaatcagacggaattgccgggctttatcaaggattcggcgtctccgttcagggtattatcgtgtaccgcgcctcttatttcggggcttatgacaccgtaaagggattgcttccaaagccaaagaaaacaccttttcttgtctcgtttttcatcgcccaagtggtaacaacctgttctggcattctctcctatcctttcgacactgttcggaggcgtatgatgatgcagagcggcgaggcaaaacggcagtacaaaggcacactggactgttttgtaaaaatatatcagcacgaaggcatctctagctttttccggggcgccttttccaacgttctccgcggaaccggcggagcactggtgttggtgctgtatgacaaaattaaagagttttttcatattgatataggcggacggtag

SEQ ID NO: 135053 - DNA, 897 bp, synthetic construct
  misc_feature 1..897: note = Description of Artificial Sequence: Synthetic coding sequence
  source 1..897: mol_type = other DNA
atgggagaccatgcttggtcttttctgaaagatttcttggccggaggcgtggccgctgctgtgagcaagaccgcagtagctcccatcgagcgcgtcaagctgctactgcaagtccagcatgccagcaaacagatttcagccgagaaacaatacaagggcattattgattgcgtggtcagaatccccaaggagcagggattcctctctttttggcgcgggaacctggctaatgtcatccggtactttccaactcaggccctgaatttcgccttcaaggacaaatacaagcagctgttcctcgggggcgttgacagacataagcagttctggcgatacttcgctggcaacctggcctccggaggagccgcgggcgccacgtccctgtgttttgtctatccgctggattttgcacgaaccagactcgctgcagacgttggcaagggtgctgcccaaagggagtttcatgggcttggggactgcatcataaagatcttcaagtccgatgggcttcggggcctctatcaaggtttcaacgtgagcgtgcagggaataatcatatatagagccgcctacttcggggtgtacgataccgccaagggcatgttgccagaccccaagaacgttcatatttttgtgtcatggatgatcgcccaaagtgtgactgcggttgccggtctcgtctcatatccattcgacacagtccgccgccgtatgatgatgcaatcaggccggaaaggtgcggacataatgtacacaggtacagtcgattgctggcggaaaatagctaaggatgagggggcaaaagcttttttcaagggagcatggtctaacgtgcttagaggtatgggtggtgccttcgtcctagtgctgtacgacgaaatcaagaagtacgtctag

SEQ ID NO: 135054 - DNA, 897 bp, synthetic construct
  misc_feature 1..897: note = Description of Artificial Sequence: Synthetic coding sequence
  source 1..897: mol_type = other DNA
atgactgacgctgctgtctcctttgctaaagacttcctggcagggggggtggcagccgcgatctccaagacggcagtcgctcctattgaacgggtgaagctactccttcaggttcagcatgcctccaagcaaatcacagcagacaaacaatacaagggaattatcgactgcgttgtgaggatcccgaaggaacagggagtgctgtcgttctggcgtgggaacctagcgaacgttatcaggtattttccaacgcaggccctgaatttcgcctttaaagataaatataagcagatcttcctgggaggtgtggacaaaaggacgcaattctggctgtacttcgcggggaatctagcatcggggggagccgcaggcgctacctctctgtgcttcgtgtatcctttagacttcgctcggacgaggttggccgctgatgtaggtaaagccggtgcagaacgcgaattccgcggacttggagattgtctcgtgaagatctacaaaagcgatgggattaagggcctttatcagggctttaacgtctcagtgcaggggatcatcatctacagagccgcctactttggcatttatgacactgctaaaggaatgctccccgaccccaagaacactcacattgtcatcagttggatgatagcacagacagtaaccgcagttgctggattaacgagttatccgttcgacaccgtccgccggcgcatgatgatgcagagtggcaggaaggggacagatatcatgtacaccggaacactcgattgctggagaaagatcgcgcgggacgaaggtggcaaagctttctttaagggcgcctggtcaaacgtccttaggggcatggggggtgcctttgtcctcgtgctctacgatgagatcaaaaagtacacatag

SEQ ID NO: 135055 - DNA, 897 bp, synthetic construct
  misc_feature 1..897: note = Description of Artificial Sequence: Synthetic coding sequence
  source 1..897: mol_type = other DNA
atgacagagcaagcaatctcatttgccaaggattttcttgccgggggcattgctgccgccatctcaaagaccgccgtcgcaccaattgagagagttaagttattactgcaggtgcagcacgcttcaaagcaaatcgctgctgataagcagtacaagggcatcgtggactgcatcgtgaggatacctaaagagcaaggggttttgtccttctggagaggcaatctggctaatgtcattaggtacttcccaacccaggccctaaatttcgcctttaaagacaaatacaagcagatctttctgggaggagttgataagcacacacagttttggcgatattttgccggtaacctggcatccggcggcgccgctggagccacctctttgtgttttgtgtatccacttgatttcgcacggacaaggttggcagccgatgtgggcaagtccggcaccgaacgtgaattccgagggcttggtgattgcttggttaaaatcaccaaatccgatgggattaggggcctttaccagggcttctctgtgtccgtgcaaggtattatcatctatcgcgctgcctacttcggcgtttacgacacagctaagggaatgctgcccgaccccaagaatacacacattgtggttagttggatgattgcgcagactgtgactgcagtcgctggtgttgtatcttaccccttcgatactgtgcgccgaagaatgatgatgcaatccggccgtaaaggcgctgatattatgtataccggcacggtggattgctggagaaaaatttttcgcgacgagggcggtaaggcattttttaaaggggcctggtccaatgtgctccgagggatgggcggcgcattcgttctcgttttatacgatgaactgaagaaggtgatttag

SEQ ID NO: 135056 - DNA, 477 bp, synthetic construct
  misc_feature 1..477: note = Description of Artificial Sequence: Synthetic coding sequence
  source 1..477: mol_type = other DNA
atgactgagcaggccatatcttttgctaaagacttcctggccgggggcatcgccgcagccatcagtaaaaccgcagtcgctccaatcgaacgagtcaagttactccttcaggtacaacatgcttccaaacagattgcagccgacaagcagtacaaaggaatcgtggactgtattgttagaatccctaaagaacagggtgtcttgtccttttggcgcggcaatctggcaaacgtcatcaggtattttccaacacaagctcttaactttgccttcaaggacaagtacaagcagattttcctgggaggcgtggacaaacatacacagttctggcgctatttcgctggaaacctggcctcagggggtgccgctggcgcgacgtcgttgtgcttcgtgtatcctcttgacttcgccaggacccgtctggctgccgacgttgggaaaagcggcaccgaacgtgaatttcggggcttggggtag

SEQ ID NO: 135057 - DNA, 2913 bp, synthetic construct
  misc_feature 1..2913: note = Description of Artificial Sequence: Synthetic coding sequence
  source 1..2913: mol_type = other DNA
atgctctgtttcctggatgatggggcaggcatggatccaagtgacgccgcctccgtcatccaattcggcaagagcgctaaaagaactccagagtctacgcagatcgggcaatacggcaatgggcttaagtccggctcaatgcggattgggaaagattttattctgtttacaaaaaaggaagatactatgacatgcttgttcctaagccgcacttttcacgaagaggaaggaatagacgaagtcatcgtgccattgccgacctggaacgcacgcactcgcgaaccagtcaccgacaatgttgaaaagtttgccatcgagactgagctgatctataagtactctcctttcagaaccgaggaagaggtcatgacccagtttatgaagattcccggcgacagcgggaccttggtaatcatctttaatttgaagttgatggataacggagaacctgagttggacattatcagtaatcctcgagacattcagatggccgagacgtctccagaggggaccaagccagaacgacggagcttccgtgcttacgcagctgtattgtacattgatccccgcatgcgaatctttattcacggtcacaaggtgcagactaagcgcctgagctgttgcctgtataaaccccggatgtacaaatatacatcaagccggttcaagacacgagctgagcaggaggtcaagaaggctgagcacgtggcccgcatagcagaggaaaaggccagggaggctgaaagcaaggccagaacactggaagtaagactcggtggcgatttgactcgagacagcagggtgatgttaagacaggtgcagaaccgggccatcacactcagacgagaggccgatgtgaaaaagaggatcaaagaagccaagcaaagagctctgaaggaaccaaaagaactgaacttcgtgttcggagtgaatatcgaacacagagatttggacgggatgtttatttataattgctccagactgatcaagatgtacgaaaaggtggggcctcagttggagggggggatggcctgtggaggagtagttggggttgtggacgtcccttatctggtgctcgaacccacacacaacaagcaagactttgctgacgctaaagagtatcgccacttgctccgcgcgatgggtgagcatctggcccagtattggaaagatatagccattgcgcagcggggaattatcaagttctgggacgaattcggatatctgagtgctaactggaaccaaccccccagcagtgaacttcgatataaaagacgccgggctatggagattccaacaaccatccagtgcgatttatgcctgaaatggaggaccctcccctttcagctgtcctcagttgagaaagattaccccgacacctgggtatgttccatgaaccccgatcccgagcaggaccgctgtgaagctagcgagcagaagcagaaagtccctctgggaacgtttcggaaggacatgaaaacgcaggaggaaaagcagaaacaactgacagaaaaaattcggcagcagcaggaaaagctcgaagcccttcaaaagactactcctatacgctctcaggcggatctgaagaaactgccattggaggttaccacacgaccctctacagaggagcccgtgcgaaggcctcagaggccccggtctccgcctctgcctgccgtgatccgcaatgctccgtcacggcctccttcactgccgacacctcgccctgcatcacaaccaaggaaagccccagtgatctccagtacccctaagcttcccgccctggcagcaagggaggaggcctcaacatcccgattactgcagccccctgaggccccgcgcaagccggccaacacattggtgaaaacagcatcccgcccagccccacttgtgcaacagctatctccaagtctgttgccaaattcaaaatctcccagagaggtgccttctcctaaagtgataaagacacctgttgtcaagaagacggaatcccccatcaagttgagccccgccacaccatctcgcaaaaggagcgtggctgtatctgatgaagaggaagtggaagaagaagccgagcgcagaaaagaaagatgcaagagaggcagattcgtggtcaaggaagaaaagaaagactccaacgagctgtctgacagcgccggagaggaggattcagcggatctgaagcgtgcccagaaagacaaggggctgcacgtcgaggtcagagttaaccgggagtggtatacagggcgtgtgaccgccgtcgaggtgggcaaacacgtggttcgatggaaagtgaaatttgattacgtgcctacagacaccacgccccgggatagatgggtcgagaagggttctgaggacgtccgcctgatgaagccgccttcaccagaacaccaatccctggatactcagcaggagggtggcgaggaagaagtggggccagtggcccagcaggccattgccgtcgccgagcccagtaccagcgagtgcttgcggatagagccagacactaccgcgttgtcgactaatcatgagactatcgatctgctcgtccagatactgcgaaattgcttgaggtatttcttacccccgtcgttccctatcagcaagaagcaactgagcgccatgaattctgacgagcttataagtttcccgctgaaggaatactttaagcagtacgaagttggactgcagaacctgtgcaattcgtaccagtctagggctgattctagagccaaggcctccgaagaatcactccgcacaagtgaacgaaaactgagagaaactgaggagaaactccagaagcttaggactaacatcgtcgcccttctgcagaaagtgcaggaagatattgacatcaatacggacgatgaactggatgcttatatagaggacctgatcaccaagggagattag

SEQ ID NO: 135058 - DNA, 627 bp, synthetic construct
  misc_feature 1..627: note = Description of Artificial Sequence: Synthetic coding sequence
  source 1..627: mol_type = other DNA
atgttcgaatttctgtccaaccacatgcgagacgcccaaggcaggctggactccaccagggggctcttatgtggactgggggcaggtgtagcggaggctgtcgtggtggtgtgccccatggagactatcaaggtcaagtttatccacgaccaaacctcacctaacccgaaataccggggcttcttccatggagtgcgcgaaattgtgagagaacagggcctaaaagggacgtaccaaggcctgacagccaccgttcttaagcaagggagtaatcaagccatccgcttttttgtaatgacatctttaaggaactggtataggggggacaaccctaacaagcccatgaatcccctcattactggcgtgtttggagcaatcgccggagcagcctcggtcttcgggaatactccactggacgtgataaagacacggatgcaaggcttggaagcgcacaaatatagaaatacctgggattgcggcctccagatactgaagaaggaagggctgaaggctttttacaaaggaacagtgccccgcctcggccgtgtttgcctggatgtggcgattgtcttcgtgatatacgatgaagtggtcaagctgctgaataaggtctggaagacagattag

SEQ ID NO: 135059 - DNA, 999 bp, synthetic construct
  misc_feature 1..999: note = Description of Artificial Sequence: Synthetic coding sequence
  source 1..999: mol_type = other DNA
atggcagctgccacagccgctgcggcccttgccgccgccgacccaccccccgccatgccccaggcagccggggccggaggccctacgacgcggcgcgacttttattggctgcggagctttctcgcggggggcatcgccggctgctgtgcaaagacaactgtggcccccctggatcgggttaaggtactgcttcaggcgcataaccatcactataagcacttaggcgtcttctccgcactgagggctgtgccccagaaagagggcttcctgggcctgtataagggaaacggcgcaatgatgataagaatttttccttacggtgcaattcaatttatggcttttgagcactataagactctgatcaccaccaagctcggcatatctgggcacgttcatcggttaatggcaggaagcatggctggcatgacagccgtgatctgtacatatcccctggacatggtgagggtccgactcgcctttcaagtgaaaggggaacacagctacaccggcatcatccacgcctttaaaacgatatacgcaaaagagggcggcttctttggcttttaccgcggccttatgccaactattctggggatggctccatacgctggagtctctttttttacatttggcaccctcaagagcgttggactcagccatgcacccacactgctcggaagacctagttccgataatccgaacgttctggttctcaaaacacacgtaaatcttctgtgtggaggggttgccggggccatcgctcaaactatttcttacccatttgatgtcacgaggagaagaatgcagctgggaacggttctgcctgagttcgagaagtgcctgactatgcgtgacacgatgaagtacgtgtacggacaccatggcattaggaaaggtctgtatcgtgggcttagcctaaactacattagatgtattccaagccaggctgttgccttcactacctacgaactgatgaaacaatttttccacctgaactag

SEQ ID NO: 135060 - DNA, 705 bp, synthetic construct
  misc_feature 1..705: note = Description of Artificial Sequence: Synthetic coding sequence
  source 1..705: mol_type = other DNA
atgatgatccggatcttcccttatggcgccatccagtttatggcgtttgagcactacaaaacgctgatcaccacaaagttggggattagtggccacgttcatcgcctgatggccggctccatggcaggaatgacggccgtcatatgtacatatccactcgacatggtgagggttcgtcttgccttccaggtgaaaggagagcattcctatactggtatcatccacgctttcaagacaatctacgcgaaagaggggggattcttcggattctatcgcggtttgatgccaaccatcctgggaatggccccctatgctggcgtctccttttttaccttcggaacgctcaagtccgtgggcctttcacacgctcccactctcctgggacggccatcttcagacaatcccaacgttctggtactgaaaacacacgtgaacttattgtgtggcggggttgccggggcaatcgcccagaccatcagttatcccttcgacgtcacacggcgcaggatgcagctgggaaccgtgctgcctgaattcgaaaaatgccttactatgcgggatactatgaaatatgtgtacgggcaccatgggatccgtaagggcttgtaccgaggactgtccctcaattacatccgttgcatcccatctcaagctgtggcatttacaacttatgaactgatgaagcagttttttcatctcaactag

SEQ ID NO: 135061 - DNA, 906 bp, synthetic construct
  misc_feature 1..906: note = Description of Artificial Sequence: Synthetic coding sequence
  source 1..906: mol_type = other DNA
atgaagagcaaccccgccatacaagccgccattgacctaactgccggagctgcgggtggtaccgcgtgcgtgctgaccggccagcccttcgacaccatgaaagtcaagatgcagaccttccccgacctgtaccggggcttgactgactgctgtctcaaaacctattcgcaggtgggattcaggggtttctataaggggacctcaccagccctgattgctaacatcgctgagaacagtgttttgttcatgtgctacggcttttgccagcaggtggtacgcaaagttgccgggctagacaaacaagctaagttgtctgacctgcaaaatgcggcagccggcagcttcgcttcggcttttgctgcgctggttctttgcccaaccgagttggttaaatgtcgattgcagacaatgtacgagatggagaccagtgggaaaatcgctaagagccagaacacagtctggtccgtaattaagtcgatcctgcgaaaggatggcccgctagggttctaccacgggctgagctctactctccttagagaagtgcctggttactttttcttttttggtggttacgaactgtcaagaagcttcttcgcgtcaggtcgctcaaaggacgagctgggtccagtacctctcatgctttccgggggagtgggtggaatctgtctttggctggcagtgtaccccgtcgattgtataaagtcccgaatccaggtactcagtatgagcggaaagcaagccggcttcattcggacattcattaatgtggtcaagaatgagggaattacagccctttactcgggcctcaagcctacgatgattcgtgcattcccagccaacggcgccttgttcctagcttatgagtattcccgaaaactcatgatgaaccagctggaggcttactag

SEQ ID NO: 135062 - DNA, 402 bp, synthetic construct
  misc_feature 1..402: note = Description of Artificial Sequence: Synthetic coding sequence
  source 1..402: mol_type = other DNA
atgaagagcaatcccgcaattcaagccgcaatcgatctcacagcaggagctgctggtggaaccgcgtgcgtcctcaccggccaaccattcgataccatgaaggtgaagatgcagacctttcctgacctttatcggggcctgacagactgctgcctcaagacctacagtcaggtgggcttcaggggattttataagggcacctctccggccctgatagccaatatcgcagagaactcagtactcttcatgtgttacggattctgccaacaggtggttcggaaagtcgccgggctggacaagcaggctaaactgtcaacagtgtggagcgtaatcaagtctatcctgagaaaagatgggcccctcggtttctatcatggcctgtcaagcactttacttaggtag

SEQ ID NO: 135063 - DNA, 402 bp, synthetic construct
  misc_feature 1..402: note = Description of Artificial Sequence: Synthetic coding sequence
  source 1..402: mol_type = other DNA
atgaagtcgaatcccgccatccaggctgcaatagacctgactgccggagccgctggtggtacagcatgcgtcctgacaggccagccttttgatacgatgaaggtgaaaatgcaaacatttccagatttgtaccggggactcaccgactgctgtctcaagacgtactctcaggtcggctttcgtggtttctacaagggaacatcccccgcgctgatcgccaatattgccgaaaactcagtactgtttatgtgttacggcttctgtcagcaagtggtacgtaaagtcgccgggctggacaagcaggcgaagttatcaaccgtgtggtccgtcatcaagtccatcctcaggaaggacgggcccctggggttctaccacggcctctcatccaccttattgcggtag

SEQ ID NO: 135064 - DNA, 906 bp, synthetic construct
  misc_feature 1..906: note = Description of Artificial Sequence: Synthetic coding sequence
  source 1..906: mol_type = other DNA
atgaagtctaaccccgctattcaagctgcaatcgatctcacagcaggagccgcaggtggaaccgcttgtgttctgaccggacaaccattcgacacaatgaaggtaaaaatgcagacgtttcccgacctgtatagggggctgacagattgctgcctcaaaacttactctcaagtgggattccgtggtttctacaaggggacgtctcctgcgctaatcgctaacatagccgaaaactccgtcctattcatgtgttatggattttgccagcaggtggtacgcaaggtagccgggctcgataagcaagccaaactgagcgatttacaaaatgcagcagctggttccttcgccagcgcattcgccgctcttgtgctctgccctaccgagcttgttaagtgcagactgcagaccatgtacgaaatggaaacttctggcaagatagcaaagtctcagaacacagtctggtcagttattaagagcatactgaggaaagacgggccgctcgggttttaccacggactttctagcacgctgctgcgcgaagtgcccggctatttctttttttttggaggttatgagttgtcacggagcttcttcgctagcggcaggtccaaggacgagctggggcccgttccattaatgctctccggaggcgttggcgggatctgtctctggctggctgtttacccggtggactgtataaagtcacgaattcaggtcctttcaatgagtggtaaacaggctggctttatccgcacattcatcaacgttgtgaagaatgaaggaataacagccctgtattccggactgaaaccgactatgatccgggccttccctgcaaacggggctctgttccttgcatatgagtattcccgcaagcttatgatgaaccagctggaggcttactag

SEQ ID NO: 135065 - DNA, 726 bp, synthetic construct
  misc_feature 1..726: note = Description of Artificial Sequence: Synthetic coding sequence
  source 1..726: mol_type = other DNA
atgaagtctaatcccgcaatccaggctgctatcgacctgacagcaggtgccgccggggggaccgcatgcgtgctgactggacagcccttcgacaccatgaaagtggctgggctggacaaacaagccaagctgagcgatttacagaatgccgccgctgggtcttttgcctctgcttttgcggccttagtcctctgtccgacagaactagtaaaatgcaggctccaaaccatgtacgagatggaaaccagcggcaaaatagccaagtcacaaaacaccgtgtggtccgtaattaagtcaatcctccgaaaggatggtcctctcggcttttatcatggcttgtcgtctactttactccgcgaagtcccagggtatttcttctttttcgggggttacgaactgagccgcagcttcttcgcgagcggacggagcaaagacgaactgggacccgtaccactgatgctttcggggggtgtgggcgggatctgtctttggctcgcagtctaccccgttgactgcatcaaatcaagaatacaagttttgtctatgtctggcaaacaggccgggtttatccgcacttttattaatgtcgtgaaaaatgaaggcataacagccttgtacagtggcctcaagccaactatgattagggcattccccgcgaatggcgcgttattcctggcatacgagtatagccgaaaattgatgatgaatcagctcgaggcatattag

SEQ ID NO: 135066 - DNA, 906 bp, synthetic construct
  misc_feature 1..906: note = Description of Artificial Sequence: Synthetic coding sequence
  source 1..906: mol_type = other DNA
atgaaatccgggcccggcatccaggccgcaatcgatctaactgctggcgcagctggaggaaccgcatgcgttctgacaggtcagcccttcgatacaatcaaggtaaaaatgcagacgtttcctgacctgtacaagggactgaccgactgtttccttaagacatacgctcaggtcgggctgagaggcttctacaagggcacagggccagcactaatggcctacgtcgccgagaactcagttctgtttatgtgctacggcttctgtcagcagtttgtacggaaagtggctggaatggataaacaagccaaattaagcgacttacagacagccgcagctgggtcatttgccagcgcatttgctgctctggccctgtgtccgacagagctcgttaagtgtcggctgcaaactatgtatgagatggaaatgagtggcaaaatcgctaagagccataacactatttggtccgtggtgaaggggatactgaaaaaggatggcccgctggggttctaccatggcctgtccagtacccttctgcaagaggtccccgggtacttcttttttttcggcggctacgaactgagcagaagtttcttcgcctccggccgcagcaaggacgaactgggcccagttcacctgatgctgtccggaggcgtggcagggatttgtctttggctggtggtgtttcccgttgactgcatcaagtccagaatccaggtcctgtctatgtacgggaagcaagctggattcataggcaccctcctctccgtagtgaggaacgagggcatcgtggccctctactctggcctgaaagccacaatgattcgcgctattccagcaaatggagctctgttcgtggcctatgagtacagccgcaagatgatgatgaagcagttggaagcctactag

SEQ ID NO: 135067 - DNA, 423 bp, synthetic construct
  misc_feature 1..423: note = Description of Artificial Sequence: Synthetic coding sequence
  source 1..423: mol_type = other DNA
atggcaggatggaatgcctacattgataacctgatggcagatggtacctgtcaagatgccgccatcgttggatataaagattccccaagcgtatgggccgcagtgcctggtaagacctttgtgaatatcacccctgcggaagttggggtcctggtgggtaaagaccgctcttccttctacgttaacgggcttaccctgggtggccaaaagtgctctgtgatccgagactcgctcctccaggatggggaattcagtatggacctgcggacaaagagcaccggcggcgcgcctacctttaacgtgacagtgactaaaacagataagactttggtcctcctgatgggaaaggaaggggtgcacgggggcttaattaacaagaagtgttatgagatggcatctcaccttcgccgatcccagtactag

SEQ ID NO: 135068 - DNA, 792 bp, synthetic construct
  misc_feature 1..792: note = Description of Artificial Sequence: Synthetic coding sequence
  source 1..792: mol_type = other DNA
atggccgcaacggcctctgctggtgccggagggatcgacggtaagccccgcacatcccccaaatccgtcaagttcctgttcggtggtctggctggcctctccgctggactgctacgacaggcgacatatacgaccacaagactgggcatatatactgtcctgttcgagcgccttaccggagctgatggaactcctcctggatttttgctgaaagccgtgatcggcatgactgccggcgcaactggggcattcgtgggaacccccgcggaagtggcattgattaggatgaccgctgacggaaggctgccagctgaccagcggcggggttataagaacgtgtttaatgccttaattagaattacacgcgaagaaggggttttaacattgtggagaggttgcattcccacgatggctcgcgccgtggtcgttaatgcagctcagctggcgtcatattcacagtccaagcagttcctcttggattccggatacttctcagataacatcctgtgtcacttttgtgcctcaatgattagtggcttggtcacaactgcagcgtctatgcccgtggatatcgccaaaacccgtatccaaaacatgcgcatgattgatggaaagcctgaatacaagaacggtcttgacgtgttgttcaaagtggtccgttacgagggatttttttcactttggaagggttttaccccctactacgctagattaggacctcatacagtgctgacgtttattttcctggagcaaatgaacaaggcctacaaaaggttatttctgagcggctag

SEQ ID NO: 135069 - DNA, 678 bp, synthetic construct
  misc_feature 1..678: note = Description of Artificial Sequence: Synthetic coding sequence
  source 1..678: mol_type = other DNA
atggagtattggtacgtggccctcaagcaacagagcctgaaggctgacattctgcccagcctattcctatccatatttctggtgaaaggcgtggtaaatgtcttgttgaccacacctctctgggtcgtcaatactcggctcaagttacagggcgccaagttcaggaacgaggatatagttcccacaaattataagggaatcatcgatgcctttcatcagatcatccgggatgaagggatttccgcactttggaacggcacattcccgtctctcctacttgtctttaacccagccattcagtttatgttttacgaaggcctgaagaggcagctgctgaaaaagcgcatgaagttgtcatcacttgatgtgttcattatcggggctgtagccaaggctattgccacgaccgtgacttaccctctccaaaccgtccagtctatcctgcggttcggcaggcataggttaaatcctgagaatcgaacactcggatcccttaggaatattctttatctgttgcatcagagggttcggcgcttcggaattatgggcctttacaagggcttggaggccaagttgctccagactgtgctgacagccgcactgatgttcctagtgtacgaaaagctgacagcagcgaccttcacggtcatgggccttaagcgagcacaccagcactag

SEQ ID NO: 135070 - DNA, 279 bp, synthetic construct
  misc_feature 1..279: note = Description of Artificial Sequence: Synthetic coding sequence
  source 1..279: mol_type = other DNA
atgggatcagtcaccgctatgactgttttctttcctctcgatacagctcggctgaggctgcaggtggacgaaaaaagaaaatcgaagaccactcatatggtgctgcttgaaatcattaaggaagagggtcttctagccccatacaggggatggtttcctgtgatctcatctctgtgctgtagcaattttgtgtacttttatacatttaatagcctcaaagctttgtgggttaaggggcagcacagtactacgggcaaggacttggtcgtcggcttctag

SEQ ID NO: 135071 - DNA, 924 bp, synthetic construct
  misc_feature 1..924: note = Description of Artificial Sequence: Synthetic coding sequence
  source 1..924: mol_type = other DNA
atggccagcgtgcttagttatgaaagcttagtccacgccgtggcgggcgcagtgggctcggtgacagcaatgaccgtttttttccccttggatacagcaagactgagactgcaggtcgacgagaagcggaaaagtaagactacccatatggtcttgttggagatcattaaagaggagggtctactcgccccgtacagagggtggttccctgtcatcagcagcctttgttgcagtaactttgtttatttctacacattcaattccctaaaagcgctgtgggtcaagggccaacattcaactacaggcaaagacttggttgtgggattcgtcgctggggtcgtgaatgttttactcaccacgcccctgtgggtggtgaatacacggcttaagctccaaggggcgaagttccggaatgaagatattgtgccgaccaattataagggtattatcgacgccttccaccaaattatcagagatgaaggcatcagcgccctttggaatggcacctttcccagtctgttactcgttttcaaccctgcaatccagttcatgttctatgaggggctgaaacgacagttgctcaagaagcgaatgaaattgtcgtccttggacgttttcattatcggcgctgtagccaaggctatcgccacaacagtgacttaccctctccagactgtacagtcaatccttagatttggtcgccacagactcaatccagagaatcgcacgctcgggagtctgcgaaatattctgtatctgttacaccagagggttcgaagattcggcattatgggtctgtacaaagggctggaggccaaactgctccagaccgtgctgaccgccgccttaatgttcctggtctacgagaagctgaccgccgcgactttcacagttatgggcctgaagcgagctcaccagcattag

SEQ ID NO: 135072 - DNA, 705 bp, synthetic construct
  misc_feature 1..705: note = Description of Artificial Sequence: Synthetic coding sequence
  source 1..705: mol_type = other DNA
atggcttccgtgttaagttacgagtcactggtccatgcagtagctggagcggtcggctccgtgaccgccatgactgttttcttcccccttgacacagccagacttaggctgcaaggagttgtcaatgtgctgctgacaacacctctctgggtggtcaacactaggcttaagcttcagggtgccaaattcaggaacgaggatatcgtgcctacaaactacaagggaatcattgacgctttccaccaaataatccgggatgagggcatctccgcattatggaacggtaccttcccctccttattgctcgtattcaatcccgcgattcagttcatgttttacgagggattgaaacgccagctactcaaaaaaaggatgaaattgtccagcctggacgtattcattatcggagcagtcgctaaagcaatcgccaccacggtcacgtaccctctccagaccgtgcagagtatcctacgttttggtcgacatagactcaatccggaaaacagaacattaggttcactcaggaacattctttacttgcttcaccagagagtgcgccgctttgggatcatgggtctgtataagggtctcgaagccaaactgctacaaacagtcctaactgctgctctgatgttcctcgtctacgagaagctgacagccgcaacctttacggtgatgggattgaagagggctcaccagcattag

SEQ ID NO: 135073 - DNA, 813 bp, synthetic construct
  misc_feature 1..813: note = Description of Artificial Sequence: Synthetic coding sequence
  source 1..813: mol_type = other DNA
atgattgatgaaaaaaggaagtctaagaccacccatatggtcctactcgagatcattaaggaggaaggtctcctggcaccctatcggggatggtttcccgtcattagctccctttgttgtagcaatttcgtgtatttttatactttcaactctctgaaagccctttgggtgaagggccagcactctaccaccggcaaagacctagttgtcggcttcgtcgccggagtggtgaatgttctcctaacaaccccactgtgggttgtgaacacacgccttaagctccagggcgcgaagttccggaatgaagacatcgtccccacgaactataaggggattatcgacgcctttcaccaaatcattagagatgagggaatcagtgctctgtggaacggtacctttccatcactgctgttagtgtttaatccggccattcagttcatgttttacgagggactgaagcgacaactgcttaagaagaggatgaaactgtcctcactggacgtatttattatcggcgctgtggctaaggccatagctaccactgtcacatatccattgcagactgtgcagtctattctccggtttggtagacatcggctgaatcccgagaataggaccctgggatccctccgcaatatcctttacctgctgcatcagagggtgagacgcttcgggattatgggattatataaaggactcgaggcaaagttactgcaaaccgttcttacagctgccctaatgttccttgtgtatgagaaattaaccgccgctacgttcactgttatgggactgaagcgagctcatcagcactag

SEQ ID NO: 135074 - DNA, 1086 bp, synthetic construct
  misc_feature 1..1086: note = Description of Artificial Sequence: Synthetic coding sequence
  source 1..1086: mol_type = other DNA
atgttttcgtccgtcgcccatctggctagggcgaatccctttaatactccccacctgcagttggtgcacgatggtctcggtgatctccggagcagctccccagggcccaccggccaacccagacgtccacgcaatctggctgccgctgcagtcgaagaatactcctgtgagttcggatccgcgaaatactatgcgctttgcggctttggaggggtgctgtcatgtggcctgacacataccgccgtcgtgccattagatctagtcaagtgtcggatgcaggttgatccacagaagtataaaggtatattcaatggattctcagttactttgaaggaggatggcgtgaggggcttggctaagggttgggccccaacatttttaggctactcgatgcaaggactgtgcaagtttggtttctacgaggtctttaaggtcctttactccaacatgctcggagaagaaaacacatacctctggcgcaccagtctgtacttagctgcctctgcttcagccgaattcttcgcagacatagccctggcccccatggaggccgccaaggtgagaatccaaacacagcctgggtatgcgaatacacttcgcgacgccgctcccaagatgtacaaagaggaaggactgaaagcattctataagggcgttgcgccgctttggatgcggcagatcccatacaccatgatgaagttcgcctgcttcgaaagaactgtcgaggctctgtacaagttcgtggtgcccaaacccaggtcagaatgcagtaaacctgagcagttggtggtgacatttgtggccggctacatcgccggcgtgttctgcgcaattgtgtcacaccctgccgacagtgtcgtctccgtgcttaataaggagaagggttcgagtgcatcactcgtcttaaagcgccttggatttaaaggggtctggaaaggactttttgcccgtattattatgattggaacactgacagctctccagtggttcatttacgattccgtgaaggtgtactttagactgcctcgcccgcctccacccgagatgcctgaatctttaaagaaaaaactgggactgacccaatag

SEQ ID NO: 135075 - DNA, 1776 bp, synthetic construct
  misc_feature 1..1776: note = Description of Artificial Sequence: Synthetic coding sequence
  source 1..1776: mol_type = other DNA
atggatgatctggatgcactgcttgccgacctagagtctacgacctcacacattagcaagagacccgtctttctgtccgaggagacaccgtacagttatcctacggggaaccacacctaccaggagatcgcagtgcctccgccagtacctccacccccttccagcgaggcgctgaacggcacaatcctggacccactggaccagtggcaaccgtcaagcagtcgcttcatacaccagcagccccagtcaagcagcccagtgtacggaagttccgccaagacatcctctgtctctaatccacaagactccgttggaagcccttgctctagggtgggggaagaggagcatgtttactcattcccgaataagcagaagagcgctgaaccctctccaactgtcatgtccacctccctggggtccaatttgtccgaactcgaccgcctgttgttagagttgaatgccgtgcagcacaatccacccgggtttcctgcagacgaagcaaacagttcgcccccgctcccgggggccttgtcaccattgtatggggttcccgagacaaacagccctctaggagggaaagccggcccactgacaaaggaaaagcccaagaggaacgggggtagggggctcgaggacgtccggccaagcgtggagtctctcctggatgaactcgagagttcagtcccgtctccagtcccagcaatcacagtgaatcaaggagagatgagctccccacagagagttactagcacccagcaacaaacacggattagtgcttccagtgcaacacgggagctcgatgaactgatggcatcactgtccgattttaaaatacagggcctcgagcagagggcagacggtgagcgctgctgggccgcaggctggccacgagatggaggaagatcctcacctggcggacaagatgagggggggtttatggctcagggcaagacaggctcttcctcaccaccaggggggcccccaaaacctgggtcccagttggattctatgttgggttctcttcagagtgaccttaataagctcggcgtggcaactgtggctaagggtgtgtgtggcgcctgcaaaaaaccaattgccgggcaggtagttaccgccatgggaaaaacatggcacccggaacactttgtttgcacacactgtcaggaggagatcgggtcccggaatttcttcgagcgggacgggcagccatattgcgagaaggactaccataacctattctcacccagatgctattattgcaatgggcccatcctagataaagtggtcaccgcacttgatcgtacttggcacccggaacactttttctgcgctcagtgtggagctttcttcgggcctgaaggatttcacgagaaggacgggaaagcctattgtcggaaagattattttgatatgttcgcacctaagtgcggcggttgtgcccgcgcaatcctcgaaaattacatctctgctctaaataccctgtggcatccggagtgtttcgtttgtcgggaatgcttcacgccgttcgtgaacggttcattttttgagcacgatggacagccttactgtgaggtgcattaccacgagcgccgggggtccttgtgcagtggatgccaaaagcctattactggccgatgcatcacagctatggccaagaagttccatccggagcacttcgtgtgcgctttttgccttaaacagctgaacaaaggaacctttaaagaacaaaatgacaagccttattgccaaaattgctttctgaaactcttctgctag

SEQ ID NO: 135076 - DNA, 1086 bp, synthetic construct
  misc_feature 1..1086: note = Description of Artificial Sequence: Synthetic coding sequence
  source 1..1086: mol_type = other DNA
atgttttcttcagtggcccacttagccagggcaaatcccttcaacacaccgcacctccagctggtacatgatgggttgggagacctgcgctctagctctcctgggcctaccgggcagccaagaagaccacgaaaccttgctgccgccgctgtggaagagtacagttgtgagtttgggtcggcaaagtattacgccttatgcggttttggtggcgttctgtcctgcggcctgacccacacggctgtggtcccgcttgatctggtgaaatgcagaatgcaggtcgaccctcagaagtacaagggtattttcaatgggttttccgtgacgttgaaagaggatggggtccgcggactggccaaaggctgggccccgaccttcctgggctatagtatgcagggcctctgtaagtttgggttctatgaagttttcaaggttctctactctaatatgttgggcgaagaaaacacctacctgtggaggacaagcctctacttagccgcctcagcctctgcagagttcttcgccgacatcgcacttgcccccatggaggccgccaaagtcagaattcagacgcaaccaggttacgcaaatactcttagggatgcggcacccaagatgtacaaagaggagggtctcaaagcgttttataaaggggtggctcctctgtggatgcggcagattccctatacaatgatgaaatttgcatgctttgagagaaccgtggaagctctgtacaaatttgtcgtgcccaagccgaggagcgagtgcagtaagccagagcaactggtggtgacttttgtggcagggtatatcgctggagtattttgcgccatcgtgtcgcaccctgccgattcggtggtgtcggtgttgaataaggaaaaaggctcttcggcaagcctggtcctgaagcgacttggattcaaaggtgtgtggaaaggattgtttgcccgcatcattatgatcggcactctgacggctcttcagtggttcatctacgattccgtaaaagtctattttcggttgccgagaccacctccgcccgaaatgccagagtccctgaagaaaaagcttggactcacccaatag

SEQ ID NO: 135077 - DNA, 1086 bp, synthetic construct
  misc_feature 1..1086: note = Description of Artificial Sequence: Synthetic coding sequence
  source 1..1086: mol_type = other DNA
atgttctcttccgtagcacaccttgcccgggctaacccctttaacacccctcacctacaactggttcacgacgggttgggggaccttagaagttcatccccgggtcccaccggacaaccccggcgccctcggaacttggccgcagctgcagttgaagagtactcatgtgagtttggatccgccaaatactatgcgctgtgcgggttcgggggcgtcttgagctgtggcttgacacacaccgctgttgttcctctcgatctcgtcaaatgtaggatgcaagtcgaccctcagaaatataaagggatcttcaatggtttctctgtgacacttaaggaagatggtgttcgtggcctcgcaaaagggtgggcacccaccttcttaggatattcaatgcagggtctgtgcaagttcggtttttatgaagtcttcaaagtcctttactcaaatatgttgggagaggagaatacatacctgtggaggaccagcctgtatctggccgcgtccgcatctgctgaatttttcgctgatattgcactagctccaatggaggctgccaaggtgcgcatccaaacccagcctggctacgccaacactctccgtgacgccgcacccaagatgtacaaggaggaggggctaaaagccttttacaagggcgttgccccactttggatgagacagatcccctacacaatgatgaagtttgcttgcttcgaacgtaccgtcgaagccttgtacaaattcgtcgtccctaagccacggtcagagtgctctaagcccgagcagctggtggtgacgttcgtggccggatacatcgccggggtgttctgtgcaattgtctcccatcccgcagattctgtggtgtcagtgctgaacaaagaaaaggggagctccgcttcactggtacttaagagactcggctttaaaggggtctggaaaggtctcttcgcccggattattatgatagggacgctgacggccttacagtggtttatttatgattctgtgaaggtgtacttcagactaccccgtccccctccgccagaaatgccagaaagcctgaaaaaaaaactgggcctcacacaatag

SEQ ID NO: 135078 - DNA, 1089 bp, synthetic construct
  misc_feature 1..1089: note = Description of Artificial Sequence: Synthetic coding sequence
  source 1..1089: mol_type = other DNA
atgttcagctccgtcgctcacctggcccgggcaaatccttttaataccccccacctgcagctggttcacgacggactcggtgacttgcgctcctcctcaccagggcctactggtcagccacgcagacctaggaacctcgccgccgccgctgtcgaggagcaatactcctgtgattatgggtcaggaagattcttcatcctgtgcgggctgggggggatcattagttgcggcaccacacacaccgctttggtcccactagatctcgtcaagtgcaggatgcaggtggaccctcagaagtataaaggcattttcaatggcttttccgtcacactcaaggaagacggagtccgtggtctggccaaaggatgggcgcctacatttctgggatattcaatgcagggcctgtgtaagtttgggttttacgaggtgttcaaagtcctgtatagcaacatgctgggcgaagaaaacacatatttgtggaggacatctttatacctggctgcatctgcaagcgcggagttctttgcagatattgccctggccccaatggaggctgctaaggtgagaatccagactcaaccaggttacgcaaatacactgcgggatgccgctccgaaaatgtacaaggaagagggcctgaaggccttctacaagggcgtcgctcctctctggatgagacaaattccttatacaatgatgaaattcgcctgtttcgaacggaccgttgaagctctgtataaattcgtggtccctaagcccaggtctgagtgctccaagccagagcagctcgtggtaacattcgtggcaggatacatagctggcgtgttttgtgccatagtgtctcatcctgctgactcagttgtcagtgtccttaataaggaaaaaggttctagtgcctccttggttttaaagcgccttgggttcaaaggcgtgtggaagggattgtttgccaggataataatgatagggaccctgacagcccttcagtggttcatctacgactccgtcaaagtctatttcaggctccctcgaccccctccgcctgagatgcccgaatctctgaagaaaaaactggggctcacccaatag

SEQ ID NO: 135079 - DNA, 1086 bp, synthetic construct
  misc_feature 1..1086: note = Description of Artificial Sequence: Synthetic coding sequence
  source 1..1086: mol_type = other DNA
atgttttctagcgtcgcacacctcgccagagccaacccctttaataccccacacctgcagctggtacatgacggccttggagacctccgcagctccagtccaggccctactggacaacctcgcagacctaggaacttggccgccgcagcggtggaagagtattcttgcgagtttggaagcgctaaatattacgccctgtgcgggttcgggggagtgctgagctgcggcctaacccacactgcagtcgtgccgctcgaccttgttaagtgccgcatgcaggttgatccccagaaatataagggcatatttaacggcttctctgtgactctcaaagaggacggcgttagagggctggccaagggttgggcccctaccttcttagggtactcgatgcagggtctatgcaaatttgggttttacgaggtgttcaaggtactatatagtaacatgttgggtgaagagaacacatacctgtggagaaccagcctgtatctggccgcgagtgctagtgcagaattttttgccgacatcgccctggcacccatggaagccgccaaggttcgaatccagacgcagcctgggtacgctaacactctccgcgacgccgcacctaagatgtacaaagaggaggggctcaaagcattctataagggagttgccccgctctggatgagacaaataccctacactatgatgaaattcgcctgctttgaaaggactgtggaggcgctctataagttcgtcgtgcctaaaccacgctcggagtgcagcaagcccgagcagttagtcgtgacctttgtggccggttatatagcaggggtcttctgcgccatcgtctcccatccggcggattctgtggtttctgtgctgaacaaggaaaaggggagctctgcatccctcgtgctaaagagactcggttttaagggagtgtggaaagggcttttcgctcggattatcatgataggcaccctcaccgctctgcagtggttcatctacgattccgtaaaggtgtatttccgcctgccacggcctcctccacctgaaatgccagagtctctgaaaaagaaacttgggctgactcagtag

SEQ ID NO: 135080 - DNA, 897 bp, synthetic construct
  misc_feature 1..897: note = Description of Artificial Sequence: Synthetic coding sequence
  source 1..897: mol_type = other DNA
atgagtgcaaagccagaagtgagtctggttagagaggccagccggcagatcgtcgccggtggcagcgccggccttgttgagatctgcctgatgcatccactagacgtcgtcaagactagattccaaatacagcgatgcgcgacagacccaaactcctacaagtcgttggttgattcatttagaatgatatttcagatggagggtctgttcggcttttacaagggaattctgccacctattctcgccgaaaccccaaagagagccgtaaagtttttcacatttgagcagtacaagaagctgcttggctacgtctccctgtcacctgctctgacttttgctattgccggcctcggctctggtctgactgaagcgattgtcgtcaaccccttcgaggtggttaaagtgggcttacaagccaatagaaacacctttgccgaacaaccatccactgtcggctacgcccggcaaatcatcaagaaagaaggctggggcctccagggcctcaacaagggactcacggcgacccttgggcgccacggcgtcttcaacatggtgtattttggcttttactataacgtcaagaatatgatcccagtgaacaaagacccaattctagaattctggcggaagtttggaattgggctcctttcaggaacaatcgccagtgtaatcaatatcccttttgacgtcgcgaagagccggatccagggacctcaacccgtacctggagaaattaaatatagaacctgcttcaaaacgatggctaccgtctaccaggaagaggggattttagccctgtataagggactgttgccgaagataatgcggctgggaccaggaggggcagtgatgctgctggtttacgaatacacgtatagttggctgcaggagaactag

SEQ ID NO: 135081 - DNA, 900 bp, synthetic construct
  misc_feature 1..900: note = Description of Artificial Sequence: Synthetic coding sequence
  source 1..900: mol_type = other DNA
atgtccgctaagcctgaagtatcactggttagagaggcgtcaagacagattgtggccgggggatccgcagggctggtcgagatttgcttgatgcaccctctggatgtggtgaagacacgtttccagattcagcgctgtgcgactgaccctaactcctataagtccctagttgattccttccgaatgatcttccagatggaaggattattcggattctacaagggaatcctacccccaattctcgccgaaacccctaaacgagcagttaaattttttacatttgagcagtacaaaaaactccttggctatgtgtcgcttagcccggccctaaccttcgctattgctggacttggctctggactcactgaagctatagtggtaaaccctttcgaggtggtcaaagtaggactgcaagccaatcgcaacaccttcgctgaacagcctagcacagtgggctacgctcgacagattattaaaaaagaaggatggggactgcaaggcctgaacaagggtctaactgccactttagggcgccacggcgtttttaatatggtgtacttcgggttttactataacgttaagaatatgattcctgtgaataaggatcccattctggaattttggcgcaaattcggtatcggtctgctgtcagggaccattgcaagcgtgatcaacatcccatttgatgtagctaaaagtagaatccagggcccgcagccagtgccgggggaaataaagtacaggacatgctttaaaacaatggcaactgtttaccaggaggagggcatcctggcactgtacaagggtttgctgccgaaaatcatgcgattggggccgggaggagccgttatgcttctagtttacgaatatacctacagctggctacaggaaaattggtag

SEQ ID NO: 135082 - DNA, 963 bp, synthetic construct
  misc_feature 1..963: note = Description of Artificial Sequence: Synthetic coding sequence
  source 1..963: mol_type = other DNA
atggtgggctatgaccctaaaccggacgggaggaataacactaagtttcaggtggctgtggccggctctgtatctggactcgtcaccagggcgctgatttcgccctttgacgtgataaagattaggttccagctgcagcatgagcgactatcacgatccgaccctagcgccaagtatcacgggatcctccaggcatcaaggcagatccttcaagaagaagggccaaccgcattctggaaaggccacgtaccagcccagatcctttcaatcggatacggcgctgttcaatttctcagcttcgaaatgcttacagagctcgttcaccggggcagtgtttacgatgcccgcgagttctccgtccatttcgtgtgcggcgggctagctgcctgtatggccaccttaacagtgcatcctgttgacgtcttacggacacgattcgccgctcagggtgaaccgaaggtatataacacattgaggcatgcagttgggacaatgtacagatccgagggtcctcaggtgttctataaggggttggcccccacgcttatcgctatcttcccgtatgccggcctccagtttagttgctacagctcacttaagcatctgtacaaatgggccatccctgccgaagggaaaaagaacgaaaatttacaaaacctgctgtgtggaagcggcgcaggggtcatctcaaaaaccctcacttatccactggatctgtttaaaaagaggctccaggttggtgggtttgaacacgctagagccgcattcggccaggtgagaaggtacaagggactcatggactgtgcaaaacaagtccttcaaaaagaaggtgctctcggatttttcaagggtctatcaccttcccttcttaaagcagccctttctacagggttcatgttttttagctacgagtttttctgcaacgtgttccattgtatgaatagaactgcttctcagcgttag

SEQ ID NO: 135083 - DNA, 963 bp, synthetic construct
  misc_feature 1..963: note = Description of Artificial Sequence: Synthetic coding sequence
  source 1..963: mol_type = other DNA
atggtgggatatgatccaaagccagacggcaggaataacactaaatttcaagtggctgtggcgggaagtgtcagtggtttggtcacacgcgctcttatctcaccgttcgacgtgatcaaaatcagattccaactgcagcatgaacgactttcccgttccgacccatccgcaaagtatcacggaatcttacaggcctcgcgacaaatccttcaggaggagggaccgaccgctttctggaaaggacacgtgccagcacagatcctgtcaataggctacggtgccgtgcagttcctgtcattcgagatgctgactgagctcgttcacagaggcagcgtttatgacgctcgggagttcagcgtacactttgtgtgcggcgggttggccgcctgcatggctactctgacggtgcacccagtagacgtgctccgcacgaggttcgccgcacagggcgagcccaaagtatataacactttgcggcatgccgtcggtactatgtatagatctgaagggcctcaagtgttctacaaagggctggccccaacacttattgccatttttccctatgccggcctgcagttcagttgctatagtagtctgaagcatctctacaagtgggctataccagccgaaggcaagaagaatgaaaacttgcagaacttgctttgcggaagcggggcaggtgtgatttctaagaccctcacttatcctctggacctgttcaaaaaaagactgcaggtaggaggctttgagcacgccagggccgcatttgggcaggttaggcggtataaagggctgatggactgcgctaagcaggtgcttcagaaagaaggggccttgggattcttcaagggcctctctccttctctgttgaaagcagccttaagcacaggcttcatgttcttctcttatgaatttttttgcaacgtcttccactgcatgaatcgtactgcgtcacagcgttag

SEQ ID NO: 135084 - DNA, 792 bp, synthetic construct
  misc_feature 1..792: note = Description of Artificial Sequence: Synthetic coding sequence
  source 1..792: mol_type = other DNA
atggttggttacgatccgaaaccggacgggagaaacaacacaaaattccaggtggcagtcgctggctctgtcagtggcctcgtgactcgtgcactcatatccccttttgacgtgatcaagattagatttcagctgcagcacgaacgtctgagtaggtccgaccccagcgcaaagtatcacggaattctgcaggccagccgccaaatcttacaggaagaaggccccacggcattttggaaggggcacgtccccgcccagatcctcagtattggatatggagccgttcaggtgtataatactttgcgtcatgcagtgggcacgatgtacaggagcgaaggcccccaggtcttttacaaggggctggcccctaccctgattgccatcttcccgtacgccggactccagttttcttgctattcatcattgaaacacctctataagtgggccattccggccgagggcaagaaaaatgagaacctacagaacctactgtgtggatccggagccggagtgatttccaaaacgctcacatacccactggacctcttcaagaagcggctgcaggtgggaggtttcgaacatgctagggccgcatttggacaggtccgaagatataagggtctgatggattgcgcaaaacaagtgctgcagaaagaaggcgctcttggcttctttaagggcctgtccccctcattgctcaaagccgccctgagcacagggttcatgttcttctcatatgaattcttttgcaatgtttttcactgtatgaatcggacagccagtcagcgctag

SEQ ID NO: 135085 - DNA, 963 bp, synthetic construct
  misc_feature 1..963: note = Description of Artificial Sequence: Synthetic coding sequence
  source 1..963: mol_type = other DNA
atggtcggatatgatccgaaacccgatggacgaaacaacacaaagtttcaagttgcggtggcaggcagcgtatccggactggtaacccgcgctctcatctcacctttcgatgtgatcaaaatcagattccagctgcagcacgaacggctatcaaggagcgacccgtctgctaaataccacgggattttgcaggcttctcgccagatcttacaggaagagggccccacagccttctggaaaggacatgtgcccgcacagatcctgagtatcggatacggagctgttcagtttctgagcttcgaaatgctcacagaacttgtccatcgaggaagcgtatacgacgctcgcgaattcagcgtccacttcgtttgtgggggacttgcagcatgtatggctacgttgacggtgcatcccgtggatgttctcaggactcgcttcgctgcgcagggtgagcccaaagtgtataatacactgcgacatgcagtcggcaccatgtatagaagtgaaggcccccaggttttctacaagggactggcccccacgctgatcgcaatattcccttacgcgggtctgcagttcagttgttacagctctctcaagcatctgtacaaatgggctatccctgccgagggcaaaaaaaacgaaaatttacagaacctgctttgtggtagcggcgcgggcgtaattagtaagaccctgacgtacccattagacttgttcaaaaagaggctgcaggtgggtggatttgaacacgctcgcgctgcattcggacaggttcgaaggtataaaggcctaatggactgtgcaaaacaggtgctgcagaaggagggggcattgggtttcttcaaaggtctgtcaccttctttgctgaaagccgccctctccactgggtttatgttcttctcctatgaatttttctgcaacgtattccactgcatgaacaggaccgcttcccagagatag

SEQ ID NO: 135086 - DNA, 963 bp, synthetic construct
  misc_feature 1..963: note = Description of Artificial Sequence: Synthetic coding sequence
  source 1..963: mol_type = other DNA
atggtcgggtacgaccccaaacctgatgggaggaataatacaaagttccaggtcgcagtagcgggatccgtcagtggccttgtgactcgagcgctgatttcaccattcgacgttataaaaatccggttccagcttcagcacgaacggctgtcccgctccgacccaagtgctaagtatcacgggatcctacaagcatccaggcagatcctccaggaggaggggccaacagcattttggaaaggccacgttcctgctcagatcctgtccattggctacggggccgtccagttcctttcattcgaaatgctcactgaactcgtccaccggggctctgtgtacgatgctcgggaattcagtgtacacttcgtgtgcgggggccttgctgcgtgcatggctaccctcacagtgcacccagtggatgtcctgcgaacacgttttgccgcccaaggcgagccaaaagtatacaataccctgagacacgccgtcggcacaatgtatcgctccgaaggcccccaggtcttctacaagggacttgcgcccacgcttattgcaattttcccctacgccggacttcaattctcctgttattcatctctaaagcacctgtacaaatgggcaatccctgccgaaggtaaaaagaacgaaaatctgcagaatctgctgtgtggatccggagctggggtgattagcaaaactctgacctatccactggacctattcaagaagcggcttcaagtcgggggcttcgagcacgcccgggcagcctttggccaggtccggcgatataagggcctaatggattgcgcaaagcaggtgctgcagaaggaaggtgctctcggcttctttaagggactctctcccagcttactcaaagccgcgcttagcacgggattcatgttcttctcctatgaatttttctgtaacgtcttccattgtatgaatcggacagcctcccagagatag

SEQ ID NO: 135087 - DNA, 963 bp, synthetic construct
  misc_feature 1..963: note = Description of Artificial Sequence: Synthetic coding sequence
  source 1..963: mol_type = other DNA
atggttggctatgatccgaagccagatgggcggaataatacaaagttccaggtcgccgttgctggctcagtttcaggtcttgttactcgggccctaataagcccctttgacgtgatcaagatccggtttcaactacagcacgaaaggctgtcacggtcagatccgagcgcaaaatatcatggaatcctgcaggcttcccgccagattctacaggaggagggacctactgccttctggaaggggcatgtacccgcccaaatcctctccataggctatggggccgtccagttcctctccttcgagatgttgactgagctggtccaccgaggcagtgtctatgacgctagagagttctccgttcacttcgtctgtggcggcttggccgcttgcatggccaccctgactgttcatcccgtggacgtgctgagaacaaggtttgcggcgcagggagaacccaaagtgtataacactctacgacacgctgtaggcactatgtataggagtgagggcccacaggtgttctacaagggccttgcacccactctgatcgcaatctttccatacgccggactccagttctcctgctattctagtctgaaacacctctacaagtgggctattccggctgagggtaaaaaaaacgagaacttgcagaatctgctttgcgggagtggggctggcgtcatttccaaaactcttacctatccgctggacctcttcaaaaaaagactgcaagtgggcggtttcgaacacgctagggcagccttcgggcaggtgagacggtacaaaggtctcatggattgtgcaaaacaagtgttgcagaaggagggggccctggggtttttcaaaggcctgagtccctccctgctcaaggccgcactgtcaacaggttttatgtttttttcttacgaattcttctgcaatgtgtttcattgcatgaatcgtacagctagccagcgctag

SEQ ID NO: 135088 - DNA, 2028 bp, synthetic construct
  misc_feature 1..2028: note = Description of Artificial Sequence: Synthetic coding sequence
  source 1..2028: mol_type = other DNA
atggccgcagccaaggtggccctgacaaaacgcgcagacccagccgagcttaggactatcttcctcaaatatgccagtatcgagaagaatggcgagtttttcatgtcaccgaatgacttcgtcactcggtatctgaatattttcggcgaatcacagcccaaccctaagaccgttgagttgttatccggggtcgtggaccagaccaaagacggactcatcagctttcaggagttcgttgcgttcgaatctgtgctttgcgcaccagatgcattgtttatggtggcctttcagctgttcgataaagccggcaaaggggaagtgactttcgaagacgttaagcaggtgttcgggcagacaactattcatcagcatattccttttaactgggattctgaatttgtccaattgcacttcggcaaagaaaggaagcggcacttgacttatgcggaattcacacagttcctactagagatccaactggaacatgctaagcaggcgtttgtgcagcgggataacgctcgcacaggccgtgttacagccatcgatttccgtgatatcatggtgactatccggccacacgttcttaccccatttgtagaagagtgcctcgttgccgcagccggcggaactacctcccaccaggtgtctttttcgtactttaacgggttcaacagcctgctcaacaacatggagctgattagaaaaatctattcgacacttgcaggaacaagaaaagacgtcgaggtgacaaaggaagaatttgtcttggctgcccaaaagttcggccaagtaacaccaatggaagttgatatcctgttccaacttgctgatctttacgagccccgcgggagaatgaccttagccgatatcgaaagaattgccccattggaagaaggtaccttacccttcaacttggctgaggcccagcgccagaaagccagcggagacagtgccaggcctgtgcttctccaagtagccgagagcgcatataggttcgggcttggctcagtggcaggagccgtcggagccaccgcagtttatccaattgatttagttaaaactcgaatgcaaaaccagcgatctaccgggagcttcgtgggagaacttatgtacaagaactccttcgactgttttaagaaggttctgcgctacgagggattcttcggtctgtatcgaggcttgctccctcagctgcttggtgtagccccagagaaggcaattaagcttaccgtcaatgactttgttcgggataaattcatgcataaagacggtagcgttcccctggccgcagagattttggcaggcggttgcgccggtggttctcaggtgattttcactaacccactcgagatagtcaaaattaggctgcaagtagcaggagaaatcacaacaggaccccgcgtttctgccctttctgtggttcgggacttggggttcttcggtatttacaagggcgccaaggcctgctttctccgagacattccgttctcagcaatttacttcccgtgttatgcccatgttaaggcctccttcgctaatgaggacggacaagtgtccccaggcagtttgttactggccggagcgatagcaggaatgcccgcagcttccttggtgaccccagccgatgtcattaagacacgactgcaggtggcagcacgcgctggccagacgacttactcaggtgtaatcgattgtttcagaaaaattttgcgtgaagaaggccctaaggccctttggaaaggcgcaggagcacgcgtatttagatcttcaccccagttcggggtgacactcttgacctacgaactcttgcagaggtggttttatatcgactttgggggtgtcaagccaatgggatctgagcctgtgccaaaatcccggattaatttgcctgcccccaacccagaccacgtaggaggatacaagctggccgtggccacatttgccggaatcgaaaataaatttggcttatatctccccctgtttaaacccagcgtatctacttctaaagctattggcgggggcccctag

SEQ ID NO: 135089 - DNA, 2031 bp, synthetic construct
  misc_feature 1..2031: note = Description of Artificial Sequence: Synthetic coding sequence
  source 1..2031: mol_type = other DNA
atggccgctgctaaagtcgcattaacgaagcgcgcggatccagcagaacttagaaccatcttcctgaagtatgcctctatcgagaagaacggtgagttcttcatgtcccccaatgattttgtgactcggtatctgaacattttcggagagagtcagcccaaccctaagaccgttgagctgttgagtggagtcgtagaccagacaaaagacggcctgatctccttccaggagttcgttgcttttgagtccgtactttgtgcccccgacgctctgttcatggtcgctttccaactctttgacaaggcaggcaaaggcgaggtgacattcgaggatgtcaagcaggtttttggacagactacaattcatcagcatatccccttcaactgggactctgagtttgtccagcttcacttcggaaaggagcgaaaacggcatttaacttatgccgaatttacccagttcctgcttgaaatccagctagaacatgcaaagcaggccttcgtacagcgagataacgctagaactggccgtgtgactgccatcgactttcgggatattatggttacaatcagaccacacgtgctaacccctttcgtggaagaatgtctggtcgccgcagccggtgggaccactagccaccaggtctctttctcatatttcaacgggttcaacagtttactgaacaatatggaacttatccggaaaatatactcaacactagctggcacacgcaaggacgtagaggtaactaaagaggaatttgttcttgccgcgcagaaatttggacaggttacccctatggaggttgatatcttgttccagctggcggacctctatgagcctcgaggcagaatgacattagccgacatagagcgcattgcgccgctggaagaggggacactgccgttcaatcttgcggaggctcagcgccaacagaaggccagcggcgatagcgcgagacccgttttactccaggtggcagagtcagcatatcgattcggccttggatctgtggctggagcagtgggcgctactgccgtatacccgatcgacttggtcaagactcgcatgcagaatcaaaggagcactgggtcgtttgtgggcgagctaatgtacaaaaatagttttgattgcttcaagaaggtactgagatacgagggctttttcggcctctacagaggtctgctgccccagctgcttggagtcgcccccgaaaaggccattaaactaacagtgaacgacttcgtgcgggacaagtttatgcacaaagatggaagtgtgcctctcgcagcagaaattttggccgggggctgtgccggtggaagccaagtaatattcaccaaccctctggaaatagtgaagatcagactacaagtggcaggggagattactaccggcccccgcgtgagtgccctcagcgtggtccgggacctcgggtttttcggtatttataagggtgcaaaagcatgcttcctgagggatattcccttctctgccatttatttcccttgttatgcgcacgtgaaagcctccttcgccaacgaagacgggcaagtgagccccgggtcactcctgctggccggggccattgccgggatgccagcagccagcctggtgacccccgccgacgttatcaagacaaggttacaggtggccgccagggcagggcagacaacttacagcggggtgatcgattgcttccggaaaattctgagagaagagggacccaaagctctctggaaaggagcgggagcgagggtctttcggagcagcccccagttcggagtgactctcctgacatacgagctattgcagaggtggttctacatcgactttgggggtgttaagccaatgggctcagagccggttcctaaaagtaggatcaacctgcctgcccctaaccctgaccatgtgggcgggtacaaactggctgtggccactttcgctggaattgagaacaagttcggtctgtatctgcctttatttaaaccttccgtcagtacatctaaggctatcggggggggaccttag

SEQ ID NO: 135090 - DNA, 1704 bp, synthetic construct
  misc_feature 1..1704: note = Description of Artificial Sequence: Synthetic coding sequence
  source 1..1704: mol_type = other DNA
atggaggatgttaagcaggtattcggccagacgactatccatcagcatatcccttttaattgggatagcgaatttgttcagctacatttcgggaaggaacggaagcggcacttgacctacgcggagttcacccagttcctactggagattcagttggagcacgcgaaacaagcctttgtccaaagggacaatgcacgtaccggcagggtgacagccatagactttcgggacatcatggttacaatcaggccacacgttctcacgccctttgtagaagaatgtctggtcgcagctgccggtgggaccaccagccaccaagttagcttctcctacttcaatgggtttaattccctgctgaacaatatggagctaattcggaaaatatactcaacgctggcaggcacaagaaaggatgttgaggtgacgaaggaggaatttgttctcgcagcacagaagttcggacaggtgacacctatggaagtggacattctgttccagctagccgatctctatgaaccccgagggcgcatgacactagcggacatcgagcgcatcgcccccctggaagaaggaacccttccgtttaatctggccgaagcgcaacggcagaaggcaagcggggattcagcccgtcccgtcctgttacaggtagctgaatcagcataccgattcggcttaggtagcgtcgcaggtgccgtgggggctactgccgtttatccgattgacctggttaagacgagaatgcagaaccagcgatccactggatcctttgtcggggagctgatgtataagaattccttcgactgctttaaaaaagtgctgagatacgaaggtttttttggactgtacagaggcctcctcccacaacttttaggtgtcgcccctgagaaagccatcaaactgacggtcaacgattttgtgcgggataagttcatgcacaaggatggaagtgtgccgctggccgcagagatcctagccggggggtgcgcaggaggctcccaggtgatcttcaccaaccccctggagattgtcaaaatccggctgcaggtggccggggagataacgacaggtcctagggtgtcagcccttagcgtcgtccgggatctggggttttttggaatttataaaggggctaaagcatgctttctgagagatatccctttctctgcgatttatttcccttgttacgcgcatgtgaaggcttcgttcgccaacgaggacggtcaagtttcacctggtagcctgttactcgctggcgccatcgcaggcatgcccgccgcttccctggtgacgcctgcagatgtgattaagacaaggctgcaggtggcagcccgagccgggcagactacatacagtggcgtgatcgactgcttccggaagatcctccgggaggaaggtcccaaagccctctggaaaggtgcaggcgcccgagtatttaggagttcccctcagtttggcgtgaccctgctcacctatgaacttcttcagaggtggttctacatcgacttcggaggtgtaaaaccaatgggctccgaacctgtgccgaaaagcaggattaacttgccagcccctaacccagatcacgtggggggttacaagcttgctgtcgcgacatttgccggaatcgaaaataaattcggcctatacctacctctgttcaaaccctctgtaagcaccagcaaagccatcggtggtggtccttag

SEQ ID NO: 135091 - DNA, 561 bp, synthetic construct
  misc_feature 1..561: note = Description of Artificial Sequence: Synthetic coding sequence
  source 1..561: mol_type = other DNA
atgaagcacatgttagcggccagcgctggcgaagtggtggcttgcctcattagggtcccttcagaagtcgtgaaacagcgagcgcaggtgagtgcatctacgcgaaccttccagatttttagcaacattttatacgaagaagggattcagggactgtacagaggatataaatcaacagtgctccgtgagatcccttttagcctggtgcagttcccgctgtgggaatccctcaaggccctgtggtcttggagacaggatcacgtcgtggactcttggcaaagtgcagtctgcggcgctttcgccgggggattcgctgccgctgttacaacgcctctggacgttgccaagacacgcataacactggcaaaagcagggagcagcactgccgacggcaatgtgctatctgtcctgcacggtgtgtggcgcagccagggactggctggacttttcgcaggagtgttccctcggatggccgcaatcagcctcggcggatttattttcctgggcgcctacgacagaacccactcactgctgttggaagtgggtaggaagtctccttag

SEQ ID NO: 135092 - DNA, 825 bp, synthetic construct
  misc_feature 1..825: note = Description of Artificial Sequence: Synthetic coding sequence
  source 1..825: mol_type = other DNA
atggatcgaccagggttcgtggcagctttagtggccggtggcgtcgctggtgtaagcgtggatctgattctgttccccctggatactattaagactcgcctgcagtctccccaaggcttctcaaaggccggggggtttcacggcatttacgctggagtaccctctgccgctatcgggtccttccccaatgctgctgcttttttcattacgtacgagtacgtcaagtggttcctgcacgcagactcaagtagctacctaacgcctatgaagcacatgctggcagcctctgctggtgaagttgtggcgtgtttgatccgcgtaccctccgaggttgtgaagcagcgcgcccaggttagcgcttctaccagaaccttccagatatttagcaacatcctctatgaagaaggcatacaggggctgtaccgagggtacaagtcaacggtgctgcgcgagattcctttttccctggtccagttcccgctctgggaatcactcaaagccctttggtcttggagacaagaccacgtcgtcgactcctggcagtccgcagtgtgtggagccttcgctggaggctttgcagcagctgtgaccacccccctggacgttgcgaagacgcgtatcacactcgccaaagctggttcttccactgccgacggtaacgtcctcagcgtccttcacggtgtgtggagatcgcaggggcttgcaggcctttttgccggtgtgtttccccggatggccgctatcagtttggggggtttcatcttcctgggggcatatgatcgaactcatagtcttctcctcgaagtaggacgtaagagcccttag

SEQ ID NO: 135093 - DNA, 66 bp, synthetic construct
  misc_feature 1..66: note = Description of Artificial Sequence: Synthetic coding sequence
  source 1..66: mol_type = other DNA
atggatcggcctgggtttgtcgccgcacttgtcttactgcactttctgtcaccgatgaatatgtag

SEQ ID NO: 135094 - DNA, 477 bp, synthetic construct
  misc_feature 1..477: note = Description of Artificial Sequence: Synthetic coding sequence
  source 1..477: mol_type = other DNA
atggaggggaaaaggaagctggagggcaagcctctccggtttcgaggggtccaccacgcatttgcaaagattttggcagaaggaggcattcgcggcctttgggcggggtgggtccccaacatacagagggcggcactcgtcaatatgggtgacctgacaacctatgataccgtcaagcattacctggttcttaataccccattagaagacaacataatgacccacggcctgagttctctttgctctggtctagtcgcctccattctgggaacacctgctgacgttatcaagtctcgcatcatgaatcaaccccgggataaacaaggacgaggccttctgtacaaatccagcactgattgcctaattcaagcagtacagggtgagggctttatgtctctatacaaaggctttttacctagctggctcaggatggcagcagttatagtgaactccagccgatcacagctgaaggtttag

SEQ ID NO: 135095 - DNA, 972 bp, synthetic construct
  misc_feature 1..972: note = Description of Artificial Sequence: Synthetic coding sequence
  source 1..972: mol_type = other DNA
atgtccgttcctgaggaagaagaacggctgcttccactcacccagcgttggcctcgcgccagtaagtttttgctctccgggtgtgccgccacagttgctgaattagccacttttccactggatttaaccaagacccggctgcagatgcaaggtgaagcagccttggcacgtctgggagacggggctcgagaatccgcgccctaccgcggcatggtgcggacggcattgggcatcatcgaggaggaaggcttcctgaaactttggcagggggttaccccggctatctacaggcacgttgtgtactccgggggccggatggttacttatgagcatctgcgcgaggtggtctttggcaaatccgaagatgagcactaccctctgtggaagtccgttattggaggtatgatggctggtgtcattgggcagttcctcgcaaatcccaccgatttagtaaaggttcagatgcagatggaggggaagcggaagctcgagggaaagcctttgcgtttccgcggggtccaccatgcattcgccaaaatactggcggagggtgggatccggggactctgggcaggttgggtgccaaacattcagcgggctgctttggtcaacatgggggatcttacaacttacgacaccgtgaaacactatctggtgctgaatactccattagaggataatatcatgacacacggactcagcagcttatgttcagggctcgtcgcctccatcctgggtacccctgctgatgtgattaagagccgtataatgaaccagcccagggacaagcagggcaggggcctgctgtacaaaagctcaaccgactgtctgatccaagctgttcaaggggaaggattcatgagtctgtataagggctttttgccctcgtggctgcggatgacgccatggagtatggtattctggctgacatatgagaagatccgtgaaatgagtggcgtgagccccttctag

SEQ ID NO: 135096 - DNA, 738 bp, synthetic construct
  misc_feature 1..738: note = Description of Artificial Sequence: Synthetic coding sequence
  source 1..738: mol_type = other DNA
atgtctgtcccagaagaggaagaacgtttgctgccactgacccagcggtggccccgagccagcaaatttctcctgagcgggtgtgcagctacagtcgccgaactagcgacttttccgcttgaccttaccaaaacgcgtctccagatgcaaggtgaggccgcattggctcgattaggggacggggctcgagaaagcgctccgtataggggtatggttcggacggccctggggataatcgaggaggagggcttcctcaagctgtggcagggcgtaacgccagctatttataggcacgtagtgtacagcggggggaggatggttacttacgaacaccttagagaggtggtcttcggcaaatccgaggacgagcactacccactgtggaaatctgtgatcggcgggatgatggcaggagtcattgggcagtttctggctaatcctactgatttggtaaaagtccagatgcagatggagggaaaacgaaagctggaaggcaagcctctcagatttcggggagtgcatcacgctttcgccaagattctggctgagggagggatcagaggcctgtgggccgggtgggtgcctaatatccagagagcagccttggtgaatatgggggacttaacaacatatgataccgtaaaacactacttagtactgaatactccattagaagacaacatcatgacccatgggctgagctcagatctcgttggttctcacaaagctatccagtag

SEQ ID NO: 135097 - DNA, 297 bp, synthetic construct
  misc_feature 1..297: note = Description of Artificial Sequence: Synthetic coding sequence
  source 1..297: mol_type = other DNA
tagaacatgggtgacctgactacatacgacacagtaaaacactatctggtcttgaacacccctttagaagataacataatgacacacgggctgtcaagcctctgtagcgggctggtcgcttcgattcttggtacacccgctgatgtgattaagtcccgcataatgaaccagcccagggataagcagggcagaggtctgctatacaagtctagcaccgactgcctgatccaggctgtgcagggggaaggcttcatgtccttgtataagggtttcttaccgtcctggctccgtatgtag

SEQ ID NO: 135098 - DNA, 450 bp, synthetic construct
  misc_feature 1..450: note = Description of Artificial Sequence: Synthetic coding sequence
  source 1..450: mol_type = other DNA
atgtcggagtgccccctcattctttatattcataagcatatagacacttattctcagtcctacctgtttaatgacctgttctaccccgtgtatagtgggggcaggatggtcacttacgaacaccttcgggaggttgtgtttggaaagtccgaggatgaacactatcccctgtggaagtccgttataggaggcatgatggccggagtgattgggcagtttcttgccaatccaaccgacctggtgaaggttcaaatgcagatggagggaaagcggaagttagaaggtaagccacttaggttccggggcgtacaccatgcgtttgctaagatcttggcagagggggggatacgaggtctgtgggcaggatgggtccctaatattcaaagggccgcccttgttaacatgggtgatctcactacgtacgacaccgtcaagcactatctggtttag

SEQ ID NO: 135099 - DNA, 480 bp, synthetic construct
  misc_feature 1..480: note = Description of Artificial Sequence: Synthetic coding sequence
  source 1..480: mol_type = other DNA
taaatggagggcaagagaaagctggagggaaaaccacttcggttccgcggagtacatcacgcattcgccaaaattctagccgaaggcggaatcaggggactctgggccggctgggtgccgaatattcagagagccgccctggtcaatatgggtgacctgacaacttatgacacagtgaagcattacttggtgttgaacaccccactagaggataatattatgacccacggcctgagtagcctttgctccgggttggtggcttctatattgggcacccctgccgacgtgatcaagtcacgcatcatgaatcagcctcgggacaagcaaggacgtggactgttgtacaaatcaagcactgattgcctgatccaggcagtccagggcgagggcttcatgtccctatacaaagggtttctcccctcctggctgcgaatggcggccgtaattgtcaactcctctagatcacagctcaaagtctag

SEQ ID NO: 135100 - DNA, 714 bp, synthetic construct
  misc_feature 1..714: note = Description of Artificial Sequence: Synthetic coding sequence
  source 1..714: mol_type = other DNA
atgtacttgtatctgatgaagatgccagcagcctaccaggtttacagtgggggcaggatggttacgtatgagcatctccgggaggtggtgtttgggaaaagcgaggacgaacactaccctttgtggaagagcgttatcggcggaatgatggccggggtcatcggccagtttctggccaatcctacagatctagtgaaagtgcagatgcagatggagggtaagagaaagctagaaggcaagccattgaggttccgcggagttcatcacgcgtttgcaaagattctggcagaaggagggattagaggcctgtgggccggatgggtgcccaacatccagagggcagccttggtgaatatgggagacttgactacatatgacactgtgaagcattacctggtcctgaacacacccctcgaagacaatatcatgacccacgggctttcttcgctgtgcagtggactggtggcatcaatcctgggcacaccagctgacgtaatcaagagccggatcatgaatcagccaagagataaacaaggcaggggcctactgtacaaatcatccaccgactgcctgatccaagccgtgcagggagagggctttatgagcctgtacaagggcttcctcccctcttggttaaggatgacaccctggagtatggtattctggctgacctacgaaaaaatcagggagatgtccggagtcagcccattctag

SEQ ID NO: 135101 - DNA, 1095 bp, synthetic construct
  misc_feature 1..1095: note = Description of Artificial Sequence: Synthetic coding sequence
  source 1..1095: mol_type = other DNA
atggagctcgaggggagaggggccggaggtgtggcaggtggcccagccgctggacccgggcgctccccaggggagtctgccctactggacggttggctgcaaagaggagtcggccgtggcgcgggggggggcgaggcaggcgcctgccggcctccagtccggcaggatccagatagcggtcctgattacgaggctttgccagccggcgccacggtgaccacgcacatggtggctggcgccgtagccggtattctggaacactgcgtcatgtatccaatagactgcgtgaaaactcgcatgcagtccttgcaacccgatcccgcagctagataccggaacgtcctcgaagctctatggagaataattcgcacagaagggctttggcgaccaatgagaggcctgaatgtgacggccaccggggccggccctgcccatgccttgtatttcgcttgctacgaaaaattaaaaaaaaccctctctgatgtaatacaccccggggggaacagccacatcgctaacggggctgcaggctgcgtcgccacgctgttacatgacgcagccatgaatcccgccgaagtggtcaagcagaggatgcagatgtataattctccatatcaccgcgtgacggattgcgtgagggccgtctggcagaatgaaggcgctggtgctttctataggagctatactactcaattgaccatgaacgtccccttccaggccattcatttcatgacctatgagttccttcaggagcacttcaaccctcagcgccgctacaatccatcctcacatgtcctttctggagcctgcgctggggccgtggctgctgctgctaccaccccactggatgtgtgcaaaaccctgctcaatacccaagagtcccttgctttaaactcccatatcaccggtcatataacgggtatggcctccgcctttagaactgtgtaccaggtcggcggggtgacagcatactttcgaggagttcaggcaagagtgatctaccagattccttcaaccgcgattgcatggtctgtttacgaatttttcaaataccttattactaaaaggcaggaggagtggcgtgcagggaaatag

SEQ ID NO: 135102 - DNA, 678 bp, synthetic construct
  misc_feature 1..678: note = Description of Artificial Sequence: Synthetic coding sequence
  source 1..678: mol_type = other DNA
cggggcgccgctggatggtcacattgtcatcacgcacacggcggaaggcggcgggggcgggaccctggcgccttgcgcgatgtcccccataggctgcggcagggcgccgccggttgcgtagctacgttgttgcatgatgccgccatgaatccagcagaggtcgtgaaacagaggatgcaaatgtacaactctccttaccatcgggtgactgattgcgtccgggcagtgtggcagaacgaaggggcaggcgcattttatagatcatacactacacaactgacaatgaacgtaccgttccaagccattcacttcatgacttatgagttcctgcaggagcattttaacccgcaacgacgatataatccaagctcacatgtgttgtcgggcgcctgtgccggagccgtcgctgctgccgctacaacccccctagatgtttgcaaaaccttactcaacacacaggaatcgctggcactcaacagccatatcacaggccacatcactggcatggcaagtgcttttcgtactgtgtaccaggtcggcggagtgactgcttacttccggggggtgcaggcacgcgttatctaccaaatcccttccaccgctattgcctggtcagtgtacgagttcttcaaatatctcataactaagcggcaggaagagtggagggcgggcaaatag

SEQ ID NO: 135103 - DNA, 876 bp, synthetic construct
  misc_feature 1..876: note = Description of Artificial Sequence: Synthetic coding sequence
  source 1..876: mol_type = other DNA
atgtctgccttgaactggaaacccttcgtctacggagggctggccagtattacagcagagtgtggtacatttcctatcgacctgaccaaaacaagactccaaatccaaggtcagaccaatgacgcaaagtttaaggagatccgatatcggggaatgttacatgcattagtaagaatcggccgcgaggagggtctgaaggctctgtatagcgggatagcacccgccatgctgcggcaggcaagctacggaactattaaaattggaacctaccagtccctcaaaaggctgttcatcgaacgccccgaagacgagacgcttccaatcaacgtgatatgtgggatcttgtctggagtaatctcctctacaatcgccaatcctacggacgtgctgaagatccgtatgcaagcgcagagcaatacaatccagggcggtatgatcggcaactttatgaacatttaccagcaggagggaacacgagggttatggaagggcgtttccctcacagcccagagagctgccatagtggtgggcgtggagcttccagtttacgacattaccaagaaacacctgattctctccggactgatgggcgacaccgtttacacccacttcctcagctccttcacctgcggcctggcaggtgctttagctagcaatccagtcgacgtcgtgagaacaagaatgatgaatcagagggtgttgcgggatggtaggtgttcaggctacaccggaacattggattgtctccttcaaacctggaaaaacgaaggcttcttcgctctgtacaagggattctggccaaactggttacgcctaggtccctggaacattatcttctttgtcacctatgagcaactgaagaaactggatctttag

SEQ ID NO: 135104 - DNA, 651 bp, synthetic construct
  misc_feature 1..651: note = Description of Artificial Sequence: Synthetic coding sequence
  source 1..651: mol_type = other DNA
atgctaagacaagcttcctatgggacaataaaaatcgggacataccagtccctcaaacgactatttattgagcgacctgaggacgagaccctgccaattaatgtcatttgcggcatcctttctggagttatatctagcacgattgctaatcccacggacgtgctgaagattagaatgcaagcccagagcaatactatccagggtggaatgattggcaatttcatgaatatataccaacaagagggtactcgggggctgtggaagggtgtctctttaacagctcagagggccgctatcgtagtcggcgtagagcttcctgtgtacgacataaccaaaaagcatctgattctgtcgggcctcatgggggacacagtctacacccactttctgagttctttcacctgtgggcttgctggagccctggcatcaaatcctgtggacgttgtgaggacccgcatgatgaatcagagggtcttaagggatggacgttgttctggctacaccgggactttagattgcctgcttcaaacctggaagaatgaggggttttttgccttgtacaaaggcttctggcccaattggctccgactcggaccatggaatatcatttttttcgtgacttacgagcagctcaagaagctcgatctctag

SEQ ID NO: 135105 - DNA, 723 bp, synthetic construct
  misc_feature 1..723: note = Description of Artificial Sequence: Synthetic coding sequence
  source 1..723: mol_type = other DNA
atgctccatgcattagtcaggattgggcgggaggagggcctgaaggcactgtatagcggtatcgctcccgccatgttgaggcaagcgagttacggtacaataaagatcggtacctatcagtcccttaaaagactgtttatcgaacgcccggaagatgaaacattgcctattaacgtcatttgcggaattttgtctggcgttattagctcaactatcgcaaatcccaccgatgtccttaagatccgcatgcaggctcagagtaacaccatccagggagggatgatcggaaacttcatgaatatttatcagcaggagggcacccgtgggctatggaagggcgtgtccctcactgcacagagggcagccattgtcgtgggcgtggagctacccgtgtacgacattactaagaaacacctcatcctgagcggtctgatgggagatactgtgtatactcattttctctctagcttcacgtgcgggctggctggggcattagcatctaatccagttgatgtcgtgaggacgagaatgatgaaccagagggtgctgagggacggaagatgttctggctacaccggaacgctggactgcctcctccagacctggaagaatgaaggcttcttcgccctttacaagggtttctggcctaattggttgcgcctgggaccttggaacataatttttttcgtaacttatgagcagttgaagaagctggatctttag

SEQ ID NO: 135106 - DNA, 948 bp, synthetic construct
  misc_feature 1..948: note = Description of Artificial Sequence: Synthetic coding sequence
  source 1..948: mol_type = other DNA
atgacaggacaaggccagtccgcatcaggcagctccgcgtggagcacggtcttcagacatgtgcgatacgagaacctgattgccggagtcagtggtggggtgctaagtaaccttgcgctccaccccctggatttggtgaagattcgcttcgcagtgtctgatggcctggagctgcgccccaaatacaatggcattctccactgtctgacaactatctggaaactggacgggctgcgtggtctgtatcagggggtgaccccaaatatctggggcgccggcctgtcctggggcctttacttctttttctacaacgccataaagtcttataaaactgaaggaagggctgagcggcttgaggctactgagtatttggtctcagcagctgaagccggagccatgacgctgtgtatcacgaatccactgtgggtcaccaaaacccgcctgatgctgcagtatgatgcggttgtgaattctcctcacagacagtacaagggcatgttcgacacactggtgaaaatctataaatacgaaggagtaaggggtctgtacaaggggttcgtccctggcttgtttggtacaagccacggagcactgcagtttatggcctacgagctgctgaaactgaaatataaccagcacatcaatcggttacctgaggctcaactgagcacagtcgagtacatctccgtcgcagcccttagcaaaatctttgccgtcgctgctacttatccttatcaggtcgttcgcgccaggttacaggaccagcatatgttttactctggcgtaattgatgtaatcaccaaaacatggaggaaggaaggggtcggcggtttctacaaaggtattgcacccaacctgattagggttacccccgcttgttgcattacattcgttgtctacgagaatgtgtcccatttcttgctggacttacgcgagaaacgaaagtag

SEQ ID NO: 135107 - DNA, 900 bp, synthetic construct
  misc_feature 1..900: note = Description of Artificial Sequence: Synthetic coding sequence
  source 1..900: mol_type = other DNA
atgacaggccagggccagagcgccagcggatcttccgcctggagtggaggtgttctctctaacttagctctccacccactggacctggttaaaatccgatttgccgtaagcgatggtctggaattacggccaaagtataacggaatactgcactgtctcaccacgatttggaaattggacggtctgcgcgggctgtaccaaggcgtgacccccaatatctggggcgccggattgtcatggggcctctactttttcttctacaacgctatcaagtcctacaagacggaaggccgtgctgaacggttagaagctaccgagtacctcgtctcagcggcagaggccggggccatgaccctctgcattacaaatcctttatgggtaacgaaaaccagactaatgctgcagtatgatgccgtcgtcaactcacctcaccggcagtacaaaggaatgtttgacactctggtcaagatttataaatacgagggcgtacgcggactctacaagggatttgttccagggcttttcggcacaagtcatggtgctctgcagttcatggcctatgagctcttgaaactcaagtacaatcaacacatcaaccgcctcccagaagcacaactctccaccgtcgagtacatcagcgtagcagcattatcaaagatctttgcagtggccgcgacatatccataccaggtggtccgggcaaggttgcaggatcagcatatgttctactcgggcgtgatcgatgtcattacaaaaacctggcggaaggagggtgtcggaggcttctacaaagggattgccccgaatcttattcgcgtcacccctgcatgttgcatcacttttgtcgtctacgagaatgtgtcccactttctgcttgatctgcgcgaaaagaggaagtag

SEQ ID NO: 135108 - DNA, 552 bp, synthetic construct
  misc_feature 1..552: note = Description of Artificial Sequence: Synthetic coding sequence
  source 1..552: mol_type = other DNA
atgacactttgtattaccaatccactttgggtgacaaaaactaggctcatgctgcagtacgatgctgtcgtgaacagcccccacaggcaatataagggaatgtttgatacattggttaaaatctataagtatgagggggtcagagggctgtataaaggattcgtgccagggctgttcgggactagccacggcgcattgcagtttatggcttacgagctgttgaaactcaaatacaaccagcacattaaccgattgcctgaggctcaactctctaccgtggagtacatatctgttgctgctctttctaaaattttcgctgtcgcagctacatacccttatcaggtggtgcgagcaaggttacaagaccagcatatgttctactctggtgtgatcgacgtgataacaaaaacatggcggaaggaaggagttggcggtttttacaaaggtatagctccaaacttgattcgtgtgactcccgcatgctgcattacatttgtcgtctatgagaatgtgtctcattttttattggacttaagagaaaagcggaaatag

SEQ ID NO: 135109 - DNA, 966 bp, synthetic construct
  misc_feature 1..966: note = Description of Artificial Sequence: Synthetic coding sequence
  source 1..966: mol_type = other DNA
atggctacaggcgggcaacaaaaggagaacaccttgctgcacctcttcgctgggggctgcggcggaacggtcggggccatctttacctgtcctcttgaggtaatcaagacccggctgcaatcgagtcggctggctctgcggaccgtgtactatccgcaggtgcatctcggaacaatttctggagctggtatggtccggcccacgagcgtgacccccggcctattccaagttttgaagtccattctggagaaggaagggccaaagagtctgtttagaggacttggccccaatttggtcggggtggccccttccagggccgtctactttgcttgttatagcaaggccaaagaacaatttaatggtatcttcgtgcccaacagcaacatcgtgcacatcttctccgccggttccgcggcctttatcaccaactcccttatgaacccaatctggatggtgaagacccggatgcaattggagcagaaagtaaggggatctaaacagatgaataccttacaatgtgcccggtatgtgtatcagacagaggggattagaggtttctaccggggactcacagcatcgtatgccggaatctccgagaccattatttgtttcgcaatttatgagtccctgaagaaatacctgaaggaggccccattggccagctctgccaacggaacagaaaagaacagcacttccttcttcgggctgatggccgctgctgccctgtccaagggttgtgctagctgtatcgcttaccctcatgaggtgatccgcactcgcctcagggaagagggcactaagtacaaaagcttcgtgcagacagccaggcttgttttccgcgaggaaggatatctcgctttctacaggggcctattcgctcaactcatcaggcagattcccaatactgccatcgtgctctccacttacgagctgatcgtgtacctgctcgaggatcggacccagtag

SEQ ID NO: 135110 - DNA, 915 bp, synthetic construct
  misc_feature 1..915: note = Description of Artificial Sequence: Synthetic coding sequence
  source 1..915: mol_type = other DNA
atggaaactgtaccaccagcggttgatttggtgcttggggcctctgcatgctgcctggcttgcgtgttcacgaacccacttgaagtcgttaagacgcgccttcagttgcaaggcgagctgcaggcacgcggcacctaccccaggccttaccacggctttatcgcgtctgtcgctgccgtcgcaagggctgacgggctgtgggggttacaaaagggccttgctgctggtcttctctatcagggcttgatgaatggggtaagattttactgttattccttggcctgtcaagccggtctgactcagcaacctggggggaccgtggtagcaggggctgtggcgggggctttgggggcttttgttggtagccccgcgtacctaataaagacacagttacaggcccagacggtggccgctgtggccgttggacaccagcacaaccaccagaccgtgcttggcgccctagagacaatttggcgacagcagggcttgctcggcctatggcaaggcgtgggaggcgctgtgccacgagtgatggtgggctccgccgcccaactcgccacattcgcttccgcgaaggcgtgggtgcagaagcaacaatggttacccgaggattcgtggctggtcgctctggccgggggcatgattagctcaatcgccgtcgtggtggtcatgaccccctttgacgttgtatccacccggctttacaatcaacccgtggacacagctggcagaggacagttgtacgggggcctgactgattgcatggtcaagatctggcgacaggagggaccactcgctctgtataaggggctggggccagcttatctacgccttgggcctcacacgatcctctcaatgctgttctgggacgaacttcggaaactggccggacgcgcccaacataagggcacgtag

SEQ ID NO: 135111 - DNA, 888 bp, synthetic construct
  misc_feature 1..888: note = Description of Artificial Sequence: Synthetic coding sequence
  source 1..888: mol_type = other DNA
atggatttcctcatgagcggcctggccgcatgtggggcctgtgtattcaccaacccactcgaggttgtgaaaaccaggatgcagctgcaaggcgagttgcaggctcccggtacttatcaacgccattaccggaatgtgtttcacgcttttattacaattggaaaggtcgacgggcttgccgctctgcagaagggccttgcccccgcactgctgtatcagttccttatgaatgggatcaggcttggtacctacggactcgccgaggccggcggctacttgcacactgcagaaggcacacacagcccagcccgttccgctgcagccggagccatggctggtgttatgggcgcttatctgggttctccaatatatatggtgaaaacacacctacaggcccaagcagcctccgagatcgccgtaggccatcaatataagcaccagggaatgttccaagcgttgaccgagatcggccaaaagcacggattagtcggactgtggagaggcgccctaggcggattgccgcgggttatcgttggctccagcactcagctgtgcacatttagttcaaccaaagacctgctgtcacagtgggagatcttcccgcctcagagttggaagctggccctggtggcggcaatgatgtctgggattgctgtcgtactggctatggccccctttgacgtcgcgtgtacaaggctgtacaaccagccgactgacgcccaaggtaaaaaccgggttcccaagttttccgctacctcatgttctgcttcagcgccactgttaggaactaaagatgtgcgaatcgtaaaagggcagacaggccatcagctctttaaagttacgcaggcacctggctgctctccgatcctgctcggaacacaatcctag

SEQ ID NO: 135112 - DNA, 876 bp, synthetic construct
  misc_feature 1..876: note = Description of Artificial Sequence: Synthetic coding sequence
  source 1..876: mol_type = other DNA
atggattttcttatgtccgggttagccgcctgtggtgcctgtgttttcaccaaccctctagaggtggtcaaaacacgcatgcagctccagggcgagctgcaggcacctggaacctaccagaggcactaccgcaatgtattccacgcatttataacaatcgggaaagtggacggattagccgctttgcagaagggccttgcgccggccctgctctatcaattcctaatgaacggcataaggctagggacttatggactggccgaggctggcgggtatctgcacaccgcagagggtactcactctccagcaagaagcgcagcagctggagctatggctggcgttatgggtgcatacctaggatctccaatctatatggttaagacccatttgcaggcacaggcagcttctgagattgccgttggacaccagtataaacatcagggaatgttccaggctttaacggagatcgggcagaagcatgggttggtcggactatggaggggagcattgggtggtctgccccgggtgatcgtgggaagttctacacagctttgtactttcagctccacaaaagacctgctcagccaatgggagatattcccgccccagtcttggaagttggctctggtggcagctatgatgtctggcattgcagtagtgcttgccatggcccctttcgacgtcgcttgcacacggctgtacaaccaacccaccgacgcccaaggtaaaggtctgatgtatcgcggcattctggacgctctcctgcagactgccaggaccgaggggattttcggcatgtataaggagccatccccacaagtcctttctaatataatgcagtgcttctccgcttttaccggtgatcaaagatgttag

SEQ ID NO: 135113 - DNA, 915 bp, synthetic construct
  misc_feature 1..915: note = Description of Artificial Sequence: Synthetic coding sequence
  source 1..915: mol_type = other DNA
atgatccagaactctcgccctagcttacttcagccccaagacgttggggataccgtcgaaacgctaatgctgcatcccgtaataaaggcctttctgtgcggatctatctcggggacatgcagcaccctgctgttccagcctctagatctcctgaagacccgcctgcagacgttgcaacccagtgatcacggaagtcggcgggtgggaatgctggccgttctgctgaaggtggttcgcacagagtcattgctcgggctttggaagggtatgagcccttctatcgtgcgttgcgtgccgggtgtgggtatatatttcggaactttgtattctttgaagcagtatttcctcagagggcaccccccgactgcactcgagtcagtgatgctcggcgtgggttctcgtagcgtcgcaggtgtgtgcatgagccccattacagtgattaaaacaagatacgagtcggggaagtatggctatgaaagcatctatgcagccctaaggtctatctaccacagcgaggggcaccgggggcttttctctgggttgacagccactctgttgagggacgccccctttagtggaatttatctcatgttttacaatcagactaaaaacattgttcctcacgatcaggttgatgcaacactaatccccataacaaacttctcctgcgggattttcgccggcatcctggcctctctggttacccagcctgctgacgttatcaagacccacatgcagctgtaccccctgaaatttcaatggattggtcaggcagttactctgatcttcaaagattatggcctccggggttttttccaggggggcattccccgcgccctgcgtaggacccttatggcagcgatggcctggacagtttacgaggaaatgatggccaagatggggctaaagtcttag

SEQ ID NO: 135114 - DNA, 1671 bp, synthetic construct
  misc_feature 1..1671: note = Description of Artificial Sequence: Synthetic coding sequence
  source 1..1671: mol_type = other DNA
atgccaccagagcggcgcaggcgcatgaagctcgacagaagaacgggtgccaaaccaaagcgaaaacctggtatgagacctgactggaaagccggggctggccctggtggccccccacagaagcctgctcccagttctcagcggaagcctccagctcgtccttccgccgctgccgcagcaattgctgtagccgcggcagaggaggagcgcaggctaaggcagaggaatcggctacggttagaagaagataagcccgctgttgagcgctgtctggaagagctcgtattcggagatgtagagaatgatgaggacgccttgttacgtcgcctccgggggcccagggtccaggagcatgaggacagcggggactctgaggtggagaacgaagccaaaggcaatttccccccccagaagaaacctgtgtgggtcgacgaggaagatgaagacgaagagatggtggacatgatgaacaaccgatttcgcaaagatatgatgaaaaatgcttcagaatcaaaactgtccaaggacaacctcaaaaagaggttaaaggaggagtttcagcacgccatgggcggtgtcccagcatgggccgaaactaccaagcggaagacatcttctgacgatgagtccgaagaggacgaggacgacctgctgcagagaaccggcaactttatctccactagtacatcgctgccacggggaatcttaaagatgaaaaattgccagcacgccaacgctgagaggccaaccgtcgcccgcatatcatctgtgcagttccaccctggcgcccagatagttatggttgctgggttggacaatgcagtgtcgctcttccaggtggatggcaagacaaaccccaagattcaatccatctacctggagcgttttccaatctttaaggcttgctttagcgccaatggtgaagaggtcttggcaacgtccacacatagcaaggtgctctacgtgtacgacatgctggcaggcaaactgatacccgtgcaccaagtgaggggactcaaagaaaagattgtgcggtccttcgaagtgtcccccgatgggagctttctattgatcaacggaatcgccggttacctccacctgcttgctatgaaaacgaaggaattaatcgggagcatgaagataaacggtcgcgttgctgcttctacattctccagcgatagcaaaaaggtctatgcttcctccggagacggagaagtttatgtctgggacgtcaatagtcggaagtgtctcaacaggttcgtggatgaagggtcgttgtatggcctctccatcgcaacctccagaaatgggcagtatgtggcctgtggctcgaattgtggagtggtgaatatctacaaccaggacagttgcctccaagaaacaaaccccaaacccatcaaggccatcatgaacctcgtgacaggtgtgacttctctcaccttcaatcctactaccgagatcttggcaatcgcctctgagaaaatgaaagaagcagtgcggctagtacatctgccctcatgtaccgtgttctctaatttccccgtgataaagaataaaaatatctcacacgtccacaccatggactttagcccaagatctggctacttcgccctgggtaatgagaaaggcaaagctctgatgtacaggcttcatcattacagcgacttttag

SEQ ID NO: 135115 - DNA, 1080 bp, synthetic construct
  misc_feature 1..1080: note = Description of Artificial Sequence: Synthetic coding sequence
  source 1..1080: mol_type = other DNA
atggcagaccaggacccagccggcatcagtcctttgcagcagatggtggcaagtggaaccggcgccgtcgtcacatccttatttatgaccccactcgatgtggtcaaggtgagactccagtcccagagaccgtcaatggctagtgagttgatgccttcatcccgcctttggtccctgtcatatacgaaactgccgagcagtctccagtcaacaggcaagtgccttctgtattgtaacggagtactcgagccgctctacctgtgccctaacggagctcggtgcgccacctggtttcaggatccaacaaggtttaccggcaccatggatgctttcgtgaagatcgttcgccatgaggggacaaggacgctttggagtgggttgcccgccaccctggttatgactgtgccagctactgctatatactttacagcctacgatcagctcaaagcctttctgtgcggcagggccctcacaagtgacctgtatgcaccaatggtagctggcgccctggcaaggctggggaccgtcacagtgatttcacccttggagttgatgagaaccaagctgcaggctcagcatgtgagctatagggagcttggggcatgcgtgcgaactgccgtcgcccagggaggatggaggagcctctggcttgggtggggaccgacagctcttcgcgatgtaccattttctgcactctattggtttaactacgaactggtgaaaagttggcttaatgggttcaggccgaaggatcagacatctgtgggaatgtcgtttgtggctggaggcatatcagggacagtcgccgcagttcttactctgccgtttgacgttgttaagacacagcgccaggtggccctgggtgctatggaggccgtgcgtgtgaatccactgcacgttgattcaacatggctactcctgcgtcgtattcgcgccgagtctggtacaaagggtctgtttgctggctttttacctagaatcatcaaagccgctccttcctgcgccatcatgatttctacctacgagtttggtaagagcttttttcaacggctgaaccaggaccggctgctgggggggtag

SEQ ID NO: 135116 - DNA, 1011 bp, synthetic construct
  misc_feature 1..1011: note = Description of Artificial Sequence: Synthetic coding sequence
  source 1..1011: mol_type = other DNA
atggcggaccaggaccccgcagggatcagtcctttgcagcagatggtggcctccggcaccggagccgtcgttacatccctgttcatgacacccctggacgtggtgaaggtccgactacagagccagcgtcctagcatggcaagcggtaaatgtctgctgtactgtaatggcgtcctggaaccactgtacctgtgccctaatggagcaaggtgtgcaacctggttccaagacccaactcggttcacaggaacaatggacgcgtttgtcaagatagtgaggcacgagggtacgaggaccttgtggtccggcctgccagcaactttagtcatgactgttcctgctacagccatctatttcacggcctacgatcagctcaaggccttcctatgcggccgggcactaacttcagatctctacgctccaatggtcgccggagccttagcccggttgggcacagtgactgtgatcagcccactcgaactgatgcggacaaagctgcaggctcagcacgtgtcataccgcgagctcggcgcctgcgttcgtaccgccgtggcccagggaggctggaggtctctctggctgggttgggggcccaccgcactgagggacgtacccttctctgctttatattggttcaactacgaactggtgaaaagctggctgaatgggttccgtccaaaggaccaaacctcagtcgggatgtcgtttgtcgcaggcggcataagtggaactgtcgctgctgtcttaactttgccctttgatgtcgtcaagactcagagacaggtggccttgggtgcgatggaggctgtcagagtgaatcccctgcacgtcgatagcacatggctgctgctgcgacgcattcgcgccgagtctgggacgaagggactcttcgccggctttctgccccgtattatcaaagctgcaccaagttgtgctatcatgattagcacatatgaatttgggaagtcattctttcagcggctcaatcaagatcgcctgctgggaggatag

SEQ ID NO: 135117 - DNA, 1017 bp, synthetic construct
  misc_feature 1..1017: note = Description of Artificial Sequence: Synthetic coding sequence
  source 1..1017: mol_type = other DNA
atggaccccgaaacccgagggcaggagatcattaaggtcacgccgctgcagcagatgttggcatcttgtacaggcgctatcttgacatccgtaatcgtaacaccgctggacgtcgtcaagatccggctccaggctcagaataacccactgcctaaaggaaagtgtttcgtatattctaacggcttgatggaccacctatgcgtgtgcgaagaggggggaaataaactatggtacaagaagccaggaaacttccagggaactttagatgcgttttttaagataatcaggaatgaaggtattaaaagcctctggtccggcctgccgcctacactcgtgatggcagttccagctaccgtaatctactttacttgctacgaccaactttctgcgcttctcagatcaaagctgggggagaatgaaacttgtattcccatcgttgctggtatcgtggcgcgttttggagccgtgaccgttatctcacctctggaactcatcagaaccaaaatgcagtctaagaagttttcctacgtggagcttcatcgcttcgttagcaaaaaggtatcagaagatggatggatctccctctggagaggctgggctcccacggtgctgcgcgatgtgccttttagcgcaatgtactggtacaattatgagatcctgaagaaatggctttgcgagaaaagcggactttatgagcccacatttatgattaactttacttccggcgcactgtctggttctttcgcggccgtagcgacgctgccgtttgatgtggtgaaaactcagaaacaaactcagctgtggacttacgaatcacataagatcagcatgcccctgcacatgtctacatggatcatcatgaaaaacatagtggctaagaacgggttcagcggcctgttctctggcctgatcccaagattgattaagatagcacccgcctgcgccataatgattagtacgtacgagttcggaaaagcatttttccagaagcagaatgtcagacgtcaacagtactag

SEQ ID NO: 135118 - DNA, 1113 bp, synthetic construct
  misc_feature 1..1113: note = Description of Artificial Sequence: Synthetic coding sequence
  source 1..1113: mol_type = other DNA
atgggtgcccaaccaggcgagcctcagaacacctgcagtcggatacagacgctgttccgaagagtcaaaacattgctgattaaagccccacctcccccacaaccacccccccccccgccttcatggaaccctgggtgcacacacgtgtacggttacgcatttggccacatgcatgataacaacctggagcacctgcctagccagcaggtgcttgatacaggtgagcagctgatggtaccagtggaggtgctagaggtcgacaacaaggaagccttatggaaattcttattaagcggcgccatggctggcgcggtgagccgcacgggcacagcgccactcgaccgcgccaaagtttacatgcaggtgtattccagcaagactaacttcactaatctccttggcggattacaaagtatggtgcaggagggaggatttagaagtctgtggcgaggaaatggaatcaatgtcctaaaaattgcaccagagtacgccattaagttctccgtctttgagcaatgcaaaaactatttctgcgggatacaagggtcgccccccttccaagagaggctgctggcaggatctctggccgttgccatcagccagacactcatcaaccctatggaggtgcttaagactaggttgactttgcggcgtaccggacagtacaaaggtctgctcgattgcgcccgccagatacttcagagagagggcacaagagctctgtatcgcgggtatttgcctaatatgctgggcatcatcccatatgcctgtacagatctagcggtttacgagatgctgcagtgtttctgggtgaagagtggaagagatatgggagatcccagcggactggtctccctcagctccgtcaccctgtctacaacctgcgggcagatggcatcgtatccgctgactctggtacggactcgcatgcaggcccaggacaccgtggagggtagtaatccaactatgcgaggcgtcctccaaagaattctggctcaacagggctggttggggctgtaccgaggaatgaccccaacactgctcaaggtactacccgccgggggaatcagttatgtggtgtatgaggccatgaagaagacccttggtatctag

SEQ ID NO: 135119 - DNA, 729 bp, synthetic construct
  misc_feature 1..729: note = Description of Artificial Sequence: Synthetic coding sequence
  source 1..729: mol_type = other DNA
atgggtgcccagccaggcgaaccccagaatacatgttcccggatccagacacttttcaggagagtgaaaactcttctgatcaaagctccccccccgccccaaccacccccaccaccgccttcttggaacccgggatgcacccacgtgtatggatacgctttcggccacatgcatgacaacaatctggaacatctgccctcccagcaggtgttggataccggagagcagcttatggtgcccgttgaagtgctcgaagtggacaacaaagaggctctgtggaaattcctcctgtcgggggccatggccggcgccgtgtcgcggaccgggacagcgccgctggatagagccaaagtgtatatgcaactgctcggtaggcttaggcaggaaaatcggttaaacctgggtggcggcgggtgttctgaaccccggtcacctgacagaacacctgcctgggccaccgagagcaccccgcctagacggacttcacctacgtgctggggcggatatcgggcctggtctcggagggctgctagtgcaccttgcggtggagccaccgctagcacctgctcccgcctccttctttccatgcctagcagttccccttactctagctcagcgagaattactagcgttgagtacaagggcccacggccatcacggagcgtcagcttgttggctccctggctttggccttcaccgcgccctagctctacaccctggaggtgttag

SEQ ID NO: 135120 - DNA, 957 bp, synthetic construct
  misc_feature 1..957: note = Description of Artificial Sequence: Synthetic coding sequence
  source 1..957: mol_type = other DNA
atgggaaatggagtgaaagagggaccggtgcgactgcacgaagatgccgaggccgtgctgtcttcttctgtgtcctctaaacgggaccaccgacaagtcctcagcagtctcttatcaggagctcttgccggtgctttagcaaagacagctgtggcaccgctcgacaggacaaagattattttccaggtatctagcaaacgattcagcgctaaggaagcctttagggttctatactacacctacctaaacgaaggtttcttaagcctgtggcgaggcaactctgccacaatggttagggttgtgccttacgccgctatccagtttagcgctcacgaagaatacaagcgaatacttggatcgtactacgggttccgaggcgaggccttgccaccttggccacgattgtttgccggggccctggcgggcacaaccgccgcctccctcacctacccacttgatctggtccgagcccgaatggctgtcacaccaaaggagatgtattccaacatttttcacgtttttattcgcatttcccgggaggaggggttgaagacactttaccacgggttcatgcccaccgtgttaggagtcataccctatgcaggcctttcattcttcacctacgagaccctgaaaagcttgcaccgggaatacagtggcaggcggcagccttacccgttcgagagaatgatctttggggcttgcgccggacttattgggcagagcgcctcctaccctctggacgtcgtgcgtcgccggatgcaaactgccggggtcacaggatacccgcgggccagcattgcccggaccctccggacaattgtacgtgaagaaggggccgtgcgaggcctctacaaaggattgtctatgaattgggtgaaggggcccatcgcagtcggaataagttttactacattcgacctgatgcagattctgctccggcatctgcagtcatag

SEQ ID NO: 135121 - DNA, 1011 bp, synthetic construct
  misc_feature 1..1011: note = Description of Artificial Sequence: Synthetic coding sequence
  source 1..1011: mol_type = other DNA
atgtcagttttgttcttttacattatgaggtacaagcaaagtgaccctgagaacccagataatgatcgcttcgtgctggccaagattgccactaggaaagcgtgtggactggcacttgccaagctgggctatgcaaataaccgagtggtggttctcgacggagacacaaggtatagcactttttccgagatatttaacaaggagtacccagagcggtttatcgaatgctttatggccgaacaaaatatggttagcgtggctctcggttgcgcctctcgaggtcgtacaatcgcattcgctagtacgttcgcagccttcctaacccgggccttcgatcatataagaattggaggcctcgccgaaagcaacatcaatatcatcggaagtcactgcggtgtgagcgtgggagacgacggcgcgtcccagatggctctagaagacatcgctatgttcaggaccataccaaagtgtacaatcttctatccaaccgacgccgtgtctaccgagcacgccgttgcgttggcagccaatgcaaagggcatgtgtttcattagaacaacccgcccagagaccatggttatctacacgccccaggagcggtttgagattgggcaagctaaggtactccgtcactgtgtctccgataaggttacagtgatcggagccggaattactgtttacgaagcactggcagcagccgacgagctgtcaaagcaggacatttttattagggttatagacctgttcaccataaagccactggatgtcgctacaatcgtgtcgagcgcgaaagctacagaaggaaggatcataaccgtcgaggaccactatccacagggcggcatcggagaggccgtgtgtgcggcggtaagcatggatccagatattcaggtgcactcgctggccgtctccggggtgcctcagtccggcaagtctgaggagctgcttgacatgtatgggatctcggctcgacacattatcgtcgccgtcaagtgcatgctgctaaactag

SEQ ID NO: 135122 - DNA, 870 bp, synthetic construct
  misc_feature 1..870: note = Description of Artificial Sequence: Synthetic coding sequence
  source 1..870: mol_type = other DNA
atggctacctggcgccgcgacgggaggctgacaggaggtcaaagactgctttgtgcagggcttgcagggacattaagcttgtccctcacagcaccactggagctggctgcctacagaaaattcgtagttctgtttaccgacgatctcggacacatttcacagtggtcttcgatcatggcgggcagcctggccgggatggtgtctaccatagtgacatatccaacggacttaatcaaaacccgccttataatgcagaacatccttgaacctagttatagaggtctgctgcatgccttcagcaccatctaccaacaggaaggttttctagccttatataggggggtgagcctgaccgtcgtgggggcccttcctttctctgccggatccctcttggtctacatgaatctcgagaaaatctggaacggtcctagagatcagttttctttaccacagaacttcgccaacgtgtgccttgccgccgctgttacccagacactgtctttcccttttgaaaccgtcaaacgtaagatgcaggcccagtcaccctatctcccacacagcggaggagttgatgttcacttttccggcgcagtggactgcttcagacagatcgttaaagcacaaggcgtgttgggtctgtggaacggactcaccgctaatctgcttaagattgtgccctatttcggaatcatgttctctactttcgagttctgtaaacgtatctgcctgtaccagaacggatatatcttgtccccccttagctacaagttgacaccaggcgtggatcagtccttgcagccccaggagcttcgcgaactgaagaaattctttaaaacgcgcaaacccaaacccaaaaagcccaccctgtag

SEQ ID NO: 135123 - DNA, 681 bp, synthetic construct
  misc_feature 1..681: note = Description of Artificial Sequence: Synthetic coding sequence
  source 1..681: mol_type = other DNA
atggccacctggaggcgagacggccgattgacaggcggacaaagactgctgtgtgccggcctcgccggaaccctctctcttagcctgacagcccctcttgagttggcgacagttctagcccaggtgggcgtggtaaggggccacgcccgtggcccatgggccactgggcaccgcgtttggagagcagaaggtctgcgggccctgtggaagggtaatgcagtggcgtgtctccggttatttccttgttcagctgtgcagctggccgcctaccgtaaattcgttgtgctttttacagacgatctgggccatatctcccagtggtctagtataatggcaggcagcctcgccggtatggtgtctacaatagtcacttacccaactgacctgatcaagacacgccttatcatgcagaacattttagagccctcataccgcgggttgctgcatgccttctcaactatatatcagcaggagggctttctcgccctgtatcgaggtgtcagccttaccgtcgtgggctcagaacctctcccccccacccagtggaggtcacggtgccccttcctcagaagctcgggattactgcccgccgattccgagggcccgggtggccccggcgcattagaatggattgatagccagtttacggaggactcaagtattttctggaattacgtgtag

SEQ ID NO: 135124 - DNA, 945 bp, synthetic construct
  misc_feature 1..945: note = Description of Artificial Sequence: Synthetic coding sequence
  source 1..945: mol_type = other DNA
atggaagacaaacgcaacatccagattattgagtgggaacaccttgataaaaaaaaattttatgttttcggcgtggctatgacaatgatgattcgcgtgtctgtgtatccctttaccctgataaggactcgccttcaagttcagaaggggaaatcactctatcacggcactttcgatgcgttcattaaaatcctcagggccgatggtatcactggtctgtaccggggctttttggtaaatacttttactctcatttctggacaatgctacgttacgacttacgagttgactcggaaatttgtggctgactactcacagtctaatactgtcaaatcgctggtggccggcggaagcgcgtccctcgtcgctcagtccataaccgttcccattgatgtggtctcgcagcacctaatgatgcagcggaagggcgagaagatggggcgtttccaggttaggggaaaccccgagggccagggggtcgttgctttcggccagacaaaggatatcattcgacaaatccttcaggcagacggcctgcggggcttttaccgcggatacgtagctagcctcctgacttacatccccaattccgcggtatggtggccattttaccacttctacgccgagcaactttcctatctctgtcccaaggagtgcccacatatcgtgtttcaggcagtgtctggaccacttgctgcggccacagcctctattctgaccaaccctatggacgttattcgaacacgtgtccaggtcgagggaaagaattctattatacttacatttaggcagctgatggcagaagagggtccttggggcctgatgaaaggattgagcgcacggataatctccgccactccatctaccattgttatcgtagtaggatacgagtctctgaaaaagctgagcttgagacccgaactagtagattcgaggcattggtag

SEQ ID NO: 135125 - DNA, 489 bp, synthetic construct
  misc_feature 1..489: note = Description of Artificial Sequence: Synthetic coding sequence
  source 1..489: mol_type = other DNA
atggaagataagcggaacatacagattatcgaatgggaacatctggacaaaaagaagttctatgtctttggagtggcaatgaccatgatgatccgcgtcagtgtgtacccatttactttgatccgcaccaggttgcaggtgcaaaaagggaaatctctttatcatggaacttttgatgccttcattaagattctcagggctgacggtattaccgggctgtataggggtttccttgtgaatacctttacactcatctccggccagtgttatgtgacaacttatgaactgacgcgcaagttcgtggcggactatagccagtccaacacagtaaagagcctcatggcggaggaaggtccctggggtctgatgaaggggttaagcgccaggatcatatccgccacaccctcgaccatcgtgatagtcgttggatatgaatctctcaaaaagctgagcctgaggcctgagctcgttgatagtcggcactggtag

SEQ ID NO: 135126 - DNA, 876 bp, synthetic construct
  misc_feature 1..876: note = Description of Artificial Sequence: Synthetic coding sequence
  source 1..876: mol_type = other DNA
atggaggacaaacggaatattcagatcatcgagtgggagcacttagacaaaaagaagttctatgtgttcggcgtagctatgactatgatgataagagttagcgtttaccccttcacactgatccgcacaaggttgcaagttcagaagggcaaaagcctgtaccatggcacatttgacgcctttattaaaattctgcgggccgatggcataacaggactgtaccggggttttctggtcaacacatttaccctgataagtggccagtgttatgtcacgacctacgagctgacccggaagttcgtggccgactactcccagagcaatacagtcaaaagcttggttgccggaggatccgcttccctggtcgcccagtcaataaccgtgcgggggaatcccgaagggcaaggggtggtggcatttggacagactaaagacatcataaggcagatcctgcaggccgacgggctccgcggcttttacagaggctatgttgcgtctcttcttacctatatcccgaactctgccgtgtggtggcctttctaccatttctacgctgagcagctaagttatctctgccccaaggagtgtccccatatcgtttttcaggccgttagcggcccgttggccgccgctacagccagtatcttaaccaaccccatggacgttatacggaccagagtacaggtggaggggaaaaatagcatcatcctgactttccgccagctgatggccgaggagggaccatgggggctgatgaagggattgtcagctcgcattatctccgccacccctagcactattgtgatcgttgtgggctatgagtcactgaagaagttgtctctacggcccgagctggtagatagcaggcactggtag

SEQ ID NO: 135127 - DNA, 741 bp, synthetic construct
  misc_feature 1..741: note = Description of Artificial Sequence: Synthetic coding sequence
  source 1..741: mol_type = other DNA
atggtcaagatctatagacatgagagcctattgggcttcttcaaggggatgtctttcccgatcgcctccatcgctgtggttaattccgtgctctttggcgtatactccaacacactgttggtactcaccgctacttcccaccaggagcgacgcgcgcagcctccatcatacatgcatatctttttagccggctgcaccggcggcttcttacaggcctattgcctagccccttttgaccttatcaaggttcggcttcagaatcaaactgagccaagggctcagccaggttctcctcctccgagataccagggtccagtccactgcgccgcaagtatcttccgtgaggagggaccgcggggcttattcaggggggcttgggcactgaccctgcgcgacacccctaccgtaggaatatacttcattacctacgagggtctctgccgtcaatatacgccagaaggccaaaatccaagcagcgcgacagtgctggtcgccggaggcttcgccggaatcgcaagctgggtcgctgccactccactggacatgattaagagtcgtatgcagatggacggcctgcgccggcgcgtgtatcagggaatgctcgattgtatggtctcttctataagacaggagggtctgggggttttttttagaggcgtgactattaattcagcaagagctttcccggtcaacgctgtgaccttcctgtcctacgaatatctgctccgttggtggggttag

SEQ ID NO: 135128 - DNA, 795 bp, synthetic construct
  misc_feature 1..795: note = Description of Artificial Sequence: Synthetic coding sequence
  source 1..795: mol_type = other DNA
atgcctgtggaggagtttgttgcaggatggatctccggagccctggggcttgtcctggggcacccttttgacaccgtgaagctgcttggatttttcaaaggaatgagttttcccatagcttccatcgccgtcgtgaatagcgttctgtttggggtctatagtaatacgttgttggttctgaccgccacctcacaccaggaaaggcgtgcccagcccccatcttatatgcatattttcctggcagggtgcaccggaggcttcctgcaagcctactgcttggccccctttgacctgatcaaagtgcgcctccaaaaccaaacggagcctagggcccagcccggttcccctccacctcgataccaaggccccgtgcattgtgccgcctccatcttcagggaggaagggccacggggtctgttccggggtgcatgggccttgacccttcgtgacacaccaacagttggaatctactttatcacctatgagggcctttgtcgacagtatacacctgagggacagaatccctcctcagctacagtcctagtcgcagggggattcgctggcattgccagttgggtggccgcaactcccttggacatgatcaaatccaggatgcagatggacggcctgcggcggagggtctatcaaggcatgcttgactgtatggtgtcctccattcggcaagaggggcttggggttttttttcggggggtaacaatcaacagcgcacgggcctttccagtcaatgcggtcaccttcctgtcctacgagtatctattgagatggtggggctag

SEQ ID NO: 135129 - DNA, 555 bp, synthetic construct
  misc_feature 1..555: note = Description of Artificial Sequence: Synthetic coding sequence
  source 1..555: mol_type = other DNA
atggtgaaaatctaccggcatgaatctgcctactgtctggcccccttcgacctgatcaaagtgagactacagaaccaaacggagccaagagctcagccggggtccccacccccacggtatcagggacctgtccactgtgcagctagcatatttagagaagaaggcccaaggggcctcttccgcggcgcttgggcgctcaccctacgcgacacacccaccgtggggatatactttatcacatacgaagggctttgccgacagtacacacctgaaggccagaatccctcctccgccactgttctcgtggccggcggctttgccggtattgcgtcctgggtggctgccactcccctcgatatgattaagtcaagaatgcagatggacgggttacgccgaagagtgtaccagggtatgctggattgcatggtgtcctctattcggcaggaggggctgggcgtatttttcaggggtgtaacaattaactcggcccgcgcctttcctgtcaatgcagtgactttcttaagttacgaatacctgctcaggtggtgggggtag

SEQ ID NO: 135130 - DNA, 867 bp, synthetic construct
  misc_feature 1..867: note = Description of Artificial Sequence: Synthetic coding sequence
  source 1..867: mol_type = other DNA
atgcctgtggaggagttcgtcgccggatggatcagtggggccctgggcctggtcctggggcatccttttgacacagtaaaggtcaggctccagacacaaaccacatatcgtggaattgtagattgtatggtgaaaatttaccgtcacgagagtcttctcggtttctttaagggaatgagttttcccatcgccagtattgctgtcgtaaattcagtcctttttggcgtgtattccaacacactcctcgttctgaccgccacctcgcaccaggaacggcgggcccagcccccgtcttatatgcacattttcctggcgggatgcaccggaggttttcttcaagcctactgcctggctccattcgacttaatcaaagttcgtttacaaaatcagactgagccaagagctcaaccaggaagccctcccccaaggtaccaagggccagttcattgcgccgcaagtatttttcgcgaagaaggacctagaggcctgttccgaggggcttgggcactcacactcagggatacaccaactgtcgggatttacttcatcacttatgaggggttatgtcgccagtacaccccagaggggcagaacccttcttctgctactgtgctcgtggctgggggttttgccggtatagcatcatgggtggccgctaccccactggatatgatcaagtcacgcatgcagatggatggcctgcggcggcgggtttaccagggtatgctcgactgtatggtcagctctatccggcaagaagggctgggcgtgttctttagaggtgtgaccataaattctgctagagcctttccagttaacgctgtgacctttctgtcctatgagtatctactgaggtggtggggctag

SEQ ID NO: 135131 - DNA, 741 bp, synthetic construct
  misc_feature 1..741: note = Description of Artificial Sequence: Synthetic coding sequence
  source 1..741: mol_type = other DNA
atggtgaagatctaccgacacgaaagcctgcttggattcttcaagggaatgtcatttccaatcgcctcaattgcggtggtgaactctgtgctttttggagtgtattccaatactttgctcgttttaacggcgactagccatcaagaaagaagggctcagccgccctcctatatgcacatctttctagccggatgcacaggcggctttctccaggcttattgtctcgccccttttgatctcatcaaagtaaggctgcagaaccagacagagccgcgcgcccagccgggaagtcctccaccccgatatcaggggcctgtgcattgcgccgcatccattttccgggaggaggggcctcgcgggctgtttagaggcgcgtgggccctcaccttaagggacacaccgaccgttgggatctatttcataacttacgaggggctttgccggcagtacaccccagagggacagaatcccagcagcgctactgtcctggtggcagggggctttgccggcatcgcgtcttgggtggctgcgacccccttggacatgatcaagtctagaatgcagatggacggcctgaggaggagggtttatcaaggcatgcttgactgtatggtgagctccatcaggcaagagggcctgggggtgttctttagaggcgtcactatcaatagtgcaagggccttccctgtaaacgccgtgaccttcctctcctatgagtatctcctccgctggtgggggtag

SEQ ID NO: 135132 - DNA, 867 bp, synthetic construct
  misc_feature 1..867: note = Description of Artificial Sequence: Synthetic coding sequence
  source 1..867: mol_type = other DNA
atgccagtggaggagtttgtcgcgggctggattagtggagctctgggtctggtgctgggccatccttttgacaccgtcaaggtgaggctgcaaactcagactacatatcgcggcatagtggactgtatggtcaaaatctacagacatgagtccctgttgggattctttaaggggatgtcgttcccaattgcttccatcgctgttgtgaatagcgtcctcttcggagtctacagtaatacccttttggttctgaccgccacctcgcaccaggagagacgcgcccaacccccttcctatatgcatatatttctggcaggttgtaccggcggttttctacaagcttactgtttagcaccctttgacctgattaaggtccgactgcagaatcagaccgagccgagggcacagcctgggtcaccccccccacggtatcagggaccagtacattgtgcagcctcaatctttcgagaggaggggccacggggattatttcgaggggcatgggccttgacattgcgagatactccaacagttggcatctatttcataacatacgagggcctttgccgccagtacactccagaaggacaaaatccgtctagcgcgaccgtacttgttgcaggaggctttgctgggatcgcctcgtgggtggccgcaaccccacttgacatgatcaagtcccgaatgcagatggatgggttgagaaggagggtctaccagggcatgctggactgcatggtctcaagtattcggcaagaaggcttgggcgtattctttcgcggggtgacaattaacagcgccagggcgttcccagtgaatgcagtcactttcctgtcttatgagtacctattgcgctggtggggatag

SEQ ID NO: 135133 - DNA, 357 bp, synthetic construct
  misc_feature 1..357: note = Description of Artificial Sequence: Synthetic coding sequence
  source 1..357: mol_type = other DNA
atgcctgtagaggaattcgtcgcaggctggatatctggagcgttgggcctcgtgttgggtcatccgttcgacaccgtgaaagtgcggttacagacgcaaacaacttatcgaggcattgtggactgcatggtaaaaatttatcgtcatgagtcattgctgggattctttaagggtatgtccttccccattgcaagtatcgcagtggttaactccgtgctgttcggagtgtattcaaatacactactggttctgaccgcgacgtcgcatcaagaaagacgggcacaacctccctcgtatatgcacatcttcctggccggttgtacaggaggctttttgcaagcttactgcctggcgtag

SEQ ID NO: 135134 - DNA, 1257 bp, synthetic construct
  misc_feature 1..1257: note = Description of Artificial Sequence: Synthetic coding sequence
  source 1..1257: mol_type = other DNA
atgcacccccgcagaccagatggctttgacggcttgggctaccgcgggggcgcgagagacgagcaaggttttggcggcgctttcccggctcggtccttttccactggttctgacctcggacactgggtgaccacgcccccggacatccccggatccaggaacctgcattggggggagaagtcacctccatacggcgtacccaccacttcaaccccttacgaaggcccaaccgaggagcctttcagcagtggcggtgggggaagcgttcagggtcaaagcagcgagcaactaaataggtttgctggttttggaattggactggcatcactcttcactgagaacgtactagcgcatccatgcatagtgctcagacgacagtgccaggtaaattatcatgcccagcactaccacttgacacccttcacagtgatcaacatcatgtacagctttaacaagactcaaggccctcgcgccctgtggaaaggcatgggatctacgttcattgtccaaggcgtaacactcggagcagaaggtatcatctcagaattcaccccactaccccgcgaggtcttgcacaagtggtcaccgaaacagatcggcgagcacctgctgctcaagagcctgacttatgtcgtggcaatgccattttacagcgcctctctcattgaaacggtgcagtctgaaatcattcgagacaacaccggcattctcgaatgtgtcaaggaaggcatcgggagggtgatcggcatgggggtgcctcatagcaagagattgctgcctctcttgtccttaatatttcctacagttctccatggcgttcttcactatatcatcagcagtgtcattcagaagttcgtgcttttgattctcaagcgcaagacatacaattcccacctggccgagtcgacatcccctgttcagtctatgttagacgcatactttcctgagttaatcgcaaacttcgctgcctcactgtgttccgatgtgatcttgtacccacttgagacggtcctccaccgcctgcatattcaggggacgagaaccatcatcgacaatactgatttgggttacgaagttttgcctatcaatacccagtacgaagggatgagagattgtatcaatactattcgccaggaggaaggcgtgttcggtttctataaggggttcggtgccgttatcatccagtataccctgcacgctgccgtgttacaaataacgaagatcatatacagcacactgctgcaaaataacatttag

SEQ ID NO: 135135 - DNA, 1014 bp, synthetic construct
  misc_feature 1..1014: note = Description of Artificial Sequence: Synthetic coding sequence
  source 1..1014: mol_type = other DNA
atgcatccacgccggccggatggcttcgatgggctggggtacaggggtggcgccagagacgaacaagggtttgggggcgcctttcctgcacgatctttctctactggctctgacttgggacactgggtgactacaccacccgatatccccggctcccggaacttacattggggagaaaaaagtcccccctacggtgtgcccaccacttcaactccctacgaaggtcctactgaagagcccttcagcagcggtggtgggggatccgttcagggccaaagctccgaacaactgaacagattcgcaggttttggcattggtctcgcaagtctctttaccgagaatgttctggcgcacccatgtatcgtgttgcggcgacaatgccaggtgaactaccatgctcaacactatcatctcacgccattcactgtcatcaacattatgtactcttttaacaaaacccaaggacccagggcactgtggaagggcatggggagtacatttatcgttcagggagtgacacttggggctgagggcatcatctcagagttcaccccactcccccgggaggtcttgcacaagtggagtccaaagcagattggtgaacatctactgttgaagagcctcacttacgttgtcgcaatgccattttatagcgcctcactgatagagaccgtgcaaagcatgttggacgcctatttccctgagctgatagctaatttcgctgcctccctttgctctgatgtcatactgtatccactcgaaaccgtcctccatagattgcacatacaaggtaccagaaccattatcgacaacacagatttagggtatgaggtactaccgataaatacccagtacgagggcatgcgcgattgcattaataccattcgccaggaggagggtgtctttggcttctataaaggattcggtgctgtgatcattcagtacactctgcatgccgcggtgctccagattaccaaaattatctacagtactctgctgcaaaacaatatttag

SEQ ID NO: 135136 - DNA, 819 bp, synthetic construct
  misc_feature 1..819: note = Description of Artificial Sequence: Synthetic coding sequence
  source 1..819: mol_type = other DNA
atgtattcgtttaataagacacagggccctagggccttatggaaaggcatgggctcaacatttatagtccaaggggttacactgggtgctgaggggataatcagcgaattcacccccctgccgcgggaggtattacacaagtggagtcctaagcagattggagagcacctcctgttaaaaagtctgacctacgtggtggcaatgccattctactctgcaagccttatagagactgttcagtctgaaattattcgcgacaacacaggcattctcgagtgcgtcaaggaaggcattggacgggtcatcggcatgggcgtgccacacagcaagagattactccccttactgtcacttatcttccctacggtcctgcacggtgtgctgcactatattattagctccgtcatccagaagtttgtgctgttaattctgaagaggaagacctacaactcccacctagccgaaagtacctcacctgtgcagtctatgttagacgcgtatttccccgaattaattgctaacttcgccgcgagtttatgctctgatgtgattctgtatcctttagaaacagtcctccatagactacacattcaaggtacccgcaccatcattgacaatacagatctgggctacgaagtcctccccattaacacccagtacgagggcatgagggattgcatcaacaccatccggcaggaagaaggcgtctttgggttctataaagggttcggagctgttattatccagtacacattgcacgctgcggtgttgcagataactaaaatcatctacagtaccctgcttcaaaataatatttag

SEQ ID NO: 135137 - DNA, 618 bp, synthetic construct
  misc_feature 1..618: note = Description of Artificial Sequence: Synthetic coding sequence
  source 1..618: mol_type = other DNA
atgccattctacagtgcctccttgatcgagaccgtgcaatcggagattatccgggataacaccgggatcttagagtgcgtgaaggagggaattggacgagttatcggcatgggagtaccccattctaaaaggttgcttcccctgctctccctgatctttccaacggtcctccacggggtgctgcactatattatttcatcggtgattcagaagttcgtattactgatcctgaaaaggaagacatataactcccacctggccgaaagtacaagtccagtccaatcaatgctggatgcttacttcccagagttgatcgcgaatttcgcggccagtctgtgtagtgacgtgatactatatccactggagacggtgctgcatcgtctgcatattcaaggaaccagaacaatcatcgacaatactgacctcggctatgaagtgctgcctatcaacacccagtatgagggtatgcgagattgcataaacaccatccgtcaggaggagggcgtcttcggtttctacaagggctttggagctgtgatcatacagtacacattacacgccgctgtcctccagattaccaagatcatctattccaccctgctgcaaaacaacatatag

SEQ ID NO: 135138 - DNA, 984 bp, synthetic construct
  misc_feature 1..984: note = Description of Artificial Sequence: Synthetic coding sequence
  source 1..984: mol_type = other DNA
atgaagaccgagcagctcaatcgcttcgcaggctttgggatcggactcgcttccttgttcactgaaaatgtcctcgcccacccctgtatcgtgctgagaaggcagtgccaggttaactaccatgcccagcactatcacctgactccttttacagtgattaatatcatgtatagttttaacaagacgcagggacccagagccttgtggaagggcatgggatcaaccttcattgtccagggggtgacgctgggcgccgaaggcatcataagtgaattcaccccactgccgcgggaggtactacacaagtggagccccaaacaaataggagaacatttactgctgaagtctctgacgtatgtggtggcgatgcctttttattcagccagcttgattgagactgttcagtcggaaattatccgggacaataccggcatcttggagtgcgtgaaagaggggatcgggagagtcatcgggatgggcgtgccccattcaaaacggctccttcccttgctgtcgctgatcttccctaccgtgctccatggggtcctgcactatataatttcttcagtcatccagaaatttgtcctcttgattctgaaaaggaagacttacaactctcacctcgccgaatcaacatccccagttcagagcatgttggatgcctatttccccgaactcatagccaacttcgctgcctctctgtgctctgacgtcatcctttaccccctggagactgtgctgcaccggctgcatattcaggggacaagaacaataattgacaatactgatctcggttatgaagtgttgcccatcaatacccagtacgaaggcatgcgggattgcataaacacaatccgccaggaagagggcgtcttcgggttttacaagggattcggagcagtaatcattcaatacactctccacgcagccgtgctccagattacgaaaatcatttactccacactgcttcagaataacatctag

SEQ ID NO: 135139 - DNA, 771 bp, synthetic construct
  misc_feature 1..771: note = Description of Artificial Sequence: Synthetic coding sequence
  source 1..771: mol_type = other DNA
atggggtccactttcattgttcagggtgtaacattaggggccgaaggaatcattagcgagttcaccccactgcctagagaggttcttcataagtggtcacccaagcagattggagagcacctattgctgaaatcattgacctacgttgtagccatgcctttctactcagcatcactgattgagacggtgcagagcgagatcatacgggacaacactggcatcctggaatgcgtcaaagagggcatcggcagggtgatcggtatgggtgtgcctcattccaagcgccttcttcccctgttgagcttgattttccctactgtactccacggcgtactgcattatataatttcgagtgttatccagaaatttgtcctgctgatactgaagcgtaaaacatacaattcacacctagccgaatccaccagtcctgtccaatcgatgttagacgcttatttccccgagctgatcgcaaacttcgctgcatctttgtgttcggacgtgatcttgtatcccctggagacagtgttacaccgcttgcatatccagggcacacggaccattatagacaatacagatctggggtatgaggttctgccgatcaacactcagtatgagggcatgagagattgtattaatactattagacaggaagagggggtgtttggcttttataagggctttggagcagtaatcatccagtatacccttcatgcagctgtgctacagatcacgaagatcatttattctaccttgcttcagaacaacatctag

SEQ ID NO: 135140 - DNA, 819 bp, synthetic construct
  misc_feature 1..819: note = Description of Artificial Sequence: Synthetic coding sequence
  source 1..819: mol_type = other DNA
atgtattcgtttaacaaaacccaaggtccacgcgcgctgtggaaggggatggggtccacttttatcgtccagggagtgacgcttggtgctgaaggcatcattagcgaatttaccccattgccgagagaagtgcttcataagtggagccccaagcagatcggcgaacacctgctcctgaaatccctgacttacgtggtggcaatgccgttctactccgcctccttgatagagaccgtccagtcagaaatcattcgagataacactggcattctggaatgcgtaaaagaggggatcggccgcgtgattggcatgggagtgccacattcgaagcgactgttgcccctcttgtcactcatctttccaaccgtactccatggggtgctacactacattatttcctcagtgattcagaaatttgtacttctgattttaaagcgcaagacctacaacagccacttagctgagagcacttcacccgtgcagagcatgctcgacgcctactttccagagcttatcgctaacttcgctgcatcactgtgctcagatgtaatcctgtatcccctggaaacagtgctgcatcgtctgcatatccaggggacgaggactattattgacaatactgatttaggctacgaggtgctcccaatcaacacccaatatgagggaatgcgcgactgcatcaacacaatcaggcaagaggagggagtgttcggcttctacaaaggctttggagccgtaatcatccaatatactctgcatgccgccgtgctgcaaattaccaagattatctactcaactctcttacagaacaacatttag

SEQ ID NO: 135141 - DNA, 2220 bp, synthetic construct
  misc_feature 1..2220: note = Description of Artificial Sequence: Synthetic coding sequence
  source 1..2220: mol_type = other DNA
atgagttccgagagtaaagagcagcacaatgtgtctcctcgagactccgccgaaggcaacgactcttacccttctgggatacatttggaattgcagagggagtcaagcacagactttaaacagttcgaaactaatgaccagtgccggccttaccaccggattttaattgagaggcaggagaaatccgacaccaatttcaaagagtttgtgattaagaagctgcagaaaaactgtcagtgttcccccgccaaagcaaaaaatatgatcttaggcttcttacccgttctccagtggttgcctaaatatgacttgaaaaagaatatcctcggcgatgtgatgagtggcctgatagtaggcatcctccttgtcccccaatcaatcgcctattccttgttagcagggcaagaacctgtctacggactgtacaccagtttttttgcaagcattatttacttcctgctgggcacgagccgccacatctcagtcggcatattcggcgtactgtgcttgatgatcggcgaaaccgttgacagggagctccagaaggccggatatgacaacgctcatagcgcgccgtctttgggaatggtcagtaatggctcaacactgttgaaccacacgagtgaccggatttgtgataaatcctgttacgccatcatggtcggaagcactgtgacctttattgccggtgtctatcaggtggctatgggattctttcaagttggattcgtgtccgtttaccttagcgacgcactcttatccggatttgtgacaggggcatcttttactattctgacatcgcaagccaagtatttgctcgggctaaacctgcccaggactaatggagtcggaagcctcataactacttggattcacgttttccggaatatccacaaaactaatttgtgtgacctgatcaccagtttgctttgcctgctggtgctactgcctactaaggagcttaatgagcacttcaagtcaaaattgaaggctccaattcctattgaattagttgtggtagtggccgccaccctggcaagccatttcggcaagctccatgagaactataacagctcaattgccggtcatatccccaccgggtttatgccccccaaagtgcccgagtggaacctgattccatcggttgctgtcgatgcaattgcgatctccatcattgggtttgctataactgtaagcctcagcgagatgtttgccaagaagcatggatacaccgttaaagctaatcaggagatgtacgccattggcttttgtaacattatcccgtccttcttccactgctttacaacttccgcagcgctggccaaaacactggtgaaggagtcaacgggctgccacactcagctgtccggtgtggtgactgccctagttcttctgctcgttctccttgtcatagcccctctgttctacagcctccagaagtcagtgctgggtgttattaccatcgtgaacctacggggtgccttgaggaagttccgggacttacctaaaatgtggtcaatttcacgaatggataccgtgatctggttcgttaccatgctctcatccgcccttcttagcacggaaataggcctgttagtgggagtctgttttagtatattctgcgtgattcttcgcacccagaaacctaaatctagcctgcttgggctggtcgaagagtccgaggtttttgaatctgtgagtgcgtacaagaacctccagatcaagcctggaataaagatcttccggttcgtagcacctctctactacattaacaaggagtgtttcaagtccgctctctataagcagacagtgaaccccatcctcattaaggtagcatggaaaaaagcagcaaagaggaaaatcaaagagaaggttgtgaccctgggtggtatccaggacgaaatgtctgtgcagctgtctcatgaccccttggaactgcataccatcgtaatagactgcagtgcgatccagtttttggacacggccggtatccacaccctaaaggaagtgcgccgggattacgaagcaattggaattcaggttctgctcgctcagtgcaaccctacggtgcgagattctctgacaaacggcgagtattgcaaaaaagaagaagagaacctgctgttctatagtgtatacgaagccatggcctttgcagaggtgagcaaaaaccagaagggtgtgtgtgtcccaaacggactgagccttagcagtgactag

SEQ ID NO: 135142 - DNA, 72 bp, synthetic construct
  misc_feature 1..72: note = Description of Artificial Sequence: Synthetic coding sequence
  source 1..72: mol_type = other DNA
atgagctctgaaagcaaagaacagcacaacgtctctccccgcgactccgcggagggtaatgactcgtattag

SEQ ID NO: 135143 - DNA, 2295 bp, synthetic construct
  misc_feature 1..2295: note = Description of Artificial Sequence: Synthetic coding sequence
  source 1..2295: mol_type = other DNA
atgattgaaccttttggcaatcaatacattgtcgctcgacccgtgtattccacaaatgcttttgaagagaaccataaaaagacaggaaggcatcataaaaccttcttagaccatctgaaagtctgttgttcatgcagtccacagaaagctaagagaatcgttttatcattatttcccatcgcttcatggctgcccgcctaccggctcaaggaatggctgctgtcagatattgtgagtggcatttccaccgggattgttgcagttctgcagggcctggcctttgccctgctggttgacattccacccgtgtatggtctgtacgcttcatttttccccgcaattatttacctcttctttggcacctccagacacatttcagtgggcccgtttccaatcctgtccatgatggtgggcctggccgtctccggagctgtgtctaaggcggtgcctgaccgtaacgccaccacgctgggtctgcccaataattctaacaattcttcactacttgacgatgagcgcgtccgggtcgctgccgccgcatccgttacagttttgagcgggataattcagctggccttcgggattctgaggattggatttgtcgtaatttatctcagcgaatctttaattagcgggttcacaaccgccgctgcggtgcatgtgttagtatcacagttgaagtttatcttccagctgaccgtgcccagccacaccgatccggtgtccatatttaaagtcctgtattcagtgtttagccagattgagaaaactaatatcgcagacctggtgacagctctcatcgtcctgcttgtcgtgtccatcgtcaaggagatcaatcaaagatttaaggacaagctgcctgtgcccatccccatcgaatttattatgactgtgattgccgctggtgtgtcttacggctgcgatttcaagaatagatttaaagtcgctgtcgttggcgacatgaatccaggcttccagccccccattacacccgacgtagagactttccaaaacaccgtcggagattgttttggcattgcgatggtggccttcgcagtagctttcagcgtggcctctgtgtactctttgaaatacgactaccctctggacgggaaccaggagctcatcgccctcggcttagggaatatcgtgtgcggagtttttcgaggattcgctggtagtaccgcactgagtcgtagtgccgtgcaggagtcgaccggcggcaagactcaaatcgccggtctgatcggtgctatcattgtactaatcgtggtgttggcaatagggttcctactcgctccactccagaaaagtgtgctcgctgcactagctctgggaaacttgaagggtatgctgatgcagtttgccgaaataggtcggctgtggcggaaagataagtatgactgtttaatatggatcatgacgttcattttcacaatcgtgttggggttggggctcggcctagccgcttcagttgcctttcagcttcttacaatagtgttccgtacacaatttccaaaatgttccaccctggctaacattggcaggactaatatctacaaaaacaagaaagattattatgatatgtacgagcctgagggcgttaagatcttccgctgcccttccccgatctacttcgctaacataggcttctttaggagaaaactgatcgacgcggtgggcttctcgccactaagaattctccgcaaacgcaacaaggccctcagaaagataagaaagcttcagaagcagggactcttgcaggtgacacctaaagggttcatatgcaccgtcgacacaattaaagactcagacgaagagctcgacaacaatcagatcgaggtgctcgatcagcccataaatacaaccgaccttccattccacatcgactggaacgatgacctcccacttaacatcgaagttcctaaaatttctcttcatagcctgatcctcgattttagcgccgtgagcttcctcgatgtgtcgtcagttcgtggtctgaaatccattctgcaggaattcatccggatcaaagttgatgtttatatcgtaggaacagacgacgatttcatagagaaactcaataggtatgaattcttcgacggggaggttaagagcagcatctttttcctgactatccacgatgctgtactgcacatcctcatgaagaaggattattccacaagcaaatttaatccttcccaagagaaagacggtaaaattgatttcaccatcaacacaaacgggggcttgagaaaccgtgtctacgaggtgccagtcgagactaagttttag

SEQ ID NO: 135144 - DNA, 1956 bp, synthetic construct
  misc_feature 1..1956: note = Description of Artificial Sequence: Synthetic coding sequence
  source 1..1956: mol_type = other DNA
atgttattgaggaaaatcatcaaacggcaggaagatattattcgacacttctggataatttccaaatgcgtcgttgcttcatggctgccagcctaccggctcaaggaatggctactcagcgacattgtctcgggcatttcgaccggtatagttgcggtgctccagggcctggcctttgcactgctcgtcgacattccacctgtatacggactgtatgcatcgttcttcccagctattatctatctcttttttggaacatcccggcacatttcagttggaccatttcccattctgagcatgatggttggcctcgccgtttctggcgccgtcagcaaggcagtccccgacaggaacgctacgacactcggcctccccaacaacagtaataattcatctcttctggacgacgaacgggtgcgagtcgctgccgctgcctcggttacagtgctctctggcatcatccagctcgccttcggcatcctaagaatcggcttcgtggtgatatatttatctgagagcttgatttcggggttcacaaccgccgccgccgtgcacgtgttggtatctcaactcaagttcatcttccagttgacagtgccttctcatacagacccagtctccatctttaaagtgctgtactcagttttctcccagattgagaagaccaatatcgccgacctggtgacggccctcattgtcctgctggttgtgagtattgtaaaggagatcaatcagcgatttaaggataagctgccagtgcctattcccatcgaattcatcatgaccgtcatcgccgccggcgtctcgtacggctgtgacttcaagaatcgcttcaaagtggcagtggtcggggacatgaaccccggctttcagccaccaataacccctgacgtggaaactttccagaataccgtcggagattgtttcggaattgccatggttgcctttgctgtcgcgttctccgtggccagcgtgtactcactaaagtacgattatccgctggacggaaatcaggaacttatagcgctggggctcgggaacatcgtgtgcggggtgttccgaggattcgcgggttctaccgctctctctagaagcgccgtgcaagaatctaccggggggaagacacagattgcaggactcatcggggcaattattgtgctgatcgtggtcctcgccatcggattcctccttgcgccccttcagaaatcagtgttggccgcgctggctttgggaaacctgaagggcatgcttatgcagtttgccgagatcgggagactgtggcgaaaagataagtatgattgtctgatctggataatgacatttatctttactatcgtgctgggactaggtctaggacttgcagcctccgtcgcttttcaacttctcacaattgtgttcaggacccagttccctaagtgctctaccctagccaatatcggacgcacaaatatttacaagaacaagaaggactattatgatatgtatgaacctgagggggtgaagatctttaggtgcccttctccaatctatttcgctaacataggcttcttccggaggaagctcatcgacgctgtcggttttagccccctcagaatcttgcggaaaaggaacaaggccctcaggaagattcgaaagctgcagaaacaagggctgctccaggtgactcctatccttcaggagttcatccggattaaggtagacgtgtacattgtggggaccgacgacgattttattgaaaagctgaacaggtatgagttttttgacggggaggtcaagagctccatcttctttctgactatccacgacgcggtactgcacattctcatgaagaaggattactcaacttcgaagtttaacccaagtcaggaaaaagacggcaagatcgatttcacaatcaacactaatgggggtcttagaaacagggtctacgaggtgccagtggaaacgaagttctag

SEQ ID NO: 135145 - DNA, 363 bp, synthetic construct
  misc_feature 1..363: note = Description of Artificial Sequence: Synthetic coding sequence
  source 1..363: mol_type = other DNA
atgattgagccttttggaaatcagtacattgtcgcaaggccagtgtactccactaacgctttcgaggagaatcataaaaaaacaggccggcaccacaaaacctttctggaccatctgaaagtctgttgtagctgttctccccaaaaggctaagcgcatcgttttgagtctgtttccgattgcatcctggctgcccgcctatagactgaaagaatggctgctcagcgacattgtttcaggcatatctacagggattgtcgctgtgttgcagggcctcgcgttcgctttacttgtggacatcccgccagtgtatggcctatacgccagcttttttcccgccatcatctacctgtttttcggatag

SEQ ID NO: 135146 - DNA, 2343 bp, synthetic construct
  misc_feature 1..2343: note = Description of Artificial Sequence: Synthetic coding sequence
  source 1..2343: mol_type = other DNA
atggctgcgcctggaggacgctccgaacctccacagctgcccgaatatagctgtagttacatggtgagccgcccggtgtattcagagctagctttccagcagcagcacgagcgtcgtttgcaagagaggaagacgctgcgggagagcctcgctaaatgctgctcttgttccaggaagagagcatttggcgtattgaagaccctagttccaatcctcgaatggctacctaagtacagggtcaaggaatggctcctaagtgacgtcataagcggagtttcgacaggcctggtagcaactttgcaggggatggcgtatgcccttctggcagccgtaccggtgggatacggactgtactctgcgtttttccctatccttacgtacttcatctttggtacctctagacacattagtgttggccccttccccgtcgtgtcacttatggtgggatcagtagtcctatctatggccccagatgagcactttttggtctcctcctctaatggaacggtgctcaacacaacaatgatcgatactgcggcccgagacacagctcgcgtcctcattgcctctgcgctgaccctgctggtggggattattcagctcatcttcggcggccttcagatcgggttcatcgtgaggtatctagcggaccctctagttggtggatttaccactgccgccgctttccaagtgttggtgtcgcagctgaagattgtgctcaatgtgagcacaaagaactacaatggcgtgctcagtattatctacacattagtagagatatttcaaaacataggggataccaatctggctgacttcacagccgggttactcactatcgtggtctgtatggccgtgaaagaattaaatgacagattcagacataaaatccccgtccccatacccatagaagttatcgtgacaattattgcaactgcaatttcttatggcgccaacctggagaagaattacaacgcaggtatagtaaagagcatcccccggggcttcctgccacctgaattaccccctgtgtccctattttccgagatgctggctgcatcttttagcatcgctgttgtcgcgtacgcgattgcagtgtcagtgggcaaggtgtatgctaccaagtacgactacacaatcgacggaaaccaagagttcattgcctttggtatctctaacatctttagcgggttcttttcttgctttgttgcaaccacggcgctgagccgtactgcagtccaggaaagcacaggcgggaagactcaggtggcagggatcatcagtgctgccatagtgatgatcgctattctagccctgggaaagcttctcgagccactacagaaaagcgtgctagccgctgtcgtcattgcaaaccttaagggcatgtttatgcagctgtgcgatattccccgcctgtggcgccagaataagatcgacgcagtcatttgggtcttcacctgtatcgtgagtattatcttgggactggatctgggcctcctggctggcctgatctttgggttgttaaccgtagtgttacgcgtgcagtttccctcatggaatggcctgggtagtattcccagcactgacatctataaatcaaccaaaaattacaaaaatatagaagagccccagggggtcaagatactcaggttctccagcccaattttctacggtaacgtcgacggtttcaaaaaatgcatcaagagtactgtgggatttgacgctattcgcgtgtataacaaacgcctgaaagctttacgcaagattcagaagctgatcaagagcgggcaactcagggctaccaagaacggtattattagtgacgcggtgagcaccaacaacgcattcgagccggacgaggacatcgaggacctggaggagctggacatccccacaaaggagatcgagatacaagtggattggaatagtgagctgccagtaaaggtcaacgttccaaaggttcctatccattctctggttctcgactgtggtgccatttcctttttagatgtggtcggcgttcgctctctaagagtgattgtaaaggaattccagcggattgatgtgaacgtgtatttcgcatctcttcaggattacgtgatcgagaaactggagcagtgtggcttcttcgacgacaatataaggaaggataccttttttctgaccgtgcacgacgccattttgtacctgcagaaccaagtaaagagtcaagaagggcaaggtagtatactagaaacaattactttgatacaggactgtaaggatacactagagctgatagagaccgagctgacagaggaggagctggacgtgcaggatgaggctatgcgcaccctggccagttag

SEQ ID NO: 135147 - DNA, 396 bp, synthetic construct
  misc_feature 1..396: note = Description of Artificial Sequence: Synthetic coding sequence
  source 1..396: mol_type = other DNA
atggctgctccaggtggccgctcagagccaccccagctgccggagtatagctgttcctatatggtcagccggcccgtgtatagtgaattggcttttcagcagcagcatgaaaggcggctccaggagcgtaaaacacttagagagagcctcgcaaaatgctgcagctgttcccgaaagcgagcgttcggagtcctcaaaaccctggtacctattctcgaatggctgccgaagtacagggtgaaagaatggctgctgtcggacgtgataagcggcgtctcaaccggattagtcgcaacactacagggcatggcatacgctcttctggccgctgttcctgttggttacggactctacagtgcattcttccccattttgacctactttatctttggttag

SEQ ID NO: 135148 - DNA, 1026 bp, synthetic construct
  misc_feature 1..1026: note = Description of Artificial Sequence: Synthetic coding sequence
  source 1..1026: mol_type = other DNA
atgcgccacgggctggcagtaccaagtgttttagcagctgttgtgattgctaatttgaagggaatgtttatgcagttatgcgatattccacggctgtggaggcagaacaagatagacgcagttatttgggtttttacgtgtattgtgagcatcattttgggtctggaccttggcctcctagcagggcttatttttgggctcctgacagtggtactgcgggtgcagttcccttcttggaatggtctaggatcaatcccatccaccgatatatacaaaagcacaaagaactataagaacatcgaggaaccacagggagttaagatcctccgcttcagcagtcccatcttttatggcaatgtggacggcttcaaaaagtgcataaaaagcacagtgggatttgacgccattagagtgtacaacaagagactgaaggctctcaggaagatccaaaagctgataaaatcaggacaactacgtgctactaagaatgggatcataagcgatgccgtaagcaccaacaacgctttcgagcccgacgaggacatcgaagatttggaagagttggacatccccacaaaagagatcgagattcaggtggactggaactccgaactgccagttaaggtaaacgtgcctaaagtgcctatccacagcctggtcctagactgcggagccatttcattcttagacgttgttggtgtcagatctctccgggtgattgtcaaagagtttcagcgaatcgatgtgaacgtctattttgccagccttcaggattacgtaatcgagaaacttgaacagtgcgggttcttcgacgacaatatccggaaggatacgtttttcctgacagtacatgacgccatactgtaccttcagaatcaggtaaagtcccaggagggtcaagggtcaattctggaaaccatcacactcatccaggactgtaaggacaccctcgaactcatcgagacggaactgactgaagaggaactggacgtgcaggacgaggcgatgagaactctagcaagttag

SEQ ID NO: 135149 - DNA, 1050 bp, synthetic construct
  misc_feature 1..1050: note = Description of Artificial Sequence: Synthetic coding sequence
  source 1..1050: mol_type = other DNA
atgatcgcaatcttagccctcgggaaacttctcgagcccttacagaagagcgtgctggccgctgtggtaattgccaatctgaagggaatgtttatgcagctgtgcgacatcccacgcctttggaggcagaacaagatcgacgctgttatatgggttttcacatgcatcgtctcaattattctcgggttggacctcggattactggctgggctgatcttcgggcttctgactgtggtgctgcgagtccagtttccatcctggaatgggctcgggtctatcccaagcaccgacatttacaagtcgactaagaactacaaaaacattgaggagccacagggcgtgaagattctgagattcagttctccaatattctacggcaatgtcgacgggtttaagaaatgcataaaaagcaccgtaggcttcgacgcaatcagggtctataacaaaaggctgaaggcacttcgaaagatacagaagctcattaagtcaggccaactgcgagccaccaagaacggaatcattagcgacgccgtctcaactaacaacgcgttcgaacctgatgaggacatcgaggatcttgaagaattggatatccctacgaaagaaatagagatccaggtggactggaactctgagctgccggtaaaagtgaacgtacccaaggtccctattcactctctggttttggactgcggcgcaatttctttcctggatgtggtaggtgtgcgcagtctgcgagtgatcgttaaagagtttcagcgcatagacgttaatgtgtatttcgctagtctgcaggattacgttatcgaaaagctcgagcagtgcggctttttcgacgacaatattcggaaagatacatttttcctaaccgtccacgatgccatactgtatctgcagaatcaggtgaaaagccaggagggccaggggtccattttggagaccatcactttgattcaggattgcaaagacacactggagctcattgagaccgagctcaccgaagaagaactagacgtgcaggatgaggccatgagaacactcgcgtcctag

SEQ ID NO: 135150 - DNA, 1104 bp, synthetic construct
  misc_feature 1..1104: note = Description of Artificial Sequence: Synthetic coding sequence
  source 1..1104: mol_type = other DNA
atgaggcatggacttgcagtcccagtggcaggaataatctctgcagccatcgtaatgatcgccattttggccttgggcaaactgctcgagccactccagaaatcggtgttggcagcggtggtcatcgctaatctgaaggggatgtttatgcagctttgcgatataccacggctgtggagacagaacaagatagatgcggtaatatgggtctttacttgcattgtgtctatcatcctggggcttgatctcgggttgctggccgggcttatcttcgggctgcttaccgtcgtgctgcgtgtacagttcccttcctggaacggcctgggctcaatccccagcactgatatatacaaaagcactaaaaactacaagaacattgaagagccgcagggcgtgaagattctgcgtttttctagtcccatcttttatgggaacgtggatggttttaaaaagtgcatcaagtctactgtcggtttcgatgctatccgggtctataataaacgactaaaggccctccgcaagatccagaaactgatcaagagcgggcaactccgggcaacgaagaatgggataatttcggatgccgtatcgaccaacaatgcatttgagcctgatgaggatattgaggacctggaggagttggacatcccaactaaagaaatcgagatacaggttgattggaatagtgaactccccgtgaaggtaaatgtgcctaaagttcctatccatagtcttgtattagactgtggagctatttcctttttggacgtggtgggagtacggtcactgcgcgttatagtgaaagagtttcagcgcatcgatgtcaatgtgtacttcgccagcctgcaggattatgtcattgagaagctcgagcagtgcggattttttgacgacaacatcaggaaagacacgtttttcttgaccgtccacgacgccattttgtacctgcagaatcaggttaagtcacaggagggtcaggggagtattctcgagactatcactctgatccaggactgcaaggacacactggagctgatcgagaccgagctgacggaggaggagctcgacgtccaggacgaggctatgcgaactctcgcatcttag

SEQ ID NO: 135151 - DNA, 2235 bp, synthetic construct
  misc_feature 1..2235: note = Description of Artificial Sequence: Synthetic coding sequence
  source 1..2235: mol_type = other DNA
atggatcatgctgaagaaaatgaaatcctcgccgctactcagaggtactatgtggagaggcccatcttctcccacccagtgttgcaagaacggctgcatactaaagataaggtgccagacagtattgcagacaagttgaagcaagccttcacttgcaccccgaaaaagatcaggaacattatctacatgttcctgcctattacaaaatggctgccagcctataaatttaaggagtatgtccttggcgacctggtctcaggaattagtaccggagtgctccaactcccacagggtctggcattcgctatgttggccgctgtcccccccatttttggactgtactcgtctttctatccagtgattatgtactgctttctgggaacctccagacacatctccatcgggcctttcgcggtcattagtctaatgatcgggggtgtcgcagtgagattagttccagacgacattgtgatccccggcggcgtcaatgccaccaacggaaccgaggctcgagacgcactgcgggtaaaggtggctatgtcagtgacactcctgtcaggtattatccagttttgcctgggcgtgtgtagattcggcttcgtggccatttacctcacagaacctctggtgagaggattcacaacagctgccgccgtacatgtgtttacttccatgcttaagtatctcttcggtgttaagaccaaaaggtatagtggtatttttagtgtggtctatagtacggtggcggtactacagaatgtcaagaacctgaacgtctgttctcttggcgtcggccttatggttttcgggctgttactgggcggaaaggagtttaacgagagatttaaggagaaactgccggccccgattcctttggaatttttcgccgtggtgatggggaccggtatctctgccggattcaatctgaaggaatcgtataatgtggacgtcgtggggacgctgcctcttgggctactgccaccagctaacccagacacctctctgttccatttagtgtatgtggatgcgattgcaatagctatcgtgggattttcggtgacgataagcatggcaaaaaccctggcaaataaacacggctatcaggtcgacgggaaccaggagctgatcgctttgggactctgtaacagcatcggaagtcttttccagaccttcagcatttcctgctccctttctagatctctggtgcaggagggaacaggcggcaagacacagctggcagggtgcctggccagcctgatgatcctgctggtcatccttgccaccggttttctgttcgagtctcttccacaagctgtcctgtccgcgatcgtgatcgtgaacctgaaaggaatgttcatgcagttttccgacctgcccttcttttggcgcacgtctaagatcgagctgaccatttggttaaccacctttgtgtcctcacttttcctggggctagactacggactcattacagcggtgatcattgccctgctgacagttatatatcgaactcagtccccaagttataaagtccttggaaagcttccagagactgatgtatacattgacattgatgcctacgaggaagtcaaagaaatacccgggattaaaatctttcagatcaatgcacctatctattacgcgaacagtgacctatacagcaacgcccttaaacggaagacaggggtcaatcccgctgtgattatgggcgctagaaggaaggctatgcgcaaatacgctaaggaggtgggcaacgcaaacatggctaacgcgaccgtggtgaaggctgatgcagaagtggatggcgaggacgccaccaaacccgaggaagaggatggcgaggttaagtacccacccattgttatcaagtctacctttcccgaggagatgcagcgcttcatgcctccgggggacaacgtacacaccgtgatcctggattttacccaggtcaactttatcgactctgttggcgtgaagacactcgctgggatcgtaaaggaatacggcgacgttgggatctatgtgtatttggcagggtgcagcgcacaggtagtcaacgacttgacgcgcaaccggtttttcgaaaatcccgccctgtgggagttgttgttccatagtatccacgatgccgtgttaggctcacagcttagagaagctctggcggaacaagaggcgtccgcccccccctcccaggaagacttggagcctaatgctaccccggcgaccccagaggcatag

SEQ ID NO: 135152 - DNA, 2058 bp, synthetic construct
  misc_feature 1..2058: note = Description of Artificial Sequence: Synthetic coding sequence
  source 1..2058: mol_type = other DNA
atggatcacgctgaagagaatgaaattttggccgccacccaacgctattatgtggaacgacccatctttagccaccctgtgctgcaggagcgcctccacaccaaagataaagtacctgactctatcgcggataaactcaaacaggcctttacctgcactcctaagaaaattcgaaatatcatctacatgttcctgcccattactaagtggttgcccgcgtataagttcaaagagtatgtcctgggggatctggtgtctggcataagtaccggagtcttgcagctgccacaggggctagccttcgctatgttagcggccgtgccacctatttttggactttacagcagcttctaccctgtgataatgtattgcttcctcgggacttctcgacacatcagcattggccccttcgccgtgattagtctgatgataggcggcgtggccgtgcgcctggtgccggacgatatcgtgattcctggcggtgttaacgccactaacggtactgaggcgagggatgccctgagagtgaaggtagctatgagtgtgacactgctgtcaggtatcatccagttctgccttggagtgtgccgttttggattcgtggcaatttatcttaccgaacccttggtgaggggttttacgaccgccgcggccgtccacgtgttcactagtatgcttaagtacctctttggggtgaagacaaagcgatatagtggtattttttccgtggtgtactctacagtggctgtgctgcagaatgtcaaaaatcttaacgtgtgctccctgggagtgggcctgatggtgtttggactgcttctgggagggaaagagttcaatgagcggttcaaggagaaactccccgcccctattccccttgaattctttgcagtggtcatggggactggcatctcagccggtttcaacctcaaggaatcctacaatgtggatgttgtgggaacccttcccctgggcttgctcccaccagctaacccagataccagcttgttccatctggtctacgtagacgccatcgccatagctatagtgggattctctgtgactatcagtatggcgaaaacactggccaacaaacacggataccaggtggatggcaatcaagagttgatcgctctgggattgtgtaactccattgggagtctgttccagaccttcagcattagttgtagtctaagcaggtccctcgttcaggaagggactggtgggaagacacagctggctggttgtctggcctctctgatgatcctgctcgtgatcctagcaactggcttcctcttcgaaagcctgcctcaagccgtactctcagcgattgttatcgtgaacttaaaaggaatgttcatgcagtttagcgacttaccttttttttggaggacatctaagatcgaactgacaatctggttgaccaccttcgtgagctcccttttcttagggctggactacggactgattactgctgtgatcattgctctcctgaccgtaatatacaggacacaatctccaagttacaaagtccttgggaagttgccggaaacagacgtctacatcgatatcgatgcctatgaagaggtgaaagagatacccggcatcaaaatttttcagattaacgcgcccatttactacgcaaacagtgacttgtattcgaacgccttaaaaaggaaaacgggggttaatcccgctgtaattatgggagccagacgaaaagccatgagaaagtacgcaaaggaagtaggcaacgcgaacatggccaacgctaccgtagtcaaagccgatgccgaggtcgacggagaggacgctaccaaacccgaggaggaggacggagaagtgaaatatcctcctatcgtcatcaagagcacgtttcctgaggagatgcagcggttcatgccacccggtgataacgttcacactgtcatactcgattttacacaagtgaatttcattgacagcgttggagtaaagacactggccgggattgtcaaagaatacggtgacgtaggcatctacgtttatcttgcagggtgcagtgcattcattcaacgctag

SEQ ID NO: 135153 - DNA, 534 bp, synthetic construct
  misc_feature 1..534: note = Description of Artificial Sequence: Synthetic coding sequence
  source 1..534: mol_type = other DNA
atgggagcgcggcgaaaagccatgcgcaagtacgctaaagaggtcggaaatgctaacatggcaaacgccacagttgtgaaggctgatgccgaagtcgacggggaagatgccacaaagcctgaagaagaggacggcgaagtaaagtaccccccaattgtcataaaatccacctttcccgaggaaatgcagagatttatgccgccaggagacaacgtgcataccgtgatccttgattttacacaggttaactttatcgacagcgttggtgtgaagaccctcgccgggatcgtgaaagagtatggcgatgtcgggatttatgtctatctcgcgggctgctctgcccaagtagtgaacgatcttactagaaataggttcttcgagaatcccgctttgtgggagctcctgtttcacagcatccatgacgcggtgctgggttcccaactccgcgaggcattggcggagcaagaagccagcgctcccccaagccaggaagacctggaacccaacgcaaccccagctacacccgaggcctag

SEQ ID NO: 135154 - DNA, 1008 bp, synthetic construct
  misc_feature 1..1008: note = Description of Artificial Sequence: Synthetic coding sequence
  source 1..1008: mol_type = other DNA
atggatcatgcagaggagaacgagatactggcagcgactcagcgctattatgttgagcgtccaattttttcccaccctgtcctgcaggaacggctgcacactaaggataaggttcctgactctatcgcggacaagctgaagcaagcatttacttgcacccccaagaaaattcgtaatatcatttacatgttcctgcccatcaccaaatggctacccgcctacaagtttaaagaatatgttctgggcgatttagtctctgggatttccaccggagtgctgcagctgccacaggggctggccttcgctatgctggccgccgtgccgccaatcttcggcctatactcctcattttacccagtcatcatgtactgtttccttggtacgtcacggcatattagcattgggccattcgcggtaatctccttgatgatcggaggagttgcagtccgactggtccctgatgatatcgtcatacccgggggagttaacgcaaccaatggcaccgaagcccgggatgcactgagggtcaaggtcgctatgagcgttaccctcctaagcgggataattcagttctgtctgggcgtgtgtagatttggctttgtcgctatctatcttaccgagccattggtgcggggctttaccaccgcagccgccgtccatgtgtttacatcaatgctgaagtacctgttcggagttaagacaaagagatactccggaattttttcggtggtgtacagcactgtggctgttctgcagaatgttaaaaacctgaatgtctgctcattgggggtgggtctcatggtctttggcctgttgctcggaggcaaagaattcaacgagcgattcaaggaaaagctgcccgcaccaatccccctggagtttttcgcagtcgtgatgggcactggaattagcgccggattcaacctaaaggagtcttacaacgtggacgtagtggggacactgcccctaggcttccatactgaaatgacccgcaggtggagaccctag

SEQ ID NO: 135155 - DNA, 2145 bp, synthetic construct
  misc_feature 1..2145: note = Description of Artificial Sequence: Synthetic coding sequence
  source 1..2145: mol_type = other DNA
atggaccacgcagaagagaatgaaattttagctgctactcagaggtactacgtggagagacccatcttcagccatccagtgctgcaggaaaggcttcacactaaagataaggtacctgactcaatagcggataagctgaagcaggccttcacttgcactccaaaaaagattaggaatatcatttacatgtttctgccaattacaaaatggcttcccgcttacaaattcaaggagtatgtgctgggcgacctcgtgtcaggcatatccacaggggtactgcagctcccccagggactggctttcgccatgctagctgcagtgccaccaatcttcgggctgtactcatccttttaccccgtgatcatgtactgcttcttaggcacatcaagacatatatctattggaccctttgccgtgatctcccttatgattggcggagttgctgtaagactggtgcctgacgacatcgtcatccctgggggagtcaatgccaccaacggcactgaggcccgagatgcgctccgcgtgaaggtcgccatgtccgtcactctgttatccggcattatacagttttgcctgggtgtgtgccgctttggctttgtggccatctaccttacggaaccactggtgagagggttcacgacagctgctgccgtgcatgtctttactagcatgttaaagtacttgttcggagtcaagacaaagcgctactccgggatctttagtgttgtctacagcacggtggcggtcctccagaatgtcaagaacctgaatgtatgctctctgggagtgggactaatggtgtttggattattgctgggtgggaaagaatttaacgagagattcaaagaaaagcttccggcacctattccacttgaattttttgccgtcgtgatgggaaccggaataagcgcgggcttcaacttaaaggagtcctacaacgtagacgttgttggaactctgcctctcggacttctacccccggcgaacccagacacatcactgttccatctcgtgtatgttgatgccattgctattgctatcgtggggttttctgtgacaatatctatggctaaaactttggccaataaacacggttaccaagtggacggcaatcaggagctaatcgcgctgggactttgcaacagtatcggctctctgtttcagacattctctatctcatgctcgttaagtcgaagcctagtacaagagggtactggcggcaaaacccagctcgccgggtgtctggcgagcctgatgatcttgctggtgatactcgcgactggctttcttttcgagtctctaccacagaccatctggctgacaactttcgtctccagcttgtttcttggcctcgactatggactcataacggccgtgatcatcgctctgctcaccgtaatatacaggacgcaaagtccctcgtacaaggtgcttggcaagttgcccgagaccgatgtgtacatcgatatcgacgcatacgaagaagtgaaggaaatccccggaatcaagattttccagatcaacgcaccaatatactatgccaattcagatctgtattccaacgctctgaaacgaaagacaggagttaatcctgctgtgatcatgggcgcccgccggaaagctatgagaaagtacgcgaaggaagtgggcaacgctaatatggcgaacgctactgtcgtgaaagcaacacaggatgccgaggttgatggagaggacgcgacgaaacccgaggaggaagatggcgaagttaagtaccctccaattgtgattaaaagcactttccccgaggaaatgcaaagattcatgccacccggcgataacgtgcacacagtgatcctcgattttacgcaagtaaacttcatcgactccgtgggagttaaaacactggccggtatcgtgaaggagtacggcgatgtggggatctatgtttacttagcaggctgttccgcacaggtagtgaatgacctaactcgcaatcgcttctttgagaatccagccctgtgggagttgctttttcactcgatccacgacgctgtcctgggctcacagctgagggaagccttggctgagcaggaggcaagtgcacctcccagccaggaagacctcgagcccaatgccaccccagccactcccgaggcatag

SEQ ID NO: 135156 - DNA, 2241 bp, synthetic construct
  misc_feature 1..2241: note = Description of Artificial Sequence: Synthetic coding sequence
  source 1..2241: mol_type = other DNA
atggatcacgccgaagaaaacgaaatactcgccgccacacagcgctattacgtcgagagacccatcttttcacatcccgtgttacaggaacgcttgcatactaaagataaagtgccagactctattgcagacaaacttaaacaggctttcacctgcacgcctaaaaaaattcgtaacatcatctatatgttccttccgatcaccaagtggttgcctgcatataaatttaaagagtatgtgttaggcgacctggtatccggaataagcactggtgtgctccagctgccacagggactagcctttgccatgctggccgccgtgccacctatcttcgggctgtattcctccttctaccccgttattatgtattgttttctgggaacatcgaggcacatctccattggcccgtttgcagtgatctctctgatgatcgggggggttgctgtgcgactcgtccccgacgacatcgtgattcccggtggggtgaacgccacgaatgggaccgaggccagagatgcactgagagtgaaagtggccatgagcgtgaccttactctccgggattattcagttctgcctcggggtgtgccggttcggctttgtggccatttatctgaccgagcccctcgtgagaggctttacgacagcagcggcggtgcacgtctttacaagcatgctcaagtacctttttggtgtgaaaactaagagatacagtggcatcttcagcgtagtatactccactgttgcagtgctccaaaatgtcaaaaatctgaatgtgtgctcactgggcgttggattaatggttttcggactccttctggggggtaaggaattcaatgagcgctttaaggaaaagttacccgctccgattccactggaatttttcgccgtggttatgggcaccggaatctctgctggcttcaacctgaaagagagctacaacgtcgacgtggtggggacgctgcccctgggcctgctcccccccgccaaccctgacaccagcctattccatctcgtttatgtggatgctattgccatcgccatcgtgggtttctctgtcactattagtatggccaagactctggccaacaaacacggctatcaggtggacggtaaccaggaactcatcgctttggggctctgcaacagcataggctccctatttcagacattctccatatcctgctcattatcccggtctctggtccaggaagggactgggggcaagacacagctcgccggatgtctggcttccctgatgatcctgcttgttattctcgccactggattcctgttcgaaagtctccctcaagccgtcctatccgccatagttattgtcaatctcaagggaatgttcatgcaattttcggatctacccttcttctggcgcacaagtaagattgaactgaccatttggctgaccacctttgtcagcagtctgtttctgggactcgattatgggctgataacagcggtaatcattgcactcttgacagttatttatcgcacccagagcccaagctataaagtgttaggaaaactgcccgaaacagatgtttacatcgatatagatgcctacgaagaagtgaaagaaatccccggaattaagatttttcaaatcaacgcccctatttattacgccaatagcgatttgtatagcaacgcactgaaacgaaagaccggcgtgaatcccgccgtgattatgggcgctcggcgaaaagctatgcggaagtatgccaaggaggtgggaaatgcgaacatggccaacgccaccgtggtgaaagcaacccaggacgcagaggtggacggggaggacgcgacaaagccggaggaggaggacggcgaagttaagtacccacccatcgttatcaagtcaacattccctgaggagatgcagcgctttatgcctcctggcgacaacgtccacactgtgatcctggattttacacaggttaatttcattgattctgtaggtgtgaagactctcgcgggcatcgtgaaggaatacggcgatgtcggcatctacgtctacctcgccggttgctctgctcaggttgtgaatgaccttacaagaaataggttcttcgagaatcctgcgttgtgggagttgctgttccatagtattcatgatgcagtgctgggctctcagttacgcgaagcactggcggagcaggaggcctccgcgccacctagccaggaggacctggaacctaacgctaccccagccacacctgaagcctag

SEQ ID NO: 135157 - DNA, 2124 bp, synthetic construct
  misc_feature 1..2124: note = Description of Artificial Sequence: Synthetic coding sequence
  source 1..2124: mol_type = other DNA
atggaccacgccgaagagaacgaaatcctggcagctacccaacgctactacgtggagagacccatcttctctcatccagtcttgcaagaaaggctgcacacaaaggacaaggtgccagacagcatcgccgataagctcaagcaggcattcacttgcacacctaaaaagatccgcaatattatttacatgtttctccctataactaagtggctaccagcgtataagttcaaggagtatgtgctgggcgacttggtttccggtatctctaccggcgttcttcagctgccccaggggccctttgcagtgatttctctgatgatcggaggggtggccgtgcgcctggtgccggatgacattgtaatccccgggggcgtgaacgccaccaatggaacagaggccagagatgctctgagggtgaaggttgccatgtctgtgaccctcttgagcggtattatacagttctgtctgggggtctgccgattcggatttgtagccatttatttaactgagccactggtgagagggtttactacagcggccgccgtgcacgtatttactagcatgctcaagtacctcttcggagtaaagactaagcgctactctgggatattcagcgttgtgtacagtacggtggccgtcctgcagaatgtgaagaatttaaacgtgtgtagtctgggtgttggactgatggttttcggactcctgctgggagggaaagagtttaacgaacgattcaaggaaaaactccctgcgccgattccactggaattttttgcggtggtgatgggtacaggcatttccgccggttttaatttgaaagaaagttataacgtcgatgtggtgggaacccttccccttggcctcctgcctccagccaatcccgataccagccttttccatctggtttatgtcgatgccatcgccatcgcaatcgtcggcttttctgtgaccatcagtatggcgaagactttagccaataagcacgggtatcaggtcgatggaaatcaggagctcatagctctgggcttatgtaattccatcggctctctttttcagacattctcaatctcatgctcactgagtcggtctctcgttcaagagggcaccggagggaaaacacaactcgcaggatgcctggcgagccttatgattctcttggtgattctggcaaccggattcttattcgagtcattgcctcaggcagttctgtctgcgatcgtgattgtgaaccttaaaggtatgtttatgcagttctcagaccttccttttttttggcggactagtaagattgagctcaccatctggctgacaacctttgtctcctcattattcctcggccttgattacggactgatcaccgctgtgataatcgccttgctcacagttatatatagaacccagtcaccttcttacaaagtgctggggaagttgcctgagaccgacgtgtacattgatattgacgcttatgaagaagtaaaggagattccgggaataaagatttttcagatcaacgcccccatatactatgctaatagtgacctgtattcaaacgccctaaaaaggaagactggagtgaaccccgcggtaataatgggagcccgcaggaaggccatgcgcaagtatgccaaagaggtcggtaacgccaacatggcaaacgctaccgtcgttaaagcggatgcagaagtggatggtgaggacgccacaaagcccgaggaggaggacggagaggtgaaataccctcctatcgtcattaagagtacattcccggaagagatgcaacgattcatgccccctggcgataatgtgcacaccgtaattcttgactttacacaggtgaattttattgatagcgtcggggtgaagacactggctgggatcgttaaagaatacggcgacgtcggaatttatgtgtaccttgcaggctgctccgcccaggttgtaaacgacctgactagaaatcggttcttcgagaatcccgccctctgggagttgctgttccactctatacatgatgccgtcctggggagccaactcagagaggccctcgccgaacaggaggctagtgcccccccttcccaggaagacctcgaaccaaatgctacgccagcaacaccggaagcgtag

SEQ ID NO: 135158 - DNA, 2139 bp, synthetic construct
  misc_feature 1..2139: note = Description of Artificial Sequence: Synthetic coding sequence
  source 1..2139: mol_type = other DNA
atggatcacgccgaggagaatgagatattggcagctacccagcggtactacgtagaaagacccatatttagccacccagtgttgcaggaaaggctccatactaaagacaaggtgccagatagcattgcagacaagctcaaacaggcctttacttgcacacccaaaaagatcagaaacatcatctatatgtttctgcccatcacaaagtggctgccggcctataagtttaaggaatatgtgctcggcgatttggtgagcggtatctccactggagtcctgcagttgccgcaaggtctggccttcgccatgctggctgccgtccccccgatcttcggactttactcatctttttacccggtgattatgtattgctttctgggaacaagtcgccacataagtatcgggccattcgcagtgatttccctgatgataggtggggtcgccgtgcgcttagtcccagatgatatcgtcattcctggcggcgtcaatgccacaaatgggacggaggcccgtgatgccttgcgggtgaaggtagcaatgagtgtgacgctgctgagtggtatcattcagttttgtctgggggtgtgccgttttggcttcgtggctatctatttaacagagcctctcgtgaggggcttcacgaccgctgccgctgttcacgtgtttacgtcaatgctgaaatatttgttcggggtgaaaacaaaacgatattccggcatcttcagcgtggtgtattcaactgtggccgtgctgcagaatgtgaaaaatctgaatgtgtgcagtctgggagttggattaatggtgttcggtctgctgctgggtggaaaggaatttaacgagagatttaaagaaaaactgccggctccaatccctcttgagttctttgccgttgtgatgggaacaggcatcagcgcaggattcaatcttaaggaatcgtacaatgtggatgtggtgggcaccctccctctaggcttacttcccccggccaatccggacacttctctgtttcatcttgtgtacgtggacgctatcgcaatcgctatagtggggttttccgtgactatttcaatggctaaaaccctagctaacaaacacggataccaggtcgatggcaatcaggagcttatagctctaggcctgtgtaactctattgggagcttgtttcagactttctccatctcctgctccctatcgagatctctcgtgcaggagggcactggaggcaaaacacaactggctggctgcctggccagtctcatgatcctgctagtgatccttgccactggatttctgttcgagtctctgccccagaccatctggctgactacatttgtgtcctctctctttttaggcctggattacggacttattaccgcagtcataatcgctcttctgacagtgatctaccgcacgcagagcccgtcatataaggtgttaggaaaactacccgagaccgatgtgtatatcgacatcgatgcatatgaagaagtgaaggagatcccagggatcaaaatctttcagattaatgccccaatctattacgctaacagcgacctgtatagcaacgcattaaaacgtaagaccggcgttaatcccgctgtcatcatgggtgctaggcgcaaggctatgcggaagtatgcaaaagaggtcgggaacgctaatatggctaatgctacggtggtcaaagccgacgccgaggtcgatggcgaagatgctaccaaacccgaggaggaggacggcgaagtcaaatatcctcccattgtcatcaagtcaacctttccagaggaaatgcagcgatttatgccaccgggggataatgttcatactgttattctggattttacccaagtgaattttattgattccgttggagtgaagaccctggctgggatcgtgaaagaatacggagatgttggcatctatgtctacctggctggatgttctgcgcaagttgtgaacgacttgaccagaaatcgcttttttgaaaaccctgccttatgggaactccttttccactcaattcacgacgccgtcctgggcagccagcttagggaagccttggcagagcaggaggcaagtgcgcctccttcacaggaggatctggaaccgaacgcaacccctgcaacgccagaagcctag

SEQ ID NO: 135159 - DNA, 1551 bp, synthetic construct
  misc_feature 1..1551: note = Description of Artificial Sequence: Synthetic coding sequence
  source 1..1551: mol_type = other DNA
atggaccatgcagaggagaacgagattctagccgcgacacagaggtattatgtggaaaggccaatattcagtcatcctgtgctgcaggaacgcctccatactaaggacaaagtccccgactccatcgccgataagctgaaacaggcttttacctgtacgcccaaaaagatccgcaatatcatttatatgtttctgccaatcacaaaatggctgcccgcctataagttcaaggaatatgtcctgggtgacctggtcagcgggatcagtaccggtgtcctgcaactgcctcaagggctggccttcgcaatgttggccgccgtcccgccaatcttcgggctctactctagcttctaccccgtgattatgtactgctttctcggcacctcaaggcacattagtatcggacctttcgccgtcatttctcttatgattggtggagtggctgtaaggctggtccccgatgacatcgttattcctggcggtgtcaatgcaaccaatgggaccgaggcacgcgatgctcttcgtgtcaaggtggcgatgtcggtcacactgctctcagggatcattcagttttgtctgggtgtctgccggtttggattcgtggcgatttatctgaccgaacccctcgtgcgcggcttcaccaccgccgcggcagtgcatgtattcacttctatgctgaaatacttattcggcgtcaaaacgaaaaggtacagcggaatcttttccgtggtgtatagtactgttgcagtgcttcagaacgtgaaaaatctgaatgtgtgttctctgggtgtggggttgatggtgtttggactccttctgggcgggaaggagttcaatgagcgcttcaaagagaagctgcctgcaccgattccccttgaattttttgcggttgtaatgggcacaggcatttcagcagggttcaatctcaaggagagctacaacgtcgacgtcgttggcaccctccctcttggcctcctccctcccgcaaaccctgatacttcactctttcacttggtctacgttgatgcaattgctattgcgatagtgggcttcagcgtgactattagtatggctaaaacattggcaaataagcatggatatcaggtggatgggaaccaagaattgatcgccctaggtctgtgtaactcaatcggcagcttattccaaacctttagcatatcctgtagcctcagtagaagcttggtccaggagggtacaggtggtaaaacgcagctggccgggtgtctagcttcactgatgatcctgcttgttatcctcgcaacaggctttctcttcgaatcgctcccacaggccgtgctgtccgcaattgttatcgtcaatctgaagggcatgttcatgcagtttagtgatctacccttcttctggcggacatccaagattgagctaactatttggctcactacttttgttagctccctctttctgggacttgactacggccttattactgccgtgattatcgccctgctgaccgtgatctaccgcacacaatcttttcacacggagatgactaggaggtggagaccctag

SEQ ID NO: 135160 - DNA, 1422 bp, synthetic construct
  misc_feature 1..1422: note = Description of Artificial Sequence: Synthetic coding sequence
  source 1..1422: mol_type = other DNA
atggatcatgccgaggaaaacgaaattttggcggcgacccaacggtattatgtggagcgtcccatcttttctcaccccgtactgcaggagaggctgcacaccaaagataaggttccggacagcatcgcggataagttgaaacaggcgtttacctgcacgcctaaaaaaatcagaaacataatttatatgtttctccccattaccaagtggctgccagcttacaagtttaaggaatatgtactgggcgatctggtcagcgggatctccacaggcgtcctccagctgccgcaggggctagctttcgctatgctggccgccgtgcctcccatctttgggctgtattcctcgttctatcctgtgatcatgtactgtttcttgggcacctctaggcacatatctattgggccgttcgccgtcatatctttaatgatcggcggggttgccgtgcggctggtgcccgatgacatagtcatccctggtggagtaaatgcaactaatggcaccgaggcccgggacgcactgcgtgtgaaagttgctatgagcgtcaccctgcttagcgggatcatccagttctgcctgggcgtctgtagattcggattcgtggcaatctacctgaccgagccattggtgcgggggttcactactgccgctgctgtgcacgtcttcacgtctatgctaaagtacctgtttggggtgaaaaccaaaagatacagcggcattttctccgtcgtgtatagcaccgtcgcagtcctgcagaacgtgaaaaatctgaatgtgtgtagtttaggggtggggctcatggtgttcggcctactcctagggggcaaagaatttaatgagcggttcaaagaaaagctgccggctcctatccccctcgagttcttcgcagtagtaatgggtactggtatctccgctggcttcaacctcaaggagtcttacaacgtagatgtggtcggtacactgcctctgggactgcttcccccggccaatcctgacacttccctgttccacctggtttacgttgacgctatagccattgcaatcgtcggcttctctgttactatttcaatggcgaagacactggcaaataagcatggatatcaggtcgacggcaatcaggagctcatcgccttaggactgtgcaattctataggctccctgtttcagaccttttctatttcatgctctctgtccagatcgctggtgcaggaaggcaccgggggcaaaacccagctggcaggctgcttagcttccctgatgatcctgcttgtcatcttggccaccggctttctattcgagtctcttccacagacaatctggctgacaaccttcgtctcctctctcttcctgggtcttgactatggtttgatcacagcagtgattatagccctccttactgtgatctacaggacacagcggtag

SEQ ID NO: 135161 - DNA, 2139 bp, synthetic construct
  misc_feature 1..2139: note = Description of Artificial Sequence: Synthetic coding sequence
  source 1..2139: mol_type = other DNA
atggaccatgctgaggaaaacgaaatattggctgcaacccagcgctactacgtggaaagaccaatcttcagccacccagtattgcaggaaagactacatacaaaagacaaagtacctgattctattgcagacaagctcaagcaggctttcacgtgtactcccaaaaagatccggaatattatatacatgtttttgccaatcaccaagtggctgccggcatacaaattcaaagaatacgtgctgggagatctggtcagcggcatctctactggcgttctgcagcttccacaaggccttgctttcgccatgttagctgccgtgccacctattttcggtctgtatagcagcttctaccctgtgatcatgtattgtttcttgggaacaagtcgccacatctcaatcggcccatttgcagtgatcagtctgatgatcggcggggtcgctgttagactggtgcccgatgatattgtgattccgggcggagtgaacgctaccaatgggacagaggctcgggatgctctgcgcgtgaaggtagctatgagcgtgaccctcctgtccggaatcattcagttctgtttgggcgtctgcaggttcgggtttgtggcgatttacctgacagaaccactggtgcgaggattcactacagcggctgcggtgcacgttttcacaagcatgctgaagtatctgttcggcgtgaaaactaagaggtatagtggcatcttcagtgtggtgtacagtaccgtggccgtgcttcagaatgttaagaatttaaacgtttgttccttaggcgttgggctgatggtttttggactgttgttgggaggaaaggagttcaacgaacggtttaaggaaaagctgccagcccccatccccctggagttctttgcagtggtgatgggcacaggaatcagtgctggatttaatctgaaggagtcctacaatgtcgatgtggtgggaactctcccattgggcctcttgccacctgcgaaccctgacacatcgctgttccacctagtgtatgttgatgctatcgccattgccatcgtgggattttctgtgactattagcatggccaaaacactcgctaataagcacggctatcaggttgacggaaatcaagagttgatcgcgctaggactctgcaatagcattggcagtctctttcagacctttagtatctcgtgttctctgagcagaagcctggtgcaggaggggaccggcggtaaaacacagctcgccgggtgcctcgcatctctcatgattttactagtgattctggctaccgggtttctttttgaatcactcccccaaaccatttggttgaccaccttcgtgtccagtttgttcctgggcctggactacgggctcattactgccgtaatcatcgccctgctgacagtcatttaccggacacagagcccatcctataaggtgctgggtaagctccccgaaacagacgtctatatcgatatagatgcttacgaagaggtgaaagaaattcccggtataaaaatttttcaaattaacgcacccatttactatgccaacagtgatttgtacagtaatgccttgaagcggaagacaggcgtgaacccggccgtgatcatgggcgccaggaggaaggccatgagaaaatatgcaaaggaagtcggcaatgccaacatggccaacgctacggtggtgaaagcggacgcagaagttgacggagaggacgcaactaagcctgaggaagaggatggggaggtcaaataccctccaatcgtgatcaagagtacattccccgaggaaatgcaacggttcatgccacctggcgataatgttcacacagtgattcttgattttacccaggtaaacttcattgattctgttggagttaagacacttgctggaattgtgaaggagtacggagacgtgggcatctacgtgtatttggccggctgctcagcccaggtggttaatgacttaacgcggaatcggtttttcgaaaaccccgcactatgggaactcctttttcacagcatccatgacgcagtactgggatcccagttgagagaggccttggctgagcaggaagcctctgctccacccagccaggaagacttggaaccaaacgcgaccccagcaacgcccgaggcctag

SEQ ID NO: 135162 - DNA, 1344 bp, synthetic construct
  misc_feature 1..1344: note = Description of Artificial Sequence: Synthetic coding sequence
  source 1..1344: mol_type = other DNA
atggatcacgccgaagaaaacgaaatcctcgctgcaactcagcggtattatgtcgagaggcctatcttctcacatccagtcctccaggagcgactgcacacaaaagataaggtgccggactctatcgccgataagctgaaacaggcttttacctgcacacccaaaaagatcagaaacattatttacatgtttctgcccattacaaaatggctgccggcttataagtttaaggagtacgtgcttggagatctggtgtcagggataagtactggggtcctgcagctcccgcaaggactcgccttcgctatgctggcggccgtgcctccaatctttgggctttacagtagcttctatcctgtcattatgtattgctttctcggtacaagccgtcacattagcattggacctttcgcagtcatctccctaatgattggcggcgtggctgtgagactggtccctgacgatattgtgattcctggcggggtcaatgctacaaacggcactgaagcccgtgatgccctgagagtgaaggtggctatgtcagtaacacttctgtccggcatcattcaattttgtcttggtgtttgcagattcggtttcgtcgccatttacttgacagaacctttggtgcggggctttacaactgccgccgcagtgcacgttttcacctctatgcttaaatacttgtttggtgtgaaaactaagaggtatagcggcatattctctgtggtttactctaccgtggccgtcctgcaaaacgttaagaacctcaatgtttgctcactaggggtcggactcatggtgtttggactactcctcggcggcaaggaattcaacgaacgattcaaggagaaactgccagccccaatacccttagaattctttgcagtggtgatgggcaccgggatcagcgctgggtttaacctaaaagagtcatataatgtggatgtcgtggggaccctgccactcggcctgttaccacccgctaaccccgatactagcttatttcatctggtctacgttgacgccatcgccatcgccattgtgggattttctgtaaccatttccatggccaagactttggcgaataaacatgggtaccaggtggacggcaatcaggaactgattgctctgggtctgtgcaactcaattgggagtctttttcagaccttcagcatctcctgcagcctgagtcgctctcttgtccaggaaggaaccgggggcaaaacgcagaccatctggctcaccacctttgtttcgtctctatttctaggactggactacggcttgatcactgcagtgataatagcactgctcacagtgatataccggactcaacgctag

SEQ ID NO: 135163 - DNA, 1956 bp, synthetic construct
  misc_feature 1..1956: note = Description of Artificial Sequence: Synthetic coding sequence
  source 1..1956: mol_type = other DNA
atggggttagctgatgcctcaggtccgagggacactcaggcactattgtctgctactcaggccatggatctgagacggagagactaccacatggaaaggcctctccttaatcaagaacacctggaagaattgggaaggtggggaagcgccccaaggacccatcagtggaggacatggcttcagtgtagcagggcccgggcctatgcgctgcttctgcagcacctgccagtgctcgtttggctccctagatatccagtccgcgattggctcctgggagatctgctctctggtttgtcggttgctattatgcagctgcctcagggccttgcctacgccctattggccgggctgccccccgtctttggcctctattcctccttttaccccgtcttcatttattttttgttcgggacgtctcgccacattagtgtcgtgttggaagtgtgttggaaactcccacagagcaaagtgggaaccgtggtcaccgccgcagtggcaggcgtcgtactcgttgtcgttaagttgttgaacgataagttgcagcagcagctgcctatgccgattccaggcgaactcctgacactgatcggcgctacaggcatatcttatggcatgggtctgaaacatagattcgaagtggatgttgtcggaaatataccggctggcctggtgccaccagttgcaccgaacacccagctcttctctaagttggttggtagtgctttcaccatcgccgtggtgggcttcgccatcgcgatcagcttgggaaaaatttttgctctacgccacggatacagagtagattccaatcaagagctcgtcgcactgggcctgtcaaatttgatcggtgggatcttccagtgcttcccggtaagctgttccatgagtaggtcccttgtccaggaatccactggaggcaattcccaagtagccggcgccattagctcactgtttattttactgatcattgtgaagttgggcgaactgttccacgacctgccgaaggccgttttggccgctataatcatcgtgaacctgaaagggatgttacgacagctctctgatatgcgctctctttggaaagccaatcgtgcggatctgcttatatggctggtgacctttacagctacaattctgctgaatctggacctagggctggtcgtcgccgtcattttttctcttctgctggtagtcgtgcgtacacagatgccacattattctgtgcttggccaggttcctgacactgacatttacagagacgtagccgagtactcagaagccaaagaggtccggggagtgaaagtcttcagaagtagcgcaacggtgtattttgcaaatgccgaattttattctgacgctctgaagcagcggtgcggtgtggacgtcgattttctgataagtcagaaaaagaaactgttgaaaaagcaggagcagctgaaactaaagcagctccagaaggaggagaagctgcgtaaacaggccgcttcccccaaaggcgccagtgtttcaatcaacgtgaacacctctttggaagacatgaggtctaacaatgtggaggattgcaagatgatggtgagttcaggagataaaatggaagatgcgaccgccaacgggcaggaagattctaaggcaccagatgggtcgaccctgaaggctttgggcctgcctcaaccagactttcatagcttgattcttgacttgggagccctgtcattcgtcgacacggtgtgtctgaagtcccttaagaacattttccacgacttccgtgagatcgaagtggaggtgtacatggccgcatgccactcccccgtcgtaagccagctcgaggccggtcacttcttcgatgcctctataactaagaaacacttgttcgcgagcgtgcacgacgctgttacctttgccctccaacacccgagaccagtgccagattcgccggtgtctgtcacgagactttag

SEQ ID NO: 135164 - DNA, 2217 bp, synthetic construct
  misc_feature 1..2217: note = Description of Artificial Sequence: Synthetic coding sequence
  source 1..2217: mol_type = other DNA
atggatctgcgtcgacgcgattaccacatggaacgcccattgcttaaccaagagcatctggaagagctcggccgttggggctctgcccctcgcacgcatcagtggcgaacctggctgcagtgctcaagggccagagcctacgctctgctactgcaacatctcccagtgctcgtttggctccccagatacccagttagggattggctgttgggtgatctactgagcggcctgtccgtggcaattatgcaactgcctcagggactggcctacgcattgctagctgggctcccgcccgtttttgggttgtatagctcattttaccctgtattcatttattttctctttggaacatctcgccatataagcgtcggcaccttcgcagtgatgtccgtgatggtcggttcggtcaccgaaagtctggccccacaggcgcttaacgactctatgatcaacgagaccgccagagatgccgctcgtgtccaggtggcgtcaacattgagcgtgttagtcggtctttttcaggtcgggttgggcctgatccatttcggatttgtcgtaacatacctgtctgagccattggtgaggggctacactacagcggccgccgtccaggtgttcgtctcgcagttaaagtacgtgtttggattgcacctgtctagccatagtggtccactttccttgatttacaccgtcctggaggtgtgttggaaacttcctcagtccaaggtggggaccgtggttaccgctgcagtcgccggagtggtgctggtggtcgtaaagctgctcaatgacaaactgcagcagcaattaccgatgcctattccgggcgagcttctgaccctaattggagcaactggaatctcttacggtatgggactgaagcataggtttgaagtcgacgtggttggcaatatccccgcaggcctggtcccgccagtagcaccgaatacccagctcttcagcaagttagtgggctccgcgtttacgatcgccgtggtgggatttgcaatcgcaatctcccttggaaaaattttcgcactgcgccacggctaccgagtggatagcaaccaggaactcgtggcattagggttgagcaatttaattggcggaatttttcagtgtttcccagtgtcctgtagtatgtcccgatctttagttcaggaaagcaccgggggtaactcacaggttgcaggggcaatttcatcccttttcattctgcttatcattgtgaagttaggggagctcttccacgatctaccaaaggctgttcttgcagccatcatcatagttaacctgaaggggatgcttagacagctgtcggacatgcgctcactctggaaagccaatcgcgccgatctgctgatctggctagtgacattcacggccaccatactgttgaatctcgatcttggtctcgtggttgccgtgatattttctctgctgctggtcgtagtgcggacgcagatgccccactactcagttctggggcaggtgcccgataccgatatatatcgggacgttgctgaatatagcgaagccaaggaggtccgtggggtgaaagtgtttcgtagctctgccaccgtttatttcgcaaatgcagagttttacagtgatgcattaaaacagaggtgtggggttgatgttgactttcttatttcacagaagaaaaagctgttaaagaagcaggaacaactcaagctcaaacagctccaaaaagaagagaagctgagaaagcaagccgctagcccaaagggggccagcgtgagtatcaacgtcaacacctctctggaagatatgaggtcaaacaacgtcgaggattgtaaaatgatgcaggtctcctccggggataaaatggaggacgccaccgccaacggacaagaagattctaaggcaccagacggaagtactcttaaggctttgggcttgcctcagcccgatttccacagtctgatcctggacttaggcgccctgtcttttgtcgatactgtatgtctgaagtctctgaagaacatctttcacgattttcgcgaaattgaggtggaagtatatatggcagcatgtcactcaccagtggtctcgcagctggaagcagggcacttcttcgacgcctctattacaaagaagcatttgtttgcctcagttcacgatgctgtgacgttcgcactgcagcacccaaggcctgtgcccgactcccccgtcagcgtgacccggctgtag

SEQ ID NO: 135165 - DNA, 2223 bp, synthetic construct
  misc_feature 1..2223: note = Description of Artificial Sequence: Synthetic coding sequence
  source 1..2223: mol_type = other DNA
atgggattggccgatgcgagcgggccaagagacactcaagccctcctcagcgcaactcaagcaatggacttacgcaggcgtgattatcacatggagcgccccctgctcaatcaagaacatctcgaagagctgggcagatggggaagcgcacctcgcactcaccagtggcgaacctggctgcagtgtagccgagcccgagcttatgctttgctgctacaacacctaccagtattagtttggctcccgaggtaccccgtgcgagattggcttctgggcgatcttctgtctgggctctcagtcgctattatgcagctacctcaggggctcgcatacgcgctcctggccgggctccctccagtcttcggattgtattcatccttttatcccgtgttcatttatttcctgtttggtacaagccggcatataagcgttggaacattcgcagtgatgagtgtgatggtcgggagcgtgacagagagcctcgccccccaggccctcaatgactccatgattaatgagacggcccgggacgccgctcgggtccaagtggcgagtacattaagcgtgctagtgggcctattccaggttgggttggggctgatccacttcggctttgtggttacttacttgagcgaaccactcgtgcgtggatacactactgccgcagcggtgcaggtgttcgtaagtcagctgaaatacgtctttgggcttcacctttcatcccactcaggccctctcagtttgatctatactgtactagaggtgtgctggaagttgccacagagcaaagtcggtaccgttgtgaccgctgccgtggccggagtcgtccttgtggtggttaagctactgaatgataagcttcagcaacagctcccaatgccaattccgggtgagcttttgaccctgattggtgccacggggatttcttacgggatgggactgaagcacagattcgaagtggacgtcgttgggaatatccctgctggattggtcccccctgtcgccccaaatacccagctgttctctaagctagtcggctctgctttcacgattgccgttgttggatttgccatcgcaatatctctggggaagatatttgctctgcggcacggataccgagtcgactcgaaccaagagctggtggcccttggactgtcaaacctcattggaggtatatttcagtgtttcccagtgagctgttcaatgtcaaggagtctagtacaggagtctaccggggggaattcacaggtggcaggcgccatcagttcactctttatcttgctgatcatagtgaaactgggggagctcttccacgatttgcccaaggccgtgcttgctgctatcatcatagtgaatttgaaaggtatgctccgccaactatctgatatgaggagcctatggaaagcaaaccgggccgacctcctaatatggctggtcaccttcacagccactatcctccttaacctcgatttgggacttgtggtagccgtaattttctcgctgttgctagttgttgtgcgaacacaaatgccgcactacagcgtgctagggcaggtgccggacaccgatatatatagagacgtcgcggaatattcggaggcaaaggaggtacggggtgtcaaagtgtttagatccagcgctacggtgtatttcgcaaatgctgaattttattccgatgcactgaagcagaggtgcggcgtggacgtggattttttaatctcccagaaaaaaaaactgctgaagaagcaagaacagctgaagctgaaacagctccagaaggaggaaaaactacgaaagcaagctggaccattgctgagtgcctgcctcgcaccccaacaggtatcctcaggcgataaaatggaagatgctacggcgaacgggcaagaggattccaaggcccctgacgggagtacactaaaagctctgggactaccccagccagacttccacagcctcattctggatctgggagcactctccttcgtggacactgtctgccttaaatcactgaagaatatcttccacgactttagggagattgaggtggaggtgtacatggctgcatgtcacagtccagtcgtctcccagctggaagctggtcactttttcgatgccagcattaccaagaagcacctgtttgcctccgtgcacgatgccgtgacattcgccctgcagcaccctcgtcctgtgcctgatagtcccgtttcggtgactaggctatag

SEQ ID NO: 135166 - DNA, 2280 bp, synthetic construct
  misc_feature 1..2280: note = Description of Artificial Sequence: Synthetic coding sequence
  source 1..2280: mol_type = other DNA
atgggcctggctgatgcttcaggcccacgagatacgcaagctctcctcagtgcaacccaggctatggacctgcgacgaagagactatcatatggagagaccactgctgaatcaagagcatctggaggagcttggccggtggggttcggcccctcgaacacatcagtggcggacttggctgcagtgtagccgggcccgcgcttacgctctcctgttgcagcacctccctgtgcttgtttggctgcctcggtatcccgtcagggactggctgcttggagacctactgagtggcctgtccgtggctataatgcagttgcctcagggcctggcgtacgcactgctggccgggcttcctccagtctttggtttgtattcatcattctacccggtttttatctacttcctgtttggaacttccaggcatattagcgttggtactttcgccgtgatgtctgtgatggtggggtcggtcacggaaagccttgcaccccaggccctgaacgactctatgatcaatgaaacagcgcgcgacgccgctagggtacaggtggccagtactttgtcagtcttagtgggcctgtttcaggtcggactgggcctgattcatttcggattcgtcgttacctacctttcggagccccttgtgcgcggctacaccacggccgccgccgtgcaagtcttcgttagccaactgaaatacgtatttggactgcacctgtcgagccattcaggccccctcagtttgatttatacagtcttggaggtctgttggaagctgccgcagtctaaagtcgggaccgtggtaaccgccgctgtagctggcgtcgtgctggttgttgtcaaactgctgaacgataagttgcaacaacagttgcccatgcccatcccgggggaactattaactctcattggagcgacgggcatatcctatgggatgggtttgaaacacagattcgaggtggacgtcgttggtaacatccccgccggcctagtaccaccagtcgctcccaacacacagcttttctcgaagctcgttggcagcgcgtttaccattgcagtggtcggcttcgctatcgccatttccttaggcaaaatcttcgcactccgacacggatacagggtggattcaaaccaggaactcgttgcgctcggcctttctaacctgatcggcggaatcttccagtgtttcccagtgtcctgcagcatgagtaggagtctcgttcaggaatctacaggaggcaactcccaggtggccggcgctataagctctttgttcatactcttgataatcgtgaagctgggcgagttatttcatgacctgcctaaggctgtactggcagctatcatcatcgtgaatcttaaaggtatgttgcggcagctgtctgatatgcggtcgttatggaaggcaaaccgagcggatttgctgatctggctggtgacattcaccgcaaccattctcctcaatcttgatctggggctggtggtggctgtgatattttcactactccttgtggtcgttcgcacccaaatgccacattattcagttctcggtcaggtcccagacacggatatttaccgtgacgtggcagagtatagcgaggcaaaagaagtccgcggcgttaaggtttttcgctcaagcgccacagtttacttcgctaatgcggaattctattccgacgccctgaagcaacgctgcggagtggacgtggatttcttaattagccagaaaaagaagttgctgaagaaacaggaacaactgaaactgaagcagctgcagaaggaggaaaagcttagaaagcaggctgcctcaccaaagggagcttcagtgtcgatcaatgtgaacacgagtcttgaagatatgaggagcaacaacgttgaggattgcaaaatgatgcaagtgtcttccggggataaaatggaggatgctacggcgaatgggcaggaggattctaaggctcccgatggttcaacattgaaggctttgggacttccccagcctgactttcactctttaatcctggatctgggtgcactcagcttcgtagataccgtttgtctcaaatctttgaaaaatatctttcacgatttcagagaaatcgaagtcgaagtgtacatggctgcttgtcactccccagtggtgtctcagttggaggccggccacttcttcgatgcatctatcactaagaagcatttgtttgctagcgtgcatgacgccgttacctttgcattgcaacacccccgtcccgtgcccgactcccccgtgagtgtgactcgcctgtag

SEQ ID NO: 135167 - DNA, 2277 bp, synthetic construct
  misc_feature 1..2277: note = Description of Artificial Sequence: Synthetic coding sequence
  source 1..2277: mol_type = other DNA
atgggcctcgccgacgcctccggaccaagggacacgcaggccctgctgagtgctacacaagctatggatctaaggcggagggattaccatatggagcggcccctgctgaatcaagagcacctggaagaactgggcagatggggctccgctcctagaacacatcagtggagaacctggttgcagtgcagcagggctcgcgcatacgctctactgttgcagcacctgcctgtcctggtttggttgccacgttatcccgtgagagactggcttctgggtgatcttcttagtgggctgagcgtggccataatgcagctgccacaaggtctggcctacgcccttctagccgggctcccacctgtgttcggactgtacagcagtttctatccggtgttcatctactttctgttcgggacgtcccgccatatatctgtgggcactttcgctgtcatgagcgtcatggtgggcagtgtgacggagtctctggccccccaggcacttaacgacagcatgatcaacgaaaccgcaagggacgccgccagagtccaggtcgcttccactctttccgtgctggtgggcctgttccaggtggggctcggcttgattcactttggctttgtggtgacgtatcttagtgagcctctggtgagagggtacacgaccgccgcggccgtgcaagtctttgtgtctcagctgaagtatgtcttcggcctgcacctctccagccatagcggccctctgagcctgatttatacagtgctcgaagtatgttggaaactcccacagagtaaggttggaacggttgtgacagcagctgtcgctggggtggttctggtcgtcgtgaaactgctgaacgacaagcttcagcagcagcttcccatgccaatacccggggaacttctgacactgataggggctactggtatttcgtatggcatgggactgaaacatagattcgaagttgatgtggtcgggaacattcccgcagggcttgtaccaccggttgctccaaacacccagctctttagcaaattggttggctcagcctttacgatcgctgtggtgggctttgctatagctattagcttaggtaaaatttttgcgctccgtcatggttatagagtcgactcaaaccaggaactggtcgcactgggactatctaatctcatcggcggtatctttcagtgcttccccgtgtcctgcagcatgtcacgaagtctggtgcaagaatctaccggaggaaatagtcaggtggccggtgcaatcagttcattatttattctgctaatcatcgtcaaacttggtgagctgtttcacgacttgccgaaggctgttctggccgctataatcatcgtgaacctgaaaggcatgttgagacaactgtctgacatgaggtctctgtggaaggcaaacagggccgatctactcatctggctggtgaccttcaccgctaccatacttctcaatctggacttgggcctggtggtcgccgtgatcttctctttactgctggtggtggtccgaacacagatgcctcattacagcgtgttaggtcaggtcccagacacagatatctaccgggacgtcgccgagtatagcgaagctaaggaagtccgaggcgtgaaagtttttcgctcctccgccaccgtttatttcgctaacgccgagttctactccgacgccctcaagcagcggtgcggggtggacgttgattttctgattagccagaagaaaaagttgcttaagaagcaggagcaacttaagctgaaacagctgcagaaggaagagaaactgaggaagcaggccgcttctccgaaaggagcgtcagtgtccatcaatgtgaatacaagcctggaggacatgcggagcaacaacgtcgaagactgtaagatgatggtgagctccggagataagatggaggacgcaaccgccaatggccaagaggactcaaaagctcccgatggtagcacattgaaagccctggggctcccacagcctgattttcacagtctgattttggatcttggggccctttcttttgtcgacaccgtctgcttgaagagtctgaagaacatctttcacgactttcgggagatcgaggtcgaggtttatatggccgcctgccactctccagtcgtttctcagcttgaggctggccacttcttcgacgccagtataacgaaaaagcatttgttcgcaagtgttcatgacgcagtgacatttgccctccagcaccccagaccagtgcccgattccccagtttctgtgacacgactgtag

SEQ ID NO: 135168 - DNA, 2262 bp, synthetic construct
  misc_feature 1..2262: note = Description of Artificial Sequence: Synthetic coding sequence
  source 1..2262: mol_type = other DNA
atgggcctggcagatgccagtggtccccgcgatactcaggcactcctctccgcaacccaggcaatggacctgcggcgtcgggactaccacatggagaggccactgttgaaccaggaacatctggaggagctgggaagatggggatcggcaccacgaacacatcagtggcggacctggctccagtgcagcagggccagagcgtacgcccttcttctgcaacatctgccggttctcgtttggcttccccgttaccctgtgagagactggctgttaggggatttgctttcaggactgtctgtggctatcatgcagctccctcaggacctgctgagccgcctccactgttaccattccacacttggactcgcttatgcccttctggccggcctcccacccgtgttcgggctctattcttccttttaccctgtgttcatctattttctattcggaaccagccgtcacatctcagtgggcactttcgcagtgatgtctgttatggtggggtccgtcactgagagcctggctccacaggcgcttaatgactccatgatcaacgaaactgccagggatgcagcgagagtgcaggtcgcctcaaccctgtccgtccttgttggcctgttccaggtgggactgggcctcatccatttcggcttcgttgtgacatatctgtcggagcccctggtgcggggatatacgaccgctgcagccgtacaggtgtttgtcagccaacttaaatacgtgtttggcttgcacctgtcatcccattctggccctctgtcactcatctataccgttttggaggtctgctggaagctgcctcagtccaaggtggggaccgtcgtcaccgcggcggtggcaggagttgttctggtggtcgttaagctgttgaatgacaagctccagcagcaactcccaatgccaattcccggggagcttctgaccctgattggcgccacgggcatctcctacggtatggggctgaagcaccgcttcgaagttgatgttgttgggaatatccctgccggcttggtcccccccgtggcccctaacacacagctcttcagcaagctcgtgggctctgcttttactattgcagtggtgggcttcgccatcgccatctccctgggcaagattttcgctcttcggcacggttacagggtggactccaatcaggagctggtggctctcggactgtccaacctgataggtgggatattccaatgctttcctgtctcttgttctatgtcccggtccttggtgcaagagagcacaggtggaaattcacaggtggccggcgctatctcctctctctttattttgctgatcattgtgaagctgggagagctattccacgatcttcctaaggccgtgctagccgccatcatcatagttaatctgaagggcatgctcaggcagctttctgacatgcgatcgctatggaaagcaaaccgagccgatctcctgatctggctggtaacatttacagccaccattctgttaaacctggatttgggcctggttgtggccgtcattttttctctgcttctcgtggtcgtccgcactcaaatgcctcactatagcgtgctgggccaggtccctgatacagatatttaccgggacgttgctgaatattccgaagccaaagaggtgcggggtgtgaaagtttttagaagcagcgcaaccgtctactttgctaatgccgagttttacagcgatgctttaaaacaaagatgcggagtggacgtagattttctgatcagtcagaagaagaagctgctaaaaaaacaggaacagcttaagctcaagcaacttcagaaggaggagaagctcagaaaacaggccggcccattgctgtcggcgtgtctggctccccagcaggtgtcttccggtgataaaatggaggacgcgacagcaaatggccaggaggactcaaaggctcctgatggatccactcttaaggccctcggactgccccaacctgatttccactctctcattctggatctgggcgcccttagcttcgtggacaccgtgtgtttaaagtccctgaaaaatatatttcacgacttccgggaaattgaggtcgaggtctatatggcagcctgtcactctccggtcgtttcccagttggaagccggccacttcttcgatgcttctattaccaaaaaacatctgtttgcttcagttcacgacgctgttacatttgccctacaacatcctcggccagtcccggatagcccagtcagcgtcactagactttag

SEQ ID NO: 135169 - DNA, 2172 bp, synthetic construct
  misc_feature 1..2172: note = Description of Artificial Sequence: Synthetic coding sequence
  source 1..2172: mol_type = other DNA
atggggcttgctgacgccagcgggccgagagatacccaggctttactgtcagccacacaggcaatggaccttagacggcgggattaccatatggaaagaccactgctgaaccaggaacatctggaggaattaggtcgatggggatccgccccgcggacccatcaatggagaacctggcttcaatgttcccgtgccagagcctacgcacttcttttacagcatcttccggtgctcgtgtggctccctcgctacccagtgagggactggcttctgggggatctgctaagtggtctgtccgttgccattatgcagttgcctcagggtttagcgtacgccctcctggccggcttgccgcccgtgttcggactgtacagctcattttaccccgtgttcatatacttcctgttcggcacttcacgtcacattagcgtcgccacgccaggtccactgcctctgctcaccgcaccaggccggccaacgggaggggcgggccccgatcctctgcggctcaggggccacttgccagtgcggaccagttgtccaagactttatcactcttgcagctgcgctgggctaagactgacggcacaggtttgtgtgtggcccccaagcgagcagccactgtgggccacggtgcctcacctgctccttgaggtctgttggaagcttccccagtccaaggtcgggactgttgtgaccgccgctgtggcgggcgtggtgctcgtggtggtcaaactactaaatgataaattgcagcagcaattacctatgccaatccccggcgagctccttactttaattggcgctaccggcatcagctacggaatgggcctcaagcaccggtttgaagtggacgtagtgggcaatatccctgcaggtcttgtgccgccagtcgcccctaatacacagttgttttctaaacttgttggaagtgctttcacgatcgcagtcgtgggtttcgctattgcaatatccctcggcaagatcttcgccctccgacacggctaccgagtcgactctaaccaagagctcgtggccctggggctcagcaacctgattggaggaatctttcagtgtttccctgtcagctgtagtatgtctcgctcattagtccaggagtccactggcggcaattcgcaagtggctggagccattagctccttgtttatcctgttgataatagtaaagctgggcgaattgttccatgacctccccaaggccgtgctcgccgcgatcattatagtgaacctgaaaggcatgctacgacaactgtctgacatgcgctctctgtggaaagctaaccgggcagacctcctcatatggctggtgacctttaccgcgaccatcctacttaatttggacctggggctagtggttgcggttattttttccctcctgctggtggtggtccgaacccagatgccccactattccgttctcggccaagttcctgatacagatatctacagggatgtagccgaatactctgaagctaaagaagtgagaggggtaaaggtgttccgtagctcagccactgtttactttgcaaatgccgagttctattcagatgccttgaagcagcgatgcggagtggacgtagactttctaatcagccaaaagaaaaagctattaaaaaaacaggagcagttgaaactgaagcagctccagaaggaagagaagcttcgtaagcaggccgcaagccccaaaggagccagcgtgtccataaacgtgaacacgtcccttgaggatatgaggtctaacaatgtcgaggattgcaagatgatgcaggtcagctcaggggacaagatggaggacgcgaccgccaatgggcaggaggactctaaagcaccagatggctctactctgaaggccctggggctgccccagccagattttcacagcctgatccttgatctcggtgccctgtccttcgtggacaccgtttgcctgaaaagcttgaagaacatttttcatgacttcagggagattgaggtggaggtgtatatggccgcctgtcacagccccgtggtgtcacaattagaggccgggcatttttttgacgcgagtatcacaaaaaagcatctctttgcaagcgttcacgacgctgtcacatttgccctgcagcatcccagacctgtgcctgattcaccagtgtctgtaactaggttatag

SEQ ID NO: 135170 - DNA, 1941 bp, synthetic construct
  misc_feature 1..1941: note = Description of Artificial Sequence: Synthetic coding sequence
  source 1..1941: mol_type = other DNA
atgcgtgccccaggcgctggcgctgcaagtgtagtatccctagctctgctgtggctgctgggtctgccgtggacttggtcggccgctgccgccctgggcgtatatgtcggaagtggaggctggagatttctgcggatcgtgtgcaagactgccagaagagatctgtttggccttagtgtgttgattagagtgcgccttgagttgagacggcatcagcgcgcggggcataccatccctaggatcttccaagccgtagtgcagcgccagcctgaacgactggccctggtcgacgctggcacgggcgagtgctggacttttgcccagcttgatgcttattctaatgccgtggcgaacctcttcaggcagctaggattcgcccctggagacgtcgtggccatcttcctagagggccggcccgaattcgtgggactctggcttggtttggccaaggccgggatggaagcagcacttctgaacgtaaatttgcggcgggaacctctggctttctgcctgggtacaagtggtgccaaagcgcttatttttggaggcgagatggtcgcagccgtggcggaggtgtctggccacctggggaagtctctgattaaattttgcagcggtgatttaggtccagagggcattctgcccgacacccaccttttagatccgctcctcaaggaagccagcactgccccactggctcaaataccttccaaaggtatggatgacaggctcttttacatctatactagcggtacaacaggcctgcctaaggccgccatagtagttcatagccgatattatagaatggctgccttcgggcaccacgcttacaggatgcaggcggctgatgtgctctacgattgcctgcctctataccactcagcgggaaacataattggcgtcggccagtgcctcatttatgggctgactgtcgttttacgcaaaaagtttagcgccagcaggttctgggatgattgcatcaaatacaattgcactgtggttcaatatattggagagatttgccgatacctactgaagcagcctgttagggaggctgagaggcgccaccgtgtcagactggcagtcggcaatggcttacggcccgcgatctgggaagagtttactgagaggtttggagtcaggcaaatcggagaattttatggcgctacggagtgcaactgctcgatcgcgaatatggacgggaaagtgggcagctgcggattcaatagccggattctcccacatgtctaccccataagacttgttaaggtgaacgaggataccatggagctgctgcgggatgcacaggggttgtgcatcccctgccaggccggggaacctggacttcttgtgggacagattaaccagcaggacccgcttcgccggttcgatggctacgtgtccgagtccgccacatcgaaaaagatcgcacacagtgtgttcagtaagggagactccgcctatctgagcggagacgtgctggtcatggacgaactgggctatatgtacttccgtgacaggtccggcgatacgtttaggtggaggggcgagaacgtaagcaccaccgaagttgagggagtgctgtcccggctgctggggcagaccgatgttgctgtttatggtgtagcagtgccgggcgttgagggcaaagccggtatggctgctgttgccgacccccactctcttctggacccaaatgctatctaccaggaacttcagaaggtactggcgccatacgcaaggcccatcttcctgagactcttgccccaggtggacacaacaggaacattcaaaattcagaaaacacgtctccaacgagaggggtttgaccctcgacagacaagtgacagactgttctttcttgacctcaaacagggacattatctccctctcaatgaggccgtctacacccgcatatgtagcggggcattcgctctttag

SEQ ID NO: 135171 - DNA, 723 bp, synthetic construct
  misc_feature 1..723: note = Description of Artificial Sequence: Synthetic coding sequence
  source 1..723: mol_type = other DNA
cccgagttcgtgggattgtggctgggcttggcgaaagccggcatggaagcagctctactgaacgtgaacctacggagagaacctcttgcattttgtctgggaacatcaggggcaaaagccctgatcttcggaggtgagatggttgccgccgtggccgaggtaagcggccatctgggaaaatccctgattaagttttgctcaggggacctgggccccgaaggaattctgcctgacacccatttgctggatcctctgttgaaggaagcaagtacagctccactggcacaaatccctagtaaagggatggacgacaggctgttctatatttacactagtggcactaccgggttgcccaaggcagctatcgtcgttcactcccgatattacagaatggcagctttcggccatcacgcatacaggatgcaagctgcggacgttctgtacgactgtctgcctctgtatcacagcgctggaaatatcatcggagtgggacagtgcctgatatacggattgaccgtggttcttaggaaaaagttcagcgcttccaggttctgggacgattgtattaagtataactgcacctggcacggtcctagctggacagagaagctagagccgcagcgaaacccttgcctgtcagcagctcttgtgcctctttgcttgccacccctgccggccttccagccactgtcaccaagtatccctgttccggtttggccatag

SEQ ID NO: 135172 - DNA, 1941 bp, synthetic construct
  misc_feature 1..1941: note = Description of Artificial Sequence: Synthetic coding sequence
  source 1..1941: mol_type = other DNA
atgagggcacccggggctggtgccgcgagcgtggtgtctctcgctttgctttggctgctgggtctgccttggacctggagcgcggccgctgcgctaggagtgtacgtagggtcagggggctggagattcctgcgcatcgtttgtaagactgctagacgagacctcttcggcttaagtgtgctaattcgagtcaggttagaactcagacggcaccagagagccgggcataccattcctaggatctttcaggccgtcgtccaacgacagcccgagaggctagccctggttgatgcgggaacaggagagtgttggaccttcgcccaactggatgcttacagcaatgccgttgccaaccttttcaggcaacttgggttcgcccccggagacgtggtggcgatctttctcgaaggaaggcctgagttcgtcgggctctggctgggactggcaaaggcgggaatggaggcagccctcttgaatgtgaacctcaggagagaacccctggctttctgtttgggcacttcgggggccaaagcattaatcttcggcggagaaatggtggctgcagttgctgaagtgtcaggtcacctcgggaaatctctaattaaattttgctctggcgacctagggcccgaaggtatcctgcccgatacccacctcctggaccccctgctcaaagaggccagcaccgcccccctagcccaaatacctagcaaaggtatggatgacagactgttttacatctatacaagtggaactacagggctgcccaaggctgccattgttgttcacagccgctactaccgcatggcggcttttggacatcacgcataccgtatgcaggccgccgatgtgctatacgactgtttgcccctatatcatagcgcgggcaacattattggagtggggcagtgcttgatttatgggctcactgttgttctccggaagaaatttagcgccagcaggttttgggacgactgtataaagtataactgcacagtagtgcagtatattggggaaatatgtaggtacctcctgaaacagcccgtaagggaggcagagcgcagacaccgcgtgagactagctgtgggaaacgggctcagacccgcaatttgggaagagtttaccgaacgctttggggtgagacagatcggtgaattttacggagcgaccgagtgcaactgcagcatcgctaatatggatgggaaggtcggcagttgcggattcaattctcggattctaccccatgtctaccctatccgcctggttaaagttaatgaggataccatggaacttctccgcgatgctcagggcctctgcatcccatgccaagccggcgaaccaggcctcctagtggggcagatcaaccagcaggaccctctacgcaggttcgatgggtatgtaagcgagtctgcaacgtctaaaaagatagcccactctgtcttttcaaagggtgacagcgcctatctgagcggggacgtcctcgtcatggatgagcttggctatatgtacttcagagacaggtcgggggatactttccgttggaggggtgagaatgtctccacaactgaggtggagggggtgctgagccgactgctgggccagaccgatgtcgcagtatacggcgtggcagttccgggggtggaaggtaaagcgggaatggccgccgtggccgacccccactctctcctggacccaaacgcaatctatcaggaacttcagaaggtgctggcgccatacgcccgtccaatctttcttcgcctgctcccgcaggtagacactacagggacattcaaaattcagaaaacgcgcctgcagcgcgaaggattcgaccctaggcagacttctgacagattatttttcctggacctgaagcaaggacactacctccccttgaatgaggcggtgtacacacgcatttgtagcggggcctttgctctgtag

SEQ ID NO: 135173 - DNA, 1863 bp, synthetic construct
  misc_feature 1..1863: note = Description of Artificial Sequence: Synthetic coding sequence
  source 1..1863: mol_type = other DNA
atgttaagtgccatttataccgttttggccggtttgctgtttctgccgctgctggtaaatctatgttgtccctatttcttccaagacataggctatttcctcaaagtggccgcagtgggacggcgtgtccgaagttacggcaagcgtcgacctgccagaaccattctgcgggcctttcttgaaaaagcccggcagacccctcacaaacctttcctcctgttcagggatgagacactcacctatgcccaggtcgatcggcgtagcaaccaggtggctagggctctacacgaccatctgggcctgagacaaggcgattgcgtggctttgcttatgggaaatgagcctgcgtacgtgtggctgtggctggggctggttaaactgggatgcgccatggcctgtcttaactacaacatccgcgccaagtcactgctgcactgttttcagtgctgcggagccaaagtcctgttggtgtctcctgagttgcaggccgccgttgaggagatactcccctcactcaaaaaggacgatgtgtccatttactacgtaagtcggacatccaacactgacggaatagactccttcttggacaaggtggatgaagtgtccaccgagcccatccctgaatcttggcggtccgaggtgaccttctctacacccgccctgtacatctataccagcgggacaactggactgcctaaggctgccatgatcacacaccagagaatctggtatggaactgggctgactttcgtcagtggcctaaaagccgacgacgttatttatattacactgcccttttaccattccgccgccctgctcatcggcatccatgggtgtattgtcgctggcgctactctggcgctaagaactaaattctccgccagtcagttttgggacgactgtcggaagtataacgtaacagtcatacaatacattggggaattgctgcgatatctgtgcaactctccccagaagcccaacgatcgagatcacaaggtcaggcttgcactggggaacgggctgcgaggcgacgtgtggcgccagttcgtgaaacgctttggcgatatctgcatttatgaattttatgcagccaccgagggtaatatcggattcatgaattatgccagaaaagtgggggctgtgggcagagttaactacttacaaaagaagatcatcacgtatgatctgattaaatatgacgtggagaaagacgagcctgtcagagatgaaaacggctattgcgtgcgtgttccaaaaggggaagtggggttattggtgtgtaagatcacacagctcacacctttcaatggatatgcaggagccaaggcccagaccgagaaaaagaagctacgcgacgttttcaagaagggtgacctctactttaattctggagatctcctgatggtcgaccatgagaactttatttacttccacgatcgtgtgggcgacacatttaggtggaagggtgagaatgtagccactacagaggtggccgatacagtgggcctggtggactttgttcaagaagttaatgtttatggcgtccacgtgcctgaccacgaaggtaggatcggcatggctagtatcaagatgaaggagaatcatgagttcgatggaaagaaattattccagcacatcgcagactaccttccaagttacgcaagaccgcgctttctgaggattcaggacacaatagagataacggggacatttaaacaccgcaagatgacactcgtggaagagggcttcaatcccgccgtcatcaaagacgccctctacttcctcgacgacacggctaagatgtacgtgcctatgacagaagatatatataacgcgattagcgctaagaccctcaaactatag

SEQ ID NO: 135174 - DNA, 1704 bp, synthetic construct
  misc_feature 1..1704: note = Description of Artificial Sequence: Synthetic coding sequence
  source 1..1704: mol_type = other DNA
atgctttcagccatctacactgttctggccggccttctcttccttcctcttctcgttaacttgtgctgcccttattttttccaggacatcgggtatttccttaaagtggctgctgtcggacggcgggtgcgatcttatggtaaacgcaggcccgcaagaacaattctgcgagccttccttgagaaggctcgtcagactccgcacaagccttttcttctgttccgggatgaaacgcttacgtacgcccaggtggacagacggagcaaccaggtggcacgcgccctccacgaccatttaggcctgcgccagggtgactgtgtggcccttctgatgggcaatgagccggcatacgtgtggctctggctcggcctggtgaaactcggctgcgccatggcctgtctcaattataatatccgggccaagtctctgttacactgttttcaatgttgtggggccaaggtattactggtgtcccctgagctgcaggctgcagtggaggagatcctcccctctttgaagaaggatgatgtctccatttactacgtgtcgagaacatccaacaccgacggcatcgactcatttcttgacaaagttgacgaggtctctacagagcccataccagagtcttggcggagtgaggtaacatttagtacccccgccttatacatttacacaagtggcactaccggggccactctggccctccggactaagtttagtgcaagccagttttgggacgattgtcgcaagtacaacgtaactgtcatccagtatattggcgaactccttagatacctgtgtaacagcccccaaaagcccaacgatcgggatcataaggtgcgactcgccctcggcaacggtttgcgcggcgacgtctggaggcaatttgtaaagcggttcggggatatttgtatttatgagttctatgccgctactgagggtaacatcggatttatgaattatgctcgcaaagtcggggccgtgggaagagtgaattacctgcagaaaaagatcattacctacgatctgattaaatatgacgttgaaaaagatgaacccgtccgcgatgagaacgggtattgcgtccgggtgccaaaaggtgaagtgggcctgctggtctgtaagattacccagctcacgcccttcaatgggtatgctggggccaaggctcagacagagaaaaagaaattgcgggacgtttttaaaaagggagacctctactttaactcaggcgatcttctcatggtagatcatgagaacttcatttatttccatgatcgggttggtgatactttcagatggaaaggcgagaacgtcgccaccaccgaggtggctgacacagtggggctggttgacttcgtgcaggaggtaaatgtctacggcgtccacgtgcccgatcatgagggccggatcgggatggcttctatcaaaatgaaagagaaccatgaattcgacgggaagaaactgtttcagcacatcgcagattatctgccttcctatgcccgaccccgctttctgcgcatccaggacactatcgagataacaggcacctttaagcacagaaagatgacccttgtggaggagggtttcaaccccgctgtcattaaagatgcactgtattttctggatgatacagccaaaatgtatgtcccgatgaccgaagatatctacaacgccatctcagcaaaaacactcaagttatag

SEQ ID NO: 135175 - DNA, 2436 bp, synthetic construct
  misc_feature 1..2436: note = Description of Artificial Sequence: Synthetic coding sequence
  source 1..2436: mol_type = other DNA
atgcccaagccccccaaaccacggaataatcttgaagatagacacaatcctggaatccaaggacgtagagaacaccgacctggtccaggtcgggtgagggctgccagctcacccggagggtcagcacccagagcagaacggcgcctgtggggcgaggggtgggagtctggtgctgcaccccatccccatagctctcgcgtctccgctctgaggccctgtggcgtggtgggagcatgggttggtatgggtgtgtgtcagcgtaccagagccccttggaaagaaaaatcacagcttgagagggcagccctcggtttcaggaaaggcggatctggtatgttcgcatccggctggaaccagactgtgcccatagaggaggcggggtcaatggccgcgctgctcctcctgcccttactactgctgctgcctctcctcctactgaagttgcacttgtggccacaactgcgctggctgcccgccgatctggctttcgccgtaagggccctgtgttgtaagcgagcactgagagcccgagctctggccgcagctgcagctgaccctgagggacctgagggaggctgttctcttgcatggaggctcgccgagttagcccaacagagagccgcccatacgttcctaatacacgggtctcgcagattcagctatagcgaggccgagagagagagcaatcgagccgcaagagccttcttgagagcgttgggctgggattggggaccagatggcggagacagcggagaagggagtgccggcgagggtgagcgggcggcccccggggctggcgatgccgctgcagggagcggagccgaattcgccggcggtgatggggcagctagggggggtggagccgccgcacctctcagccctggggctacagttgccttgttactgccagcagggccagaatttttgtggttgtggttcggacttgcaaaagcaggtctccgtactgcttttgtaccaacagcgctgcgaaggggacctctgctgcactgcttacgatcttgtggagcccgagccctagtcctggcacccgagtttctagaaagtttagagcccgacctgccagcgctaagggccatgggattgcatttgtgggctgctgggccgggtacgcatcctgccgggatttccgatttgctggccgaggtgagtgctgaggttgatgggcctgtccccgggtacctatcctctccccagtcaattactgacacctgcttgtatatctttacaagcggcacaactgggctccccaaggcagcgaggatttcccatttgaagattctgcaatgtcagggtttttatcagctatgcggggtgcaccaggaggacgtgatttacttggcgctcccactatatcatatgagcggatcactcctcgggatcgtcggatgcatgggcattggggccacagtggtgcttaaatcaaaattcagtgctggacagttctgggaagactgtcagcagcatagagttaccgtcttccaatacatcggagaactgtgccgttatctagtgaaccagcccccgtcaaaagcagaacgtgggcacaaggtccgcctggccgtcggctctgggctcaggccggatacctgggaacggtttgtgcggaggttcgggcctttacaggtgctcgaaacatatggcttgaccgagggcaacgtggccacaatcaactacaccgggcagagaggcgccgtcggtcgcgcttcatggttgtataagcatatcttcccgttttctcttattcggtacgatgtaaccacaggtgaaccaattcgggatccccagggtcactgcatggctacttcccctggggagcccggactgctggtggccccggtttcacaacagagccccttccttggatacgccgggggtcctgagctcgcccaggggaagctcctaaaagacgtctttcggcccggggatgtgttctttaatactggcgatctgcttgtgtgcgacgaccaaggattcctaaggtttcacgatagaaccggtgacacattccggtggaaaggagaaaacgtggccaccaccgaagtggccgaagtcttcgaagccttagacttcctccaagaggtgaatgtctatggtgtgacagtgcctggccacgagggccgggctgggatggcagccctcgtgcttcgacctcctcacgcccttgatctaatgcagctctatacgcacgtaagcgagaatcttccaccatacgcacgccctcggttcctgagattacaggagagtctggctacaaccgaaaccttcaaacagcagaaggtgcgtatggcaaacgagggcttcgatccatctactctctcagacccactttatgtgctggatcaggctgtaggcgcatacctcccgttgactacagctaggtacagcgctctactagcaggtaacctccgtatttag

SEQ ID NO: 135176 - DNA, 2193 bp, synthetic construct
  misc_feature 1..2193: note = Description of Artificial Sequence: Synthetic coding sequence
  source 1..2193: mol_type = other DNA
atgggcgtgtgtcaaagaaccagagcaccctggaaagaaaagtcccagctcgaacgggccgccctgggttttaggaagggcggatccggtatgttcgcctccggctggaaccagacggtccccatagaggaggccggcagcatggcagctctgctcttattacctctgctcctgctgctccctttgttgttgctgaaacttcacctttggccccagctacgatggctgcccgctgatttggcctttgccgtaagggccttatgttgcaagcgggccctgcgcgcccgagccttggctgctgcagccgccgatccggaaggccccgaagggggatgctccctggcttggagactggcagagcttgctcagcagcgggctgcacatacgttcttgattcacggcagtcggaggttcagctactcagaagccgagcgggaatcaaatcgtgccgctagggccttcctgagggccctgggatgggactggggacctgatggtggcgattcaggcgaaggaagtgctggagaaggcgagcgtgcagctcctggtgccggtgacgccgcagctggcagcggagccgaattcgccgggggggacggtgccgcccgggggggcggggccgccgcgccactcagtcccggggccactgtggccctgctgttgcccgcgggcccagaatttctgtggctgtggtttggattagcaaaggcaggcttaagaaccgcattcgtgcccacagccctccgtaggggtcccttgctgcactgcctgagaagttgtggggccagagctctggttctggctcccgaattcttagaaagcctggaacccgacctgcccgctctccgagctatgggtcttcacctgtgggccgcggggccgggcacgcatcctgcaggcatttcagatctcctggcggaggtctctgctgaagtggatggccccgtgccaggttacttgagcagcccccaaagcatcacagatacctgtctgtatatttttacgtccggcaccactggcctgcccaaagccgcaagaataagtcaccttaaaatactccagtgtcaggggttctatcaattatgcggcgttcaccaggaggacgttatctacctcgcactgccactttatcacatgtcaggaagcttactgggaatcgtgggatgcatgggtatcggggccaccgttgtgctgaaatccaaatttagtgcggggcaattttgggaagactgtcaacagcacagagtgacagtattccagtacattggtgaactctgccgatatctggttaaccagcccccctccaaagctgagagggggcacaaggtgaggcttgcggttggatcagggctgcggccagatacttgggagcggttcgtgagacgatttggtcctttgcaggttctagagacgtatggactgacggaggggaacgtggccacaatcaactacacaggacagaggggcgccgtagggcgggccagctggctgtataaacatatcttccctttttcactgattcggtacgatgtcacgaccggcgaaccgatcagggaccctcaagggcattgtatggcaacctcccccggtgagcctggacttctggtggcccctgtgagccagcagtcgccattcctgggctacgcaggagggccggaacttgcccaggggaaactcctcaaagatgtattccgcccgggagacgtgttttttaataccggggacctactggtgtgtgatgaccagggattccttagatttcatgacagaactggtgatacctttaggtggaagggagagaatgtggcgactaccgaggtggcggaagtgttcgaagccctcgacttcttgcaagaggtaaacgtgtatggcgtgaccgtccccggccacgagggtcgggcgggcatggccgcgctggtgctgaggccacctcacgctctcgacctgatgcagctctatacacacgtgagtgagaatctgcctccctacgccagaccgcgatttttacggctgcaggagagcctagcaacgacagaaactttcaaacagcagaaggttcgaatggcaaacgagggattcgatccttcaacattaagcgatcccctgtacgtccttgatcaggctgttggcgcttatcttccactgacgacggcgcgctacagcgcactgttggctggaaacttacgcatctag

SEQ ID NO: 135177 - DNA, 1932 bp, synthetic construct
  misc_feature 1..1932: note = Description of Artificial Sequence: Synthetic coding sequence
  source 1..1932: mol_type = other DNA
atgctgttgggggcaagtctagttggcgttttgctgttttcgaagttggtgctgaagctaccgtggacacaggtaggcttttctctgttatttctctacctgggtagcggcgggtggcggttcatcagggtgtttattaagacaatcagaagggatatctttggaggcttggtgctgctgaaagtaaaagcgaaggtccgccagtgcctgcaggagcgccggactgtacccatattatttgcgtccaccgtccgcagacaccctgataagaccgccctgatttttgaaggcacggacactcattggacatttcggcagctagacgagtatagtagcagcgtcgctaactttctgcaggccagaggactggccagcggcgacgtggctgctatcttcatggagaatagaaacgagtttgtaggactatggcttggcatggccaagctgggtgttgaagctgccctcatcaataccaatctaaggcgggatgccttgttacactgcctgactacaagccgggcgagagcactggtttttggttctgagatggcctctgccatctgcgaggtccatgcgtccctcgacccttctctcagcctgttttgttccgggtcctgggagccaggtgccgtgcccccttccaccgagcatttagaccctcttctaaaggacgccccgaaacatctaccttcgtgcccggacaagggctttacagacaagttattctatatatatactagtggaactacagggttgcctaaagcagcaatcgttgtgcatagccgctattatcgaatggccgcgttagtctactacgggtttcggatgcggcccaatgatatcgtttacgactgcctacccttgtatcacagcgcagggaacattgtagggattggacagtgcctgctgcatggtatgaccgtggtgatcaggaagaagttctccgcatcccgcttttgggacgattgtattaagtataattgtacaattgtgcagtacattggcgagttatgccgttatttactcaaccagcctcccagggaagcggaaaatcagcaccaggtaaggatggctttgggcaacggtttacgccaatcaatttggacaaacttctcatcgcgctttcacattccacaggtggctgagttctacggtgcaactgaatgtaactgttcactgggcaacttcgactcccaggtaggggcctgtggcttcaacagccgaattttgtcatttgtctaccctataaggttggtccgggtaaacgaggataccatggagctgatacggggcccagacggggtctgcattccatgtcagccaggtgaaccgggccagctcgtcggtagaattatccaaaaggatccactgcggcgattcgatggctacctaaaccagggggcaaacaacaagaagatcgccaaagacgttttcaaaaagggcgatcaggcctatttaaccggggatgtgcttgtaatggatgagctgggttatttgtattttcgcgataggaccggagacactttcagatggaaaggagaaaacgtctccactactgaagtcgagggaacattgagtaggctgttggacatggccgatgtcgccgtgtatggcgtagaggtaccgggaaccgagggcagagccggaatggcagcggtggcctcccctaccggcaattgtgatctggagcggtttgcccaggttctggagaaggaactgcccttatacgccagacccatctttcttcgactactcccagaactgcacaagaccggtacctataaattccagaagacggagctgaggaaggaaggttttgatccggctatcgtgaaggatccactgttctatctggacgcgcagaagggcagatatgtgccccttgaccaagaggcttacagtcggattcaggcaggtgaagagaaattgtag

SEQ ID NO: 135178 - DNA, 714 bp, synthetic construct
  misc_feature 1..714: note = Description of Artificial Sequence: Synthetic coding sequence
  source 1..714: mol_type = other DNA
atgccactgacactctctaccctgctccagcccggtcggatttggacgggccgccgggccgccgaaccaacgcctggccataatgcggcctggtcactttctgggggaggagccgccgtgttgcaagccggcgctgaaaccgctttggaccccggcggaatcctgcctgttgtgccactgcttgggatctggcggctggccctacaccctgggctgcatcaagaccatcaggcttacctcaccggcgatgtgttggtgatggacgagttaggttatctgtatttccgtgatcggactggcgacacttttcgctggaaaggggaaaatgtctcgaccacagaggtagagggcactctgagcaggctcctggacatggctgatgtggctgtgtatggcgttgaggtccccggcaccgaaggtcgagcgggaatggccgctgtggccagcccaacagggaactgtgaccttgaaaggttcgcgcaggtgctggagaaggaactaccgctatacgctagaccaattttcttgagactgttaccagaattgcacaaaaccggaacatacaagtttcagaagaccgaactgcgcaaggaagggttcgatcccgcaattgtgaaggatcccttgttctacctagatgcacaaaaggggagatatgttccgctggaccaagaagcgtactcaagaatccaggccggagaggagaagctctag

SEQ ID NO: 135179 - DNA, 2073 bp, synthetic construct
  misc_feature 1..2073: note = Description of Artificial Sequence: Synthetic coding sequence
  source 1..2073: mol_type = other DNA
atgggtgttaggcaacaactggcactcctgctcttactgctgctattgctatggggactcggccaacccgtgtggcctgtcgctgtcgccctcaccctgcgctggttgctgggcgaccccacttgttgtgtgctgttaggtctagccatgctcgctcgcccttggttgggcccttgggtgccccacggactgtcgctcgccgccgcagcactggcattgacattgctccctgcacggctccccccagggcttcgatggctgccggcagacgtaatctttctcgcaaagatccttcatctaggccttaaaatacgaggctgcctgtcccggcagcctcctgatacattcgttgacgcctttgagaggcgggccagggctcagcccggacgagccttactcgtgtggactgggcctggagccggttccgttacttttggtgaattagacgcgagagcctgccaagcagcctgggcgctgaaggcggagttgggcgacccagccagcctgtgcgctggagagcccaccgctctgctggtattggcatcccaggctgttccagcactgtgcatgtggcttggtcttgccaagctggggtgccccaccgcctggattaatccacatggccgcggaatgccactcgctcacagcgtgctgagttcaggcgctcgggtgctggtagttgaccctgacctaagggaatcactggaggagatactccccaagctacaggcagagaacatcagatgcttttatctctcccataccagccctacacctggggttggagccctcggcgccgcccttgatgcagcaccctcccaccctgtccccgctgacctccgagcaggtatcacttggcgttctccggctctgttcatctacacatccgggaccacaggactgcctaaacctgcaatcctgacacacgagcgagtgctacaaatgtccaaaatgctgtcgttaagtggtgccactgctgatgatgtcgtctacacagtgctccctctctatcatgtaatgggcctggttgtcggaatactcggctgcctggacttgggcgccacctgcgtgctggcgcccaaattctctacctcctgtttttgggacgattgccgccagcacggcgtgacggtcatattatatgtcggagagctgctcagatacctgtgcaatatccctcagcagccagaagacagaacacatactgtcagattggctatggggaatggactgagggccgatgtgtgggagacatttcagcagcggtttggccctattagaatttgggaagtgtatggctcaaccgaaggtaacatggggcttgtcaactacgtaggacgctgcggggcccttgggaagatgtcatgcctgttgcgaatgttaagtccctttgaattggttcagttcgacatggaggcagctgaaccagtgagagacaaccaggggttctgcataccagtcgggctgggagaacctggtctgttattgaccaaagtggtatcgcagcagccatttgtggggtaccggggcccgagagagctgagtgaacggaaactggtgaggaacgttagacaatcaggggatgtgtattacaatactggcgacgtcctggccatggatagagagggatttctttacttcagagatcggctgggggacacttttcgatggaagggcgagaacgtgagcactcacgaagtcgaaggcgtgcttagccaggtcgattttctgcagcaggttaacgtgtatggagtgtgcgttcctggctgcgaggggaaggtgggaatggcagccgtacagctcgctcctgggcaaacttttgacggcgagaagctgtaccaacacgtgcgagcttggctacctgcttatgcaacacctcatttcatcaggatccaagatgccatggaggtcaccagtacgttcaagctgatgaagacccgacttgtgagagagggttttaatgtaggcatcgtggttgatccactcttcgtgttggacaacagggctcaatcgtttcgccccttaacagctgagatgtaccaagcggtgtgtgagggaacctggaggctgtag

SEQ ID NO: 135180 - DNA, 1950 bp, synthetic construct
  misc_feature 1..1950: note = Description of Artificial Sequence: Synthetic coding sequence
  source 1..1950: mol_type = other DNA
atggagaacgatccgtcgaggaggcgcgaatctatctctctgacccccgtggctaaaggactcgagaatatgggcgcggacttcttggagtctctggaggaagggcaactgccaagaagcgacttatcacccgcagagatcagatccagctggagcgaagccgcccccaaacccttctctcggtggaggaacctgcaacccgcactgagagcccggagcttttgccgagagcacatgcagttattcagatggatcggaaccgggcttctatgcacaggtctgtcggcatttctcctggtcgcctgtctgctggattttcagagggccctggcactgtttgtgttgacatgtgtcgttctgacattcctaggtcatcgccttttgaaaagactacttggcccgaaacttagaaggttcttgaaacctcaggggcaccccaggttgctgttgtggtttaagcgaggactggcattagcagcttttctgggcctggtactgtggctgtctctggacacctcccagcggcccgaacagctggtgagctttgcaggcatttgtgtgtttgtggcattgctctttgcgtgttccaagcatcattgtgctgtgagttggagggccgtcagctggggattgggccttcagtttgtgttggggttgctggtgattcggactgaacccggcttcatcgctttcgagtggcttggggagcagatacggatcttcctatcatacacaaaggctggctccagctttgtgttcggtgaggccctggtgaaagatgtgttcgcctttcaagtgctgccgattattgttttcttctcctgcgtgatctccgtcctttaccatgtgggcctcatgcagtgggtcatcctcaagatcgcctggctgatgcaagtgacaatgggaaccacagccacagaaacattgagtgtagcaggaaatatattcgtcagtcagacggaggctcctctgctcattcgtccgtatctcgctgacatgacccttagtgaggtgcacgttgttatgacggggggctacgcaaccatcgctggatccctgctgggggcatatattagctttgggattgatgccacctcacttattgcggcaagcgtgatggccgcaccgtgcgctcttgcccttagcaagctcgtttatcccgaagtggaggaaagtaaatttcggcgagaagaaggcgttaagctcacatatggcgatgcccagaatctgattgaagcagcgtctaccggggctgctatatccgtgaaagtggtggctaatatcgccgctaacttaatcgctttcttggctgtgctggattttattaacgccgccttgtcttggctgggagatatggtcgatattcagggactctcttttcaattgatctgttcctatattctgaggcctgtcgcctttctaatgggcgtggcttgggaagactgtcctgtcgttgctgagctattgggaatcaagctttttttgaacgaattcgttgcgtaccaggacctgtcaaagtacaaacagcgccggctcgcaggcgccgaggaatgggttggtgatagaaagcagtggatcagtgtgagagctgaggttttgacaacgttcgctctgtgtggctttgcaaatttcagtagcataggcataatgctaggcggactcacgtccatggtcccacaaagaaaatcagattttagtcagatcgtactccgggccttgttcaccggcgcttgcgtgtcattggtcaatgcctgtatggcggggattctgtacatgcctagaggagcggaagtcgattgtatgagtctgctgaacaccactctcagtagcagtagctttgaaatttatcagtgttgccgcgaggctttccagtcagttaaccctgagtttagcccggaggctctcgacaattgctgccggttctataaccatacgatttgtgcgcaatag

SEQ ID NO: 135181 - DNA, 528 bp, synthetic construct
  misc_feature 1..528: note = Description of Artificial Sequence: Synthetic coding sequence
  source 1..528: mol_type = other DNA
atggaaaacgatccctcccgcaggagagaaagcatctctcttacgccagtcgccaagggcttggagaacatgggcgctgactttctggaatcactcgaggaggggcagttgccacgatctgatctatccccggccgaaatccgaagttcatggagtgaagcagcacccaaaccgttttctcgctggcggaacctgcaaccagcgttgagagcaaggtccttttgccgcgaacatatgcaactctttaggtggattggcacaggactgctgtgcacaggcctgtccgcattcctgcttgtggcttgtctcttagattttcaaagagcattggccctgtttgtgttgacttgcgtcgtgctgacatttctcggacaccggctcttgaagaggctcttggggccgaagctgagaagatttctaaagccccaaggtcacccacggctacttctttggtttaaacgtgaccctaggccatggagcaaggagggaccaaatcaataccttccacagatcacctggactgtatag

SEQ ID NO: 135182 - DNA, 1950 bp, synthetic construct
  misc_feature 1..1950: note = Description of Artificial Sequence: Synthetic coding sequence
  source 1..1950: mol_type = other DNA
atggaaaacgacccatcaagaaggcgagagtctattagtctcactcctgtggcaaaggggctcgagaatatgggggccgatttcctggagtcattggaggaggggcagcttcctcggtccgatctaagcccggccgaaattaggagcagttggagcgaggcagccccaaagccattctctcgctggcgcaatctgcagcccgcccttagggccagatcgttctgtcgggaacacatgcagctctttagatggatagggacaggactgctgtgtaccggcctgtcggccttcttacttgtggcatgcctgctggacttccaaagagcgctggctctcttcgtgctgacatgtgtggtgcttacctttctgggacacagactgctgaagcgcctcctaggtcccaagcttaggaggtttctgaaaccccagggccatcctcgactgctgctgtggtttaagcggggtttagctctcgctgctttcctgggcctggtcctgtggctcagcctcgataccagccagcgtccggaacaactggtctccttcgccggcatctgtgtgtttgtggccctgctgtttgcctgctcaaaacaccattgcgccgtgtcatggcgggccgtgagttggggcctcggactccagttcgtcctgggacttttagtaattcggacagaacctgggttcatcgcatttgagtggttaggggagcagattaggatatttctctcttatacaaaagccgggtcatcttttgtgttcggcgaggctctcgtcaaggacgtcttcgcattccaagtgctgcctattattgtgtttttctcatgcgtaatatcagtgttataccacgtgggactcatgcagtgggtaatcctgaaaattgcttggctcatgcaggttacaatgggtacaacagccactgagaccctatctgtcgcaggaaatattttcgtgagccagactgaagcacccctgcttatcaggccctacctggccgacatgactctgtctgaagtgcacgtggtgatgacgggaggatatgccacaatcgccggaagcctgctcggcgcctacataagcttcgggatagacgccacatcactgatcgctgcttcagttatggccgccccctgtgctttagccctgtctaagctagtctaccctgaggtggaagaaagcaaatttaggcgggaggagggagtgaaactgacatacggcgatgcccaaaacctgattgaagccgcatcaaccggcgcagctatctcagtgaaggtggtggctaacatcgctgccaatctcatcgcctttctggcagtgctcgatttcattaacgctgcactttcctggctgggagatatggtggacatccagggtctgtccttccagctcatttgtagctacatcctgcgacctgtggcctttctcatgggcgtggcttgggaggactgtccagtggtggctgaattgttgggaattaagctgtttttgaacgagttcgtcgcctaccaagatctgagcaaatacaagcagcggcgattggccggcgccgaggagtgggtgggcgatagaaaacaatggatatctgttcgtgcagaagtgttgacgacctttgccctgtgcggctttgcaaatttctcctcaattgggatcatgctggggggcctgacaagcatggtgccacagcgaaaatccgacttcagccaaatcgtgctgcgggccttatttaccggcgcttgtgtgtccctggtgaatgcttgtatggccggcatcctatacatgccccgaggtgccgaggttgactgcatgtctctcctgaacactacgctgagctctagctcttttgagatctaccagtgctgccgggaggccttccagtccgtgaatccggaattctctcctgaggcccttgataactgttgcaggttttataatcataccatttgtgcacaatag

SEQ ID NO: 135183 - DNA, 1632 bp, synthetic construct
  misc_feature 1..1632: note = Description of Artificial Sequence: Synthetic coding sequence
  source 1..1632: mol_type = other DNA
atggagaatgatccatccaggcgtagggaatccattagtctgacacccgtcgctaaggggctggagaacatgggagccgactttctggagtctcttgaggagggtcagctcccaaggagcgatctcagtccagcggagattcggtcaagctggtccgaggcagcccccaagccattctcccgatggcgtaacctccaaccggctctgagggcgcgaagcttctgccgtgagcatatgcagctctttagatggatcggaaccgggctactctgcactggcctgtcagccttcctcctcgtcgcatgtttgcttgattttcagcgtgccctcgcccttttcgtacttacatgtgtggtactcacttttttaggtcacaggcttttaaagagactcctgggccctaagttgcgccgtttcctaaagcctcagggccatcccagattactactttggttcaaaagaggactggctttagctgccttcctcggtcttgtgctttggctgagcctggacaccagtcagcgccctgagcagttggtgtcctttgctggtatctgcgttttcgtcgctttactcttcgcttgctccaagcatcattgcgcagtctcatggcgggctgtttcctgggggcttggactgcagtttgtgcttgggttgttggtgattcgcactgaaccgggcttcatcgcctttgaatggttgggggagcagataaggatatttctgtcgtatactaaggccggctctagcttcgtttttggggaggctctcgttaaagacgtctttgcctttcaggtgctgccaataatcgtcttttttagttgcgtaatcagtgtgctctatcacgtcgggctcatgcagtgggtcattctgaaaatcgcttggctgatgcaggtgacgatggggactaccgctactgaaacattgagcgttgctgggaacatattcgtctctcaaactgaagccccactcctgattcgcccttacctggccgacatgacgctgagcgaggtgcacgtcgtgatgactggcggctacgctacgattgccggaagtctgctgggagcatacattagcttcgggatagacgctaccagcctaatcgcggcatctgtcatggccgccccatgcgccctagcactgtctaaactcgtttatccagaggtggaagagtccaagttcaggcgggaagagggtgtgaagctcacttacggggacgctcagaacttgattgaggcagcaagtacgggcgctgccatctccgtgaaagttgtagccaatatcgcagccaacctaatcgcttttttagctgtgctggactttattaacgcagctctgagctggctgggtgacatggtcgatatccagggtcttagctttcaactcatctgcagctacattttacggcccgtagcgtttctgatgggcgtggcctgggaagactgtcccgtcgttgcagagctccttggcatcaaattgtttctgaatgaatttgtcgcgtaccaagatctgtcaaagtacaaacagcggcgtctggccggcgcagaggaatgggtgggggaccgaaaacagtggattagtaggcgcgggcttgcaatgctgacaaggctggtcctgaactcatggccctag

SEQ ID NO: 135184 - DNA, 1911 bp, synthetic construct
  misc_feature 1..1911: note = Description of Artificial Sequence: Synthetic coding sequence
  source 1..1911: mol_type = other DNA
atggaaaacgacccatctagacgacgagagagcattagtctcacaccagtggctaaaggcctggaaaacatgggcgccgactttctggaaagtttggaggagggacagctaccgcgatccgatctgtccccagccgagatcaggagcagttggtctgaagccgcacccaaaccatttagtcgatggcgaaatctgcagccagccctcagggcacggtcattctgcagagagcatatgcagctgtttcgttggattggcacagggctgctctgcacgggtcttagcgcctttttgcttgtagcctgcttgctcgacttccaacgagccctcgccctcttcgtgctgacctgtgttgtgttgacctttctcggccacaggttgctgaaacgcctgcttggccctaagcttcgcagattcctgaagcctcagggacatcctaggctattgctctggttcaagcgggggctggctctcgcagccttcctgggccttgttctttggctctcgctggacactagccaaagaccagagcagctcgtgtcttttgctgggatttgcgtgttcgtagcattgctgttcgcctgtagcaagcatcactgtgcagtgtcttggcgagctgtgagctggggactgggtctgcagttcgttcttgggctcctggtgatccgaaccgagccaggttttattgcatttgaatggctgggcgagcaaattcgcatctttctcagctatacaaaagccggctctagtttcgtttttggcgaagccctggtgaaggacgtgtttgcgttccaggtgctccccatcattgtgtttttttcatgcgtgattagtgttctataccatgtcgggctgatgcagtgggtgattctgaagatagcatggttaatgcaagtaactatggggaccacagctaccgagacactcagtgttgcaggcaatattttcgtgtcccaaacagaagcccctctgctgatccggccctatctcgctgacatgacactctccgaagtgcacgtcgtaatgaccgggggatacgccacaattgccggctctctcctcggtgcgtatatcagcttcggaattgatgctacttctctgatcgctgcatcagtcatggcagcgccgtgtgccctggccctgagcaaactagtgtaccctgaggtggaagaatcgaaattccgtcgggaagagggcgttaagctgacctacggggacgcgcagaacctcattgaggccgcgagcacgggggccgctataagcgtcaaggtcgtggctaacatcgctgccaatctgatcgccttccttgctgtccttgacttcataaacgcagcattaagttggctcggtgatatggtggatatacagggtttgtcctttcagcttatctgcagctacatattgagaccggtcgcctttcttatgggcgtggcctgggaggattgccccgttgtggctgagctattggggattaagctgtttcttaatgaattcgttgcctaccaagatctgtctaaatataaacagagacgcttggccggggcagaggagtgggtgggtgaccgcaaacagtggataagtgtgagagccgaagtgcttaccacctttgccctgtgtggcttcgccaatttctcctctatcgggatcatgctggggggtctgacttccatggttccacagagaaagtccgatttttcccagatagtgctgcgagccctgttcactggggcttgcgtcagcctggtgaacgcttgcatggcaggcatcctttatatgccaaggggcgccgaggttgactgcatgagcctactcaatactactctgtcaagctctagcttcgagatatatcaatgttgtagggaagcctttcagcggattttcaagagcacgccggcagagtcccagccctag

SEQ ID NO: 135185 - DNA, 864 bp, synthetic construct
  misc_feature 1..864: note = Description of Artificial Sequence: Synthetic coding sequence
  source 1..864: mol_type = other DNA
atgcagctgtttcgatggataggcacaggtctgctctgcaccggcctgtctgccttcctcctcgtcgcctgcctgctggattttcagcgcgccttagcgctgtttgttcttacttgtgtggtactgacatttctcggtcaccgacttcttaaacgcctgcttggacccaagctgcgaagattcctgaaacctcagggacatcccagattactgctttggtttaaacgaggtcttgctcttgcagcgttcttagggctagtgctgtggctgtcactagacacgagccagcgcccggaacagctggttagcttcgccggcatttgcgtttttgtcgctttgctgttcgcttgttcaaagcaccattgcgccgtttcctggcgggcagtctcctggggcctcggcttacagttcgtgctcggtctcctggtcattaggactgaaccaggcttcattgcctttgaatggctcggggaacagatcagaatctttctgtcatatacaaaagccgggtcttcctttgttttcggagaggccctggttaaagacgtttttgccttccaagtgctacctatcattgtgtttttttcatgcgtgatttcagtgttgtatcatgtcggactgatgcagtgggttattctgaaaattgcctggttaatgcaagttactatgggaacaaccgcgacagagaccctgtcagtcgccggtaatatttttgtttcacagaccgaggccccattgctgattcgaccatacctggcagatatgaccctgtccgaggtccacgtagttatgaccggcggctacgccactattgccggcagtctactgggcgcatacataagtttcggattagagaaactgtag

SEQ ID NO: 135186 - DNA, 1452 bp, synthetic construct
  misc_feature 1..1452: note = Description of Artificial Sequence: Synthetic coding sequence
  source 1..1452: mol_type = other DNA
atggagaacgatccttctcgaaggcgtgagagcattagtcttacacccgtggccaagggcctggagaacatgggcgccgatttcctggagtctttagaggaagggcagcttccaagatcggatctcagccctgccgagattagatcttcttggtcagaagcggctccgaagccgttctcccgatggcgtaacctccaaccagctctgagggccaggagcttttgccgtgagcatatgcaacttttccggtggatcggcactggtttgttatgtaccggcctgtcggccttcttacttgttgcatgcttgttagattttcagcgggctctggctctgttcgtccttacctgcgtggtcctcaccttcctaggtcatcggctattgaagaggctgctcggacctaaactcaggaggttcctgaagccccaagggcacccaaggctcctgctgtggttcaagagaggccttgccctggctgcctttctgggcctggtgttatggctttccctcgacacatcccagcgacccgagcaactcgttagtttcgctgggatttgcgtgtttgtcgccttgctttttgcatgctcaaaacaccattgtgctgttagctggagggccgtctcttggggtctcggactgcagttcgttctcggcctgctggtcataaggacggaaccgggtttcatcgctttcgagtggctgggggagcagattcgcatcttcctctcctacacaaaagcagggagcagttttgtgttcggggaagccctggtcaaagacgtgttcgcttttcaggtattgcccattatcgtgttcttttcctgtgtcatcagcgtgctgtaccatgtcggcctgatgcagtgggtgatactgaaaatcgcctggctcatgcaggttaccatgggaacgactgcaaccgagacactgagcgtcgccggcaacatattcgtgtctcagaccgaagcaccattgttgattcggccctacctggccgacatgacacttagcgaagtgcacgtcgtgatgactggtgggtatgctactattgcagggtcactgctgggagcttacatctcctttggcgtgagagctgaggtgctcaccacttttgcactctgcggatttgctaatttcagctccatcggcattatgctcggcggcctgacgagtatggtcccccaacggaagtcagacttctctcagatcgtgctgcgcgcactgtttactggcgcttgcgtgagcctcgtaaacgcctgcatggcaggcatcctgtacatgccaaggggagctgaagtggactgtatgtcattgcttaatacaacgctgagcagtagcagctttgagatttaccaatgttgtagagaggcgtttcagtctgttaatcctgaattctcccctgaggcgcttgacaattgttgccgcttttacaaccacaccatctgtgcccagtag

SEQ ID NO: 135187 - DNA, 1977 bp, synthetic construct
  misc_feature 1..1977: note = Description of Artificial Sequence: Synthetic coding sequence
  source 1..1977: mol_type = other DNA
atggagaaagcctctgggcggcagtccatcgcattgagcaccgtcgagaccggtacagtgaaccccgggctggaattgatggagaaggaggtagagccagaaggatccaagagaactgacgctcaaggccactccctcggcgatggcctaggaccaagcacctaccaacgccggtctcggtggccatttagcaaagcgcgctcattttgtaaaacgcacgcttctttgttcaaaaagattctgctcggtcttctctgtctagcgtatgccgcataccttcttgctgcatgcattctgaattttcagagagccctggcgctgttcgtaataacctgcctggtgatattcgtcctggttcactcttttctgaaaaaactgctgggtaagaaactgactaggtgtttgaagcccttcgagaactcccgcctgagattgtggactaaatgggtcttcgccggtgtcagcctggtcggacttatattatggctggccttggacactgcccagcgacctgaacagctgatccccttcgccggcatctgtatgttcatcctcatactttttgcttgttctaagcaccatagcgctgtgtcctggaggaccgtcttctccggtctcggactgcagttcgtgtttggaatcctcgtcatacggaccgacctggggtacaccgtgttccagtggttgggagaacaggttcagattttcctgaactacacggttgctggctctagttttgtgttcggcgacacgcttgtgaaggacgtgtttgcttttcaggcattgcctatcatcatcttctttggatgcgttgtttcgatcctgtattatcttgggctggttcagtgggttgtccagaaggttgcttggttcctacagataacgatgggcactacagcaaccgagacccttgctgtggcagggaatattttcgtgggcatgaccgaggccccgctcctaataagaccatatctgggagatatgaccctttccgaaatccacgcagtgatgaccggcggcttcgccacaattagcggtaccgtgctcggtgcgtttatagcctttggagtcgatgcctcatcattgataagcgcctccgtcatggcagcgccttgcgccctggcttcttccaagctggcctatccagaggtcgaagaatcaaagttcaaatctgaggagggtgtaaaactccctcgcggcaaggagaggaatgttttggaagccgcctccaacggcgccgtcgatgctatcgggctagcaaccaacgtcgccgctaacttaattgcttttctcgctgttctggcctttattaacgccgcgctatcatggttgggggagcttgttgatatacaggggctgacttttcaggtgatctgctcctatctgctccgccctatggtttttatgatgggagttgaatggacggactgcccaatggttgctgagatggtgggcatcaagttcttcatcaatgagttcgtagcttaccagcagttgagtcagtataaaaataagcgactgtccgggatggaagagtggattgaaggggaaaaacaatggatttctgtccgggcagagattatcacaacgttctccttgtgcggcttcgcaaatctgagttctatcggcatcacgctggggggcctcacttctattgttccccataggaagagcgacctcagtaaggtcgtagtacgcgcccttttcaccggggcttgcgtctcactcatctccgcctgcatggctgggatcctgtacgtcccacggggtgccgaggccgattgcgtgtcctttccaaacaccagcttcaccaacaggacttacgagacttatatgtgttgccgcggcctgttccaaagcacctcactaaatgggacaaaccccccaagcttttcaggtccttgggaggacaaagaatttagcgccatggcactcacgaattgctgcgggttttataacaatacggtgtgcgcatag

SEQ ID NO: 135188 - DNA, 2076 bp, synthetic construct
  misc_feature 1..2076: note = Description of Artificial Sequence: Synthetic coding sequence
  source 1..2076: mol_type = other DNA
atggagctgagatccacagccgcacctcgcgctgagggttatagcaatgtaggctttcagaatgaggaaaacttcctcgagaatgagaacaccagtggaaacaatagtattcgaagcagagcagtgcagagccgcgaacatactaacacaaagcaggatgaagaacaggtgacagtcgaacaagactcaccgaggaaccgagagcacatggaagacgatgatgaggaaatgcagcaaaagggatgtctggaacgcagatatgacaccgtatgcggattttgtagaaagcacaagaccaccctgaggcacataatctgggggatactgctagctggctatctggtgatggtgatttccgcctgtgtcctgaactttcatcgcgccctgcctctcttcgtgatcaccgtggccgccatcttttttgtcgtgtgggaccacttgatggccaaatacgagcatcgcatcgacgagatgctttcccctggcagaaggctgctgaatagccactggttctggttaaaatgggtcatctggtctagcctggtcctcgccgtgatcttttggttagcctttgataccgccaaactgggccagcaacaactagtgtctttcggcgggctaataatgtatatcgtattgctgtttctgttctctaaataccccacacgagtgtactggcggccggtcctgtggggtattgggctgcagttcttactagggttgctcatcttgcgaactgaccctggttttatagccttcgactggctgggacggcaggtgcagactttcctcgagtatacagacgcaggtgcctccttcgtcttcggagagaaatacaaagaccacttttttgctttcaaggtgcttcctatagtggttttctttagcacggtgatgtccatgctgtactatcttggcttgatgcaatggatcattcgtaaggtcggatggatcatgcttgtgactacaggctcctctccaattgagagcgtcgttgcttctggcaacatcttcgtcggacagacagaatcgcccttactggtgcgtccttacctgccttatattaccaagagcgagctgcatgctattatgaccgccggctttagtacaattgctggcagcgtgctcggagcttatatttcattcggagtaccttcctcacacctgcttaccgcatccgtgatgagtgcccccgctagcttggccgccgcaaaactgttttggcctgagactgaaaaacctaagattactttgaaaaacgcaatgaagatggaatccggcgattccggcaacctgctggaagcagctactcagggggcatcgtcttccatctctctggtcgccaacattgccgttaacttgattgccttcctggccctgctctcgttcatgaactctgcgctgagttggttcggcaacatgttcgactatccccagctgagctttgaacttatctgctcttatatcttcatgcccttttctttcatgatgggtgtagaatggcaggactctttcatggtggcaaggctgattggatataaaactttttttaatgaattcgtggcatacgaacacctcagcaaatggatccacctgaggaaggaaggaggccccaaattcgtcaacggggtgcagcaatacatttctatccgatccgagatcattgccacctatgccctatgtgggttcgccaacattggctcactcggaatagtcatcggtgggctcacatctatggccccatcccgtaaaagagacatagccagtggagcagttcgtgcgctcatcgctgggaccgtggcctgcttcatgaccgcatgtattgcaggcattctgtcctctaccccggtggacatcaattgccaccatgtgttagagaacgcctttaacagcacatttcctggcaacacgacaaaggtcattgcctgctgtcagagtttactcagctctaccgtggcaaaaggacccggggaggtaattccaggaggcaaccattcgctttacagcctgaaagggtgctgtacactgctaaatccctcaacctttaattgtaacggtataagcaacaccttctag

SEQ ID NO: 135189 - DNA, 1869 bp, synthetic construct
  misc_feature 1..1869: note = Description of Artificial Sequence: Synthetic coding sequence
  source 1..1869: mol_type = other DNA
atggaggacgatgacgaagagatgcagcagaaaggctgtctggagcgcaggtacgatacagtttgcgggttttgccgaaaacataagacgacattacgacacatcatctggggtattcttctggctgggtacttggtgatggtgattagcgcatgcgtgctgaacttccaccgggctctgcctttgttcgtaattaccgttgcagctatttttttcgtggtgtgggatcacctgatggccaaatatgaacacaggatcgatgagatgttaagccccggccgaagactccttaactcacattggttttggctgaagtgggtgatttggtcttccttggttcttgcagtcattttctggctagcttttgatacagctaaattgggccaacagcaactggtgagttttggtggccttatcatgtacattgtgctgcttttcctcttctctaagtatcctacgcgagtttattggaggcccgtgctttggggtatcgggctacagtttctcctgggcctgctcattctgcgcacagaccctggatttattgcgtttgattggcttggccgacaggtgcagacatttctcgaatacactgatgcgggggcgtcctttgtgtttggggaaaagtacaaagatcactttttcgctttcaaggtgttacccatagtcgtgtttttcagtaccgtgatgagcatgctttactatctgggattgatgcagtggattattcggaaggttggctggataatgctggtgacaacgggctcttctccaattgaatctgtggtagccagcgggaatattttcgtcggacagactgaatcaccactgttggtcagaccttacctgccttatatcaccaagagtgaactccacgccataatgacggctgggttttccactattgccgggagcgtgttgggagcttatatctcgttcggagtgccctcgtcccacttgctgacagcaagtgtgatgagcgctcctgcctcacttgccgcagccaagctcttttggcccgaaacagagaagcccaaaattacgctgaagaacgcgatgaagatggagagtggcgacagtggtaacctcctggaagccgccacacagggagcttccagctctatatctctggtggccaatattgccgtgaacctaattgcctttctggctcttctgtctttcatgaattccgccttatcatggttcggaaacatgttcgactatccccagctctccttcgagctgatctgttcgtacatatttatgcctttctcttttatgatgggggttgagtggcaggattccttcatggttgctagattgatcggatacaagacctttttcaacgaattcgtagcgtacgaacacctcagcaagtggatacatctgaggaaagaggggggtccaaagtttgtcaacggcgtgcagcagtatatttctattcgctcagagatcattgcaacttacgccctgtgcggttttgccaacataggatccctcggaatagtgatcggcggactgacatccatggcgccatccagaaaacgggatatcgccagtggagctgttcgcgccctgatagctggtaccgtggcatgtttcatgaccgcttgcatagccggaattctgtcctcgactcctgtcgatatcaattgccaccacgtgctggagaacgcttttaacagtacttttccaggtaacaccactaaggtgatcgcttgctgtcagtccttactgtcgagcacggtcgctaagggccccggggaagttatccccggcggaaaccactccctatactctctgaaagggtgctgtacactgctgaatccatccacattcaactgtaacggaatttccaacaccttttag

SEQ ID NO: 135190 - DNA, 1608 bp, synthetic construct
  misc_feature 1..1608: note = Description of Artificial Sequence: Synthetic coding sequence
  source 1..1608: mol_type = other DNA
atgcgacgggaaagaacgcgcggcccacaggcctgggagttcccaagccccacaaagagcggctgttcactgcaatccctgagtcgcgatctgcgtgagttaagggaaggtgaaaagccagaggaccaggccgagacggaagagagttggcaaggcctcgctaggaaaacgccaggtaaggcgtgcgccccggagggaggatcatgccagccggggaagacggaaaatactataaccatgactacatcccatcaacctcaagatcgttataaagccgtgtggctgatcttcttcatgttaggtctcggaaccttactgccctggaacttttttatgactgccactcagtacttcactaaccgcctggatatgagccaaaatgttagcttggtaacagcagaattatcaaaggatgcccaagcctccgccgcccccgctgctcctctccccgagaggaacagtttgtcagcaatcttcaataacgtgatgaccttatgtgcaatgttacccctgctgctgtttacatacctaaatagctttctgcaccagagaatcccgcaatctgtacgcatcttgggctcccttgttgcgatactgctagtgttccttataacagctatcctagtcaaagtgcagttggacgccctgcccttcttcgttataactatgatcaagattgtgctcattaacagctttggggctatactgcaggggtcactgttcgggttagccggcctccttcctgcgagctataccgccccaataatgagtggacagggcttagccggattctttgcctctgttgcaatgatatgtgcaattgcctccggcagcgagctctccgaatccgccttcgggtactttataacagcctgtgcggtcattatcttaacaattatatgttacctggggctgccacggctggaattctaccgctactatcagcagttgaagcttgaaggcccaggggagcaagagaccaagctggatctcatttcgaagggagaggagcctcgggcaggaaaggaggaaagtggcgtctccgttagtaatagtcagccaaccaatgaatcgcactccattaaagccatactaaaaaatatcagtgtgcttgcattctcagtgtgtttcatttttaccatcacaattggcatgttccctgctgtgacagttgaggtgaagtcctctatcgccggttcgagcacctgggaaaggtatttcatcccggtgagttgctttctcactttcaacatctttgactggctgggaagatcccttacggccgtctttatgtggcctggaaaagattctcgttggctaccgagtttggtgctggctcgcctggtgtttgttccacttctcttgctgtgcaatattaagccgcggcgctatttgacagtcgtctttgagcatgacgcctggtttatcttttttatggccgctttcgcgttctccaacggctatttggcatccttgtgcatgtgttttggtcctaagaaggtaaaacccgccgaggccgaaacagcaggtgcaataatggctttctttctctgtctcggcttggctctgggcgcagttttctcttttctcttccgggctattgtgtag

SEQ ID NO: 135191 - DNA, 1371 bp, synthetic construct
  misc_feature 1..1371: note = Description of Artificial Sequence: Synthetic coding sequence
  source 1..1371: mol_type = other DNA
atgaccacatcccatcagcctcaagatcggtacaaagccgtctggttgatttttttcatgcttggattgggcaccttgctcccctggaacttttttatgacagctacccagtatttcaccaatagattagatatgtctcaaaatgtcagcctcgtgaccgcagagctctccaaggatgcccaggcctctgcggccccagcggccccacttcctgagagaaattccctgtcggcaatctttaacaatgtcatgactttatgcgctatgctgccactgctcttgttcacatacctaaattcattcctccatcagaggatcccccagtcagtgcggatactaggctccttagttgccatcctattggtgttcctcatcacagctatcctcgtgaaggtgcaactcgatgctctgcctttctttgtgataacaatgataaagattgttttgataaattccttcggcgctattctgcagggcagcttattcggcctggcgggtctactgcccgcttcgtacactgccccaatcatgtctggacagggactcgcaggatttttcgccagcgtggctatgatatgtgcaatagccagcggaagcgagctcagcgaatcagccttcggctactttattactgcttgcgcagtcatcattctcacaattatttgctacttgggcctcccccggcttgaattttataggtactatcagcagctcaagttagagggacctggagagcaggaaaccaaactggatttgatttctaagggggaggaaccccgcgccggaaaggaggagtccggcgtgagtgtgagcaactcacagcccaccaatgagtcccattcaattaaggcgattctcaaaaatatctccgttcttgcatttagcgtttgttttattttcaccatcaccatcggcatgtttcctgcggtgactgtcgaggtgaagagttcaatcgccggttcaagcacatgggaaagatattttatccctgtctcatgttttctgacattcaatatcttcgattggctgggacggagtttgacagcagtgttcatgtggcctgggaaagactctcggtggctgccttctctagtgctcgcaagactagtcttcgtgccattattgctcctgtgcaacataaaacccagaagatatctgacagtggtgttcgagcacgatgcctggttcatttttttcatggctgctttcgcttttagcaatggctaccttgcgtcactgtgcatgtgcttcggcccaaagaaggtcaaacctgctgaggccgagactgcaggggccattatggccttctttttatgtctcggcttggcgttgggggctgtattcagtttccttttcagagctatcgtgtag

SEQ ID NO: 135192 - DNA, 1371 bp, synthetic construct
  misc_feature 1..1371: note = Description of Artificial Sequence: Synthetic coding sequence
  source 1..1371: mol_type = other DNA
atgacgacttcacaccagcctcaagatcggtacaaggcagtgtggctgatctttttcatgctgggcctcggaaccttactgccgtggaacttttttatgaccgccacgcagtactttacaaacagactggacatgtcccaaaatgtctctctggttacagcagagctgtctaaagacgcccaagctagtgccgcccctgcagctccactgcccgagcgaaattccttaagcgcaatatttaataacgtgatgactctctgcgcaatgctcccactcctcctatttacgtacttaaactcatttctgcatcagaggatcccacagtcagtgcgcattcttggctcgctcgtggccattttactggtgttcctaatcacagcgatccttgtcaaggtgcagttggatgccctgccattttttgtcattaccatgatcaaaattgtgcttataaattcattcggagccatcctgcagggctccctcttcggtctggccggactcctgcccgccagctatactgccccaatcatgagtggacaggggttggcgggcttttttgcatccgtggcaatgatatgtgcgatagccagtggcagtgagctgagtgaatccgcttttggctatttcataactgcatgcgctgtgataatactgactatcatctgttatctgggactgcctagactggaattctatcggtattatcaacagttgaaactagaggggcccggtgagcaggaaaccaaactggatctgatctccaaaggagaggagccgcgggcaggcaaggaagaatcaggggtcagtgtgtctaattcgcagccaacaaacgaaagccactcgattaaagccatcctcaaaaatatctccgttctcgcattcagcgtttgtttcatcttcacgatcacgatcggcatgttccctgcggtcacagtggaggtgaaaagcagcattgcagggagctctacctgggaacggtacttcatcccggtgtcttgttttctcacgttcaacatcttcgattggctcggacgctcactgaccgcagtcttcatgtggccgggaaaagatagtcggtggctgccaagcctggttctggcaaggctggtcttcgtgcctcttctgctgttgtgcaacatcaagccccgccgttaccttacagtggtgttcgaacatgacgcatggttcatcttctttatggccgcctttgcattcagcaacggttatctggcctctctctgtatgtgcttcggccctaaaaaagtgaaaccagcagaggcggagaccgccggcgccatcatggccttctttctgtgcctgggcctggctctgggagcagtgttttctttcctgtttagggccatcgtctag

SEQ ID NO: 135193 - DNA, 1371 bp, synthetic construct
  misc_feature 1..1371: note = Description of Artificial Sequence: Synthetic coding sequence
  source 1..1371: mol_type = other DNA
atgaccacctcccatcagccccaagataggtataaagccgtatggctaattttctttatgttaggactggggactcttctgccttggaactttttcatgacggccacccagtattttacaaatcggttagacatgtcccagaatgtgtctctcgtgaccgctgagcttagtaaggatgcccaggcctccgctgctcccgctgctccactgccagagcgaaattcactgagtgccatttttaataacgtcatgaccctatgtgcaatgttacccctgttactgtttacctaccttaactcttttctgcatcaacgaattcctcagtccgtcaggattttggggagtttagtagcgattttgttagtcttcctgataacagcgatactcgtgaaggtgcagctggatgctttgccttttttcgttataacgatgattaaaattgtcttaatcaacagtttcggcgcaattttacaggggtcccttttcggacttgcgggccttctgccagcttcctacacagcacccattatgtccggacaaggccttgccgggtttttcgcctctgtggccatgatctgtgcgatagctagcggtagtgaattgagcgaatctgccttcgggtactttatcactgcctgcgctgtgatcattttgacgattatctgttatctgggacttccccggctagaattttatcgttattaccagcagctgaaattggagggaccaggcgaacaggagactaaactggatctgattagtaagggagaggagccacgcgctgggaaagaggagtctggagtgagtgtgagtaacagccagccaactaatgaaagtcatagtatcaaggccatactcaagaatattagcgtcttagcttttagcgtgtgtttcattttcaccatcacaatcggtatgtttcccgcagtaactgtagaggtcaagtcatctattgccggatcctccacttgggagcggtactttatccctgtaagctgtttcctcacatttaatatcttcgattggttggggagatccttgactgcggtgtttatgtggcctggtaaagactctcgctggctcccatctctagttctggcacgtctggtgttcgtccccttattactcctgtgtaacatcaaacccagacgctacctgacagtggtgtttgagcatgatgcctggttcattttttttatggccgctttcgcctttagcaatggatacctggcaagcttgtgtatgtgctttgggcctaagaaagttaagcccgccgaggccgagactgcaggggccattatggcatttttcttgtgcttgggactggcgcttggtgccgtctttagttttctcttcagagccatcgtgtag

SEQ ID NO: 135194 - DNA, 1371 bp, synthetic construct
  misc_feature 1..1371: note = Description of Artificial Sequence: Synthetic coding sequence
  source 1..1371: mol_type = other DNA
atgactacgtctcatcagccacaggatagatataaggccgtgtggctaattttttttatgctcggtttggggacactgttaccatggaattttttcatgaccgccacacaatattttaccaatcgtttggatatgagtcagaatgtttccctcgtgaccgccgagctttccaaagatgctcaggccagtgccgctcctgctgcccctttacctgaacgtaactcactgagcgcaatcttcaacaatgtgatgactctatgcgcaatgctgcccctgcttctctttacttatttaaatagctttttacaccaacggatccctcagagcgtacgcatcctaggttcactggtcgccatcctgcttgtattccttatcaccgctatcctggtgaaggtgcagctggatgcattaccatttttcgtgatcactatgatcaaaattgtcctgatcaattcatttggcgccattctgcaagggtcgctattcggcctggccggcctcctccctgcttcctacaccgcccctatcatgagtggacaggggctggccggcttttttgctagtgttgccatgatttgcgctatcgcctcaggatctgagcttagcgaatccgcatttggatacttcattactgcgtgtgctgtaataattctgactatcatttgttatctcggcctacccaggttggaattttaccgatattaccagcaactcaagcttgagggtcctggtgaacaggagactaagttagatctgatcagtaaaggggaagagcctcgcgcggggaaggaggagagtggggtgagcgtcagtaactcacagccaaccaatgaatcacactctattaaggccatactgaagaatatcagcgtgctagcattcagcgtgtgctttatttttacaattacgattgggatgttccccgccgtgacggtggaagtaaaatcatctatcgccggctccagcacctgggaacggtactttatcccggtgtcttgtttcctaacattcaatatcttcgattggctcggacggagcctcaccgcagtgttcatgtggcccggcaaggactctcgatggctgccgagcctcgtgcttgccaggctggtgttcgttcccctgcttctgctgtgcaacattaagccgcgccggtatttgactgttgtctttgagcacgatgcatggttcattttcttcatggcagcctttgcattcagtaatgggtacctcgctagcctttgtatgtgctttggcccaaagaaagtcaagcctgccgaggctgaaaccgcaggtgcaattatggcatttttcctctgtctgggcttagctctgggtgctgttttctccttcttgttccgcgctatcgtctag

SEQ ID NO: 135195 - DNA, 1371 bp, synthetic construct
  misc_feature 1..1371: note = Description of Artificial Sequence: Synthetic coding sequence
  source 1..1371: mol_type = other DNA
atgactacaagccaccagccccaggacagatataaggccgtatggctgattttttttatgctggggctagggacactgctcccttggaatttcttcatgacagcaacccagtactttaccaaccgcctggacatgtcccagaacgtatcactggtaaccgcagaactttcaaaggatgcccaggcttctgccgcacctgccgcccccctgcccgagcggaattcactgtccgcaatcttcaataacgtgatgacactctgtgctatgctgcctctcctgctctttacctatctcaattcatttctgcatcaacgcattccccagtccgttcgaatcttaggcagcctcgtggctatcctcctggtcttcctcataacggctatcctcgtgaaggtgcagctggacgccctgccgttttttgtcattaccatgatcaaaattgtcctgatcaatagctttggagctatccttcagggctccctctttgggcttgctgggttgcttccagcaagctacaccgcgccaatcatgagcgggcaggggcttgccggattttttgctagcgtggcaatgatttgcgccattgcctcaggaagcgagttaagcgagtccgcttttggctattttattactgcttgcgccgtgattattctcacaatcatttgttatctggggctgccaaggctggagttttacaggtattatcaacagctgaagttggagggacccggcgagcaagaaaccaagctggacctgatctctaaaggggaggagccacgagcaggcaaggaagagagcggggtttctgtgtctaactctcaaccgaccaacgagtcgcattccattaaagccatactcaagaatatctccgtgcttgctttttcagtgtgctttatttttaccataactattgggatgtttccagctgtcaccgtcgaggtaaaaagttccattgctgggagctccacatgggagaggtacttcatacccgtatcttgtttcttaacctttaatattttcgactggctgggacgctcactgacagcagtctttatgtggcccgggaaggattcccgctggctcccttctcttgttctcgctcggttggtcttcgtacctttactattgctgtgcaatataaagcctaggaggtatcttacagtggtgtttgagcacgatgcctggtttatttttttcatggctgctttcgccttctcgaatggttatcttgcttccctgtgcatgtgctttggcccaaaaaaagtcaagccagctgaggcggaaacggctggcgctattatggcttttttcctatgtctgggtctggccttgggtgccgtgttttccttcctatttagggccatagtgtag

SEQ ID NO: 135196 - DNA, 1371 bp, synthetic construct
  misc_feature 1..1371: note = Description of Artificial Sequence: Synthetic coding sequence
  source 1..1371: mol_type = other DNA
atgaccactagccaccagccccaggatcgctacaaggcggtctggctgatcttttttatgctgggactcggcactctgctgccgtggaatttctttatgacagccacacagtactttacaaacagacttgatatgagtcagaatgtgtcactggtcactgccgagctgtctaaagatgcccaggccagcgccgccccagccgctcccctccccgagcgcaatagcctcagtgccatctttaataacgtcatgacactgtgcgcgatgttgcctctcctgctgttcacctatctcaatagtttcctccaccaaagaatcccccaaagcgtccgtatcctcgggtcactcgtggctatcttgttggtgttcctcatcactgcaatcctagtgaaggtgcagctggatgccctccctttctttgtgattaccatgataaaaatcgtgctaattaactcgttcggagctattctgcagggctccttgttcggcctagctgggctgttgcccgcttcctacacagctcctattatgtctggacagggattggccggtttttttgccagtgttgccatgatttgtgcaattgcctccggttccgagctgtctgagtctgctttcggctactttataacagcatgtgcggtgatcatcctaacgatcatctgttatcttggactgcccagacttgagttttacaggtactaccagcagcttaagctggaagggcccggtgagcaagaaaccaaactggaccttatcagcaagggagaagagccccgagctggcaaggaggaatccggcgtatcggtgtccaatagtcaaccgaccaacgaatcacactccattaaagcgatactgaagaacattagcgtcctagccttctctgtgtgcttcattttcactatcacaataggaatgttccctgcagtgaccgtagaggtgaagagcagtattgccggtagttctacatgggaaagatactttattccagtaagctgctttctgactttcaacatcttcgattggctgggccgctccctcactgcagtattcatgtggcctggcaaggattctcggtggctaccatctctggtattggcgaggctcgtgtttgtccccctgcttttactctgcaatatcaagccacgcagatatctaactgtggtgttcgaacacgacgcctggttcattttttttatggctgccttcgccttctcaaacggatacttagccagcctttgtatgtgttttggaccgaagaaggtgaagccggctgaggccgaaacagctggagccatcatggccttttttctgtgtctggggctggccctaggtgcagttttcagtttccttttcagggcaatcgtctag

SEQ ID NO: 135197 - DNA, 1371 bp, synthetic construct
  misc_feature 1..1371: note = Description of Artificial Sequence: Synthetic coding sequence
  source 1..1371: mol_type = other DNA
atgaccacgtcacaccaaccccaagatcgctataaggccgtttggctgatcttctttatgctcgggcttgggacactcctgccttggaactttttcatgaccgcgactcagtatttcactaatcgactggatatgtcgcaaaatgtgtctttagtgactgccgaattgtctaaggatgctcaggcttccgcggccccggccgctcccctgccagaaaggaatagccttagcgcaatctttaataacgtcatgaccttgtgcgcaatgctgccactcctcctgttcacctatctgaactctttcttacaccagcgcattcctcagtcagttcgcatactaggaagtctagtggccattctccttgtgtttctcatcaccgcaatcttagtcaaggttcaactggatgccctgcccttctttgtgatcaccatgatcaagatagtcctgataaacagctttggagccattcttcagggtagtctcttcgggctcgcaggcctccttccagcctcttataccgctcctatcatgtccggccaggggcttgccggtttttttgcctcagtggcaatgatctgtgccatcgcctcaggcagcgagctatcagagtccgcattcggctattttataacagcatgtgccgtcatcattttaacgatcatctgctatctgggcctcccacggctggagttctatagatactaccagcagctgaaactggaggggcccggggagcaggagactaagctggaccttatttctaaaggcgaagaaccccgggccggcaaggaagaatctggggtgtcagtatcaaatagccagccgacgaatgaaagtcacagcatcaaagccattctcaaaaatatcagtgtgctggccttcagcgtgtgttttatcttcaccattacgattggaatgtttccagccgtcacagtggaggttaaatccagcattgccggaagctccacttgggagcgctattttataccagtgagctgtttcctgacgttcaatatatttgattggctcggacgctctctcaccgccgtattcatgtggcccggcaaggatagtagatggctacccagcctggtgcttgctcgtctggtgttcgtacctcttctacttctgtgtaatatcaagccaaggcggtaccttacagtcgtatttgaacacgatgcctggttcattttctttatggctgcttttgcctttagcaatgggtacctagccagcctctgtatgtgttttggaccaaagaaagttaaaccagcagaggctgagaccgcaggggctatcatggcctttttcctgtgtctaggactcgcgctgggggccgttttctcctttctctttcgcgccatcgtgtag

SEQ ID NO: 135198 - DNA, 1371 bp, synthetic construct
  misc_feature 1..1371: note = Description of Artificial Sequence: Synthetic coding sequence
  source 1..1371: mol_type = other DNA
atgacaacctctcaccaaccccaggatcggtataaagccgtgtggctaatcttttttatgctagggctagggactctcctgccttggaactttttcatgaccgcaacccagtactttaccaatcgcctggatatgtcgcaaaacgtttcgctggttacagccgagttgagcaaagacgcgcaggcctctgccgccccagcggcacccctcccagagagaaactccctctccgcgatcttcaacaacgtgatgacactgtgcgctatgttacctctcctgctttttacctatttaaattctttcctgcatcaacgtattccacagtcggtgcggatactaggtagtcttgtggcaatcctcctcgtcttcctgattaccgccatactggtcaaagtgcaactggacgcactgccattttttgtgatcacaatgataaagatcgtgctaattaattcatttggcgccatattgcaggggtcactcttcgggctcgccgggctccttcctgccagttacacagctccgattatgtcaggccaagggctggctgggttctttgccagcgtcgccatgatttgtgccattgctagcgggtcagagctctcagaatcagcctttgggtattttatcaccgcttgcgcggtgatcatcttgactatcatctgttatctgggtctgccccgcctcgaattctaccgctattaccagcaattgaagctggaggggcccggggaacaggagacaaaactcgatctgattagcaagggggaagaacccagagccggaaaggaggagtcaggtgtgtccgttagcaatagtcagccaacaaacgaatcacacagcatcaaggccattctgaagaatatttccgtgctagcatttagtgtctgctttattttcaccatcacaattggtatgtttcccgccgtaaccgtcgaggttaaatctagcatcgctggctcctctacatgggagagatactttatccccgtcagttgcttcctgactttcaacatctttgactggttgggccgcagcttaacagccgtgtttatgtggcccggcaaagattccaggtggctgccttccctggtgttggcacgcttggtgttcgtgcctctgctgctgctgtgcaatatcaaacctcgtcgctatctcacagtagtgtttgagcacgatgcctggttcatcttctttatggccgctttcgcctttagcaacggttacctagcctccctttgtatgtgttttggcccgaaaaaggtgaaacctgctgaggccgagactgctggagcaatcatggccttttttctgtgtctggggttagccctcggggctgttttctcatttcttttccgggccatcgtatag

SEQ ID NO: 135199 - DNA, 1371 bp, synthetic construct
  misc_feature 1..1371: note = Description of Artificial Sequence: Synthetic coding sequence
  source 1..1371: mol_type = other DNA
atgaccacctcacatcaacctcaggaccggtataaggccgtatggctaatcttttttatgctgggcctcgggaccctgctcccatggaacttcttcatgaccgcaacacagtattttacaaacaggctcgatatgtctcaaaatgttagtctggtgacagctgaacttagcaaagacgctcaggcttcggcagccccagcggcccccctcccggaacgcaattcactatcagctatttttaacaatgtaatgacactctgtgcgatgctgccactgctgttattcacgtatcttaactcctttctgcatcaacgtatcccgcagtcggttcgcatcctgggcagcctcgtggccatcctgcttgtgttcctgattacagcaatcctagttaaagtgcagctcgatgctctgccattttttgttatcaccatgatcaaaatagtgctgattaattccttcggggctattcttcaaggctccctttttggcctcgccggactattgcccgcatcctatactgcccccatcatgagcggccaggggctggccggtttcttcgcttctgtcgcaatgatttgtgccatagcttctgggtctgaactatcggagagcgcttttggatactttattactgcgtgcgccgtgattatactaaccattatttgttatctggggctgccgcggttggaattttaccgatactatcagcagttgaagctcgaaggacctggcgaacaggaaactaagttagacctgatcagcaagggcgaggagccccgggccggaaaggaggagtcaggggtgtcagtaagtaattctcaaccaactaacgagtcacactccattaaggcaattcttaagaatatcagtgtgcttgccttcagcgtatgttttatttttaccatcactatcggcatgttcccagctgtaaccgtggaggttaagagctctatagcgggatccagcacctgggagaggtatttcattcctgtcagctgcttcctgacctttaacatattcgactggctgggccgtagccttactgcagtgtttatgtggcccggaaaggattctaggtggcttccgagcctggtgcttgctaggctagtcttcgtcccgttgctgttgctgtgcaacatcaagcctagacgctatctgactgtagtcttcgaacatgacgcatggtttatcttctttatggcggccttcgccttcagcaacggctatctggcttctctttgcatgtgctttggtcccaaaaaggtgaaacccgctgaagcagagactgcaggagctattatggctttcttcctatgcctgggcctggcccttggcgccgtatttagctttcttttccgcgcaatcgtctag

SEQ ID NO: 135200 - DNA, 510 bp, synthetic construct
  misc_feature 1..510: note = Description of Artificial Sequence: Synthetic coding sequence
  source 1..510: mol_type = other DNA
atgcggcgcgaacgtacacggggtccacaggcatgggagttccccagccctaccaaaagtggatgctcactccagagccttagtcgctacaaggccgtatggcttatttttttcatgctggggttgggtacccttctgccctggaacttctttatgactgctacacagtattttacaaatcggctcgacatgagccaaaacgtcagtcttgtgacagcagagttgtctaaggatgcccaggcttcagctgctccagcggcccctctccccgagcgaaacagcttaagcgccatctttaacaatgtgatgaccctgtgcgcaatgctaccactgttgctctttacttacctaaatagctttttacatcagagaatcccccaatctgttaggatcctgggctccctggtggccatattgcttgtgtttctgataaccgccattttggtgaaggtgcagttagacgccctgccattcttcgtgatcaccatgatcaagatcgtcctgatttag

SEQ ID NO: 135201 - DNA, 1371 bp, synthetic construct
  misc_feature 1..1371: note = Description of Artificial Sequence: Synthetic coding sequence
  source 1..1371: mol_type = other DNA
atggccaggggagatgcacctcgcgattcttatcatctagtagggatttctttcttcattcttggccttgggaccctactaccttggaatttcttcattacagctataccatacttccaagctcgcctggctggagcaggaaatagcaccgccaggatcctgagtacgaatcacacgggaccggaggacgcctttaactttaataactgggtcacgttgctgagtcagctccccttgctgctgtttaccctcctaaacagttttctttaccaatgcgttcccgaaacagtgcggattctcgggtcactgctcgcaattctgctcctcttcgccctgaccgccgctctagtcaaagtggatatgtcacccggccccttcttctcgattacgatggcttctgtttgtttcatcaattctttctccgcagtcctacagggcagtctgtttgggcagctaggaactatgccatcaacatacagtacactttttctctccggccagggcctggcaggtatctttgccgcactggccatgctcctgagcatggcttccggagtcgatgccgagacctccgctctgggatacttcattacaccctgtgtcggtatactgatgagcatcgtgtgttacctctctctcccgcacctcaaattcgcccggtactatctggccaataagagctcccaggctcaggcacaggagctcgagaccaaggcagagttgctgcagtcagatgaaaatggcattcctagtagcccacaaaaagtagcgctcactctcgatctcgatctggaaaaggagcctgagagcgagcctgatgaaccccagaagcctggcaagccaagcgtttttacagtgtttcagaagatctggttgaccgctctgtgcctcgtgttggtctttaccgtcaccctgagcgtgttcccagcaattaccgctatggtgacttcctcaacaagccccggaaagtggagccagtttttcaatcctatctgttgtttcctgttgttcaatatcatggattggctgggccgtagtcttactagttattttctgtggccagatgaggacagcagacttctaccattgctcgtttgtctcaggttcctcttcgtccctctgttcatgctctgtcacgtcccacagaggtcaagacttcccatcttatttccacaggacgcctatttcattacattcatgctgttatttgcagtctcaaatggatacttagtgagtctcaccatgtgcctggcccctcggcaggtactgccccatgagcgggaggtcgctggggctttaatgacttttttcctagccctcggactttcctgcggagcaagcttaagctttttgttcaaggctctactgtag

SEQ ID NO: 135202 - DNA, 1371 bp, synthetic construct
  misc_feature 1..1371: note = Description of Artificial Sequence: Synthetic coding sequence
  source 1..1371: mol_type = other DNA
atggccagaggcgacgctcctcgggactcctatcatcttgtggggatatccttctttatactggggctgggaaccctattaccatggaacttttttataacggcaattccttatttccaggcccggctcgctggcgcaggcaacagcacagccaggatcctgtccactaatcacacaggaccagaagatgcgttcaactttaataattgggtaaccctgctctctcagctcccactgttgctgtttacactcctgaactcttttttataccagtgcgtgcctgagacagtgagaatcctgggctccctgcttgccattttgctgctcttcgccttgacagcagctcttgtgaaagtggacatgtctcctggaccgttcttctctataacaatggcttccgtgtgctttattaatagcttcagtgccgtactacagggctcattgtttggtcagctgggcacaatgccatctacctactccaccctctttttgagtggccagggtctggcagggattttcgccgctctggcaatgttgctaagtatggcttcaggcgtcgatgctgaaacatcggcacttggttactttattacaccttgcgtaggcattctgatgagcattgtgtgctacttgagtctcccccacttaaaattcgcccggtactacctggcaaataagtcctcccaagcgcaggcacaggaactggaaacgaaagccgagctactgcagtcggatgagaacgggattccctcatctccgcagaaggtggcactgacccttgacctggacctagagaaggaaccagagtctgagccagacgagccacagaagcccggcaaacctagcgtcttcacagtgttccagaagatatggctgaccgcactttgtctggttctcgtgtttactgtgactctcagcgttttccccgccattactgccatggtgacctcctccacttcccctggcaaatggtcacaattttttaatcctatctgctgtttccttctcttcaatatcatggattggctggggagatcattgacctcatactttctttggcctgacgaagactccagactgcttccactccttgtatgccttcggttcctctttgtgcctctctttatgctttgccatgttcctcaaaggtccagactgccgatcttgttcccccaagacgcttactttatcaccttcatgttactgtttgctgtgagcaatgggtatctcgttagcctgaccatgtgtctggctccaaggcaagtgctgccacacgagcgggaagttgccggggcactcatgacatttttcctggcactggggctgtcatgtggggcgtccttgagtttccttttcaaagctctgttgtag

SEQ ID NO: 135203 - DNA, 1371 bp, synthetic construct
  misc_feature 1..1371: note = Description of Artificial Sequence: Synthetic coding sequence
  source 1..1371: mol_type = other DNA
atggcgaggggagatgccccccgcgactcttatcacctggtggggatttccttctttatcctgggattgggtactcttctgccgtggaactttttcatcacggccatcccttacttccaggcgcgtttggccggcgctggcaattctaccgctcggattctttcaaccaaccataccggacccgaggacgcgtttaatttcaacaattgggttactttgctctcccaactgcctttgctgctgttcacgctgctgaacagcttcttgtaccaatgcgtgccagagaccgtgcgcatcctcggctcattattggcaatcctcctgctgtttgctcttacagccgcactggtcaaagtcgacatgtctcctggaccatttttttcaatcactatggcgtccgtgtgcttcatcaatagcttctcagcagtcttgcagggcagcttattcggtcaactggggaccatgccgagtacgtactcgacactttttctgtctggccaaggactggccgggatctttgcggccctcgccatgctgctctcaatggcttccggcgtcgatgctgaaacaagcgccttgggatactttatcaccccatgcgtgggaattctgatgagcatcgtgtgctacctcagtctgcctcatttgaagtttgctagatactacttggcaaacaagagctcacaggcacaggctcaagagctagaaactaaagcagagttgctccagagcgatgaaaatggcatcccatcatctcctcagaaggtggctctgacattagaccttgacctcgagaaggagcctgaatcagaaccagacgagcctcagaagccgggcaaaccttcggtctttacagtcttccaaaagatttggttgacagcgctgtgcctcgtattagtgtttaccgtaacactatcagtttttccagcaatcactgctatggtaaccagctccacaagtcctgggaagtggtctcagttcttcaacccaatctgttgttttctgcttttcaatattatggactggctcggccggtcccttacaagttactttttgtggccggacgaagatagcagattgctccccttgttggtgtgtctccggttcctgtttgtgcccctcttcatgctttgccacgtgccacagcgttctagactccctatccttttcccccaggatgcttactttattacatttatgttgctttttgctgtgtccaacggatacctggtgagtctcacaatgtgtctagccccacgccaggtgctgcctcatgaaagagaggtggccggtgcattgatgactttctttctggccctggggctctcatgcggcgcgtcactgtcatttttgttcaaagctctcctgtag

SEQ ID NO: 135204 - DNA, 1428 bp, synthetic construct
  misc_feature 1..1428: note = Description of Artificial Sequence: Synthetic coding sequence
  source 1..1428: mol_type = other DNA
atggctgtcgtatccgaggacgacttccagcacagcagtaacagtacttatcgaacgacctcctcgtcacttagagctgatcaggaggccctacttgagaagttgctggaccgccccccccctggtctccagcgaccagaagatagattctgcggcacctatataatctttttctcgctgggaatcggctccctcctcccatggaattttttcattacggccaaagagtactggatgttcaagttaaggaactccagctccccagcaactggtgaggatcctgagggtagtgacatcctaaactactttgagtcatatttggcggttgcttccaccgtgccatcgatgctttgcctcgtggctaatttccttctggtcaatcgcgttgctgtccatatccgagtgttagcctcgttgacagttatcctcgccatttttatggtaatcaccgcgctcgtgaaagtggacacctcctcgtggaccagaggcttttttgccgtgacaattgtgtgtatggtcattctctccggcgcgagtaccgtcttttcctccagtatctacgggatgaccggtagcttccccatgcgcaattcccaggcactgatttcaggaggagcgatggggggcacagtgtcagctgttgcttccctcgttgaccttgctgcatcctccgatgtcagaaattcggctttagcattctttctgaccgccacagtgttcctagtattgtgcatggggctttatctgttattgagtagactggaatacgccaggtactatatgcgaccagtgctcgctgcccatgtgttttcaggcgaggaagagctgccacaagatagtttgtccgccccatccgtcgcttcgcggtttatcgactcgcacaccccacctcttcggcctatcctaaaaaaaacagcttcccttggcttctgcgtgacttatgtgttttttatcacttccctcatctatcctgcgatctgcacaaatatcgaatcactgaacaaaggcagcgggagcctgtggacaaccaaattctttattccgttaacaaccttcctgttgtacaacttcgccgatctgtgtgggaggcagttgaccgcttggatccaggtgccaggacctaatagcaaggccttgccaggatttgttctgctgcgcacgtgcctaatcccactgttcgtgctgtgtaattatcagccccgagttcacctgaaaacagttgtttttcagagtgacgtttaccccgcgctattgagtagtcttctaggtttaagtaacggatacctgtctactctcgctttgttgtatggacctaagattgttccacgggagctggccgaggctactggcgtcgtgatgagcttctatgtgtgtttagggctgaccctagggtccgcatgcagcactcttctggtccacctcatttag

SEQ ID NO: 135205 - DNA, 1590 bp, synthetic construct
  misc_feature 1..1590: note = Description of Artificial Sequence: Synthetic coding sequence
  source 1..1590: mol_type = other DNA
atgtctcaggatacagaggtagacatgaaagaggtggaactcaacgagctcgagccggagaaacagcctatgaacgctgctagcggggctgccatgtcccttgctggcgccgagaaaaacgggctggttaagattaaggtggctgaagatgaggcggaggcggccgctgctgccaaattcacgggcttgagtaaagaggaactcctgaaagtagcagggagcccagggtgggtcagaacacggtgggcattgctgctactgttctggttgggttggctcggcatgctggcaggcgcggtggtgataattgtgagggccccaaggtgcagggagttgccagcacagaaatggtggcataccggtgccctgtatcggataggagatttgcaggcttttcagggtcatggggcaggcaatttggcaggccttaagggccgtctagactacttgagcagcctgaaagtgaaaggccttgtgctgggtcccattcataagaaccagaaagacgacgtggctcagacagacctgcttcagatcgatcctaacttcgggtctaaggaggatttcgacagcctgttgcaatcagccaaaaagaagtcgattcgggtaatcctggacttaaccccaaattaccggggcgaaaatagttggttctccacccaggttgacacagtggcaacaaaagtcaaagacgcactcgaattttggctccaggctggcgtggatggatttcaggttcgcgacattgagaatttgaaggacgcctctagctttcttgctgaatggcaaaacatcaccaagggattttctgaggaccgcctcctaattgccggtaccaatagcagtgatctacaacagatcctgtctctactggaaagcaataaggacctgctgctgactagtagctatctctccgacagcggcagcacaggagagcacaccaagtctctcgtgactcaatatcttaacgccacaggcaatcgatggtgcagctggtcactgagccaggcccggctcctgacctcttttctacctgcacagctcctacgactctatcagctgatgctctttactttgcctggcaccccagtgttctcctacggcgacgaaattggactggacgccgctgctctcccaggacaaccgatggaggccccggtgatgctgtgggatgagtcctcttttcccgacatacctggcgccgtgtcagcaaacatgaccgtgaaaggacagtccgaggaccccggatcactgctgagcctgtttaggaggctttccgaccagcggtccaaggagcgttccctcctgcacggtgacttccacgctttcagcgcgggccctggactgttctcatacatccgacactgggaccagaacgaacggtttctggtggtgcttaatttcggtgacgtgggcttgtccgcagggctgcaagccagcgacttgcctgcctctgccagtcttccggctaaagccgaccttctactgtctacacaacccggccgcgaggaaggctcaccattggaactcgaaaggctcaagctggagccacatgaggggttgttactgagatttccatatgccgcatag

SEQ ID NO: 135206 - DNA, 1707 bp, synthetic construct
  misc_feature 1..1707: note = Description of Artificial Sequence: Synthetic coding sequence
  source 1..1707: mol_type = other DNA
atggagctccaacctcctgaggccagcatcgccgtggtctcgatccccagacagctcccgggcagtcactctgaagcaggggtgcagggtctgagcgctggggacgattccggcaccatgagccaggacacagaggttgacatgaaggaagtggaattgaacgaactggaaccagaaaagcagcccatgaatgcagccagcggcgccgccatgagcctggctggggccgagaaaaatggccttgtaaagatcaaagtcgccgaggatgaagcggaggcggcagctgccgccaaatttaccggcctgtccaaggaagagctccttaaagtggcaggcagtcctggttgggtgcgaacacggtgggcactgttactcttgttctggctaggttggttagggatgctcgctggggccgtagttatcattgtcagggcgccacggtgtcgggaacttcctgctcagaagtggtggcacacgggtgcattataccggatcggtgacttgcaggctttccaggggcacggtgcaggtaatctggctggactcaagggtcgcttggattacttgagcagcctcaaggtcaaaggcctggtgctgggacctattcataagaatcagaaagatgatgttgctcagacagacctgctgcagatcgaccctaatttcgggagtaaggaggatttcgactctcttttgcagagcgccaaaaagaaaagcatccgcgtaatcttggatctgaccccaaactacaggggcgaaaacagttggttttccacacaggttgacactgtcgccaccaaagtcaaggacgcactcgaattctggctccaggcgggcgtggatggatttcaggtgcgcgatatcgagaaccttaaagatgcctcttcgtttttggcggagtggcagaatatcacaaaggggtttagcgaggacagactactgatcgctgggaccaactcaagcgatctgcagcagatcctgagccttctggaatcaaacaaagacctgttgctgacttcctcataccttagtgactccgggtctacgggggagcacacaaaaagcctcgtcacccagtatttaaatgcgacgggaaatcgctggtgctcgtggtcattatcccaagcccgactgttgacctctttccttccagcccagctgctgcgactgtaccaactgatgctgttcaccctgccggggactccagtcttctcatatggcgatgaaattgggctggacgcagccgctttacccgggcaaccaatggaggcaccagtgatgctttgggacgagtcctcctttcctgacatcccaggcgctgtgagcgccaatatgactgtgaagggccagagcgaggaccccggtagtctcctgagcctgttccggcgtctgagcgatcagagatcaaaagagagatccttgttgcacggcgattttcacgccttttctgccggccctggcctcttcagctatatccggcattgggaccaaaatgagaggttcctagtagtgctgaattttggcgacgtgggcctgtccgctggcctgcaggcatccgaccttcctgcatccgccagcctgccagcaaaagccgacctgctgttgtctacccagcctgggagagaggaagggtcgcctcttgagctggagcgcttaaaactcgaaccacacgaaggcctgctactgcggtttccatacgcggcttag

SEQ ID NO: 135207 - DNA, 1893 bp, synthetic construct
  misc_feature 1..1893: note = Description of Artificial Sequence: Synthetic coding sequence
  source 1..1893: mol_type = other DNA
atggagctccaaccacccgaggctagcatcgccgtggtgtcgatcccgcgtcagcttcccggctcacacagcgaagcaggcgtgcaggggctttccgccggagatgactccgagttgggaagccattgtgtcgcccagacaggattggagctgttggcctcaggtgatccacttccttccgcatcgcagaatgctgagatgatcgagactggcagcgattgtgttacccaagcaggactccaactgctcgcctcctccgacccaccggccctggcctccaaaaacgccgaggtgactggaactatgagccaggatacagaagttgatatgaaagaggtagagttaaacgagcttgagcctgagaagcagcctatgaacgctgcttctggagccgccatgtctctcgcgggggccgaaaagaatggcctcgtcaagattaaagttgctgaggatgaagctgaagctgctgcagcagccaagttcaccgggctgagcaaggaggaactgctaaaggttgccggaagtcccggctgggtgcgcacacggtgggccttattactgctcttttggttaggctggctgggaatgctggcgggcgcagtggtcatcattgtaagggcacctcgatgcagagagttacccgcccagaagtggtggcatactggcgccctttaccggatcggagatctgcaggcttttcaaggacatggcgcgggtaacctggcagggcttaaggggcgcttggactatcttagcagcctcaaggtcaagggactcgttctgggccccatccataagaaccaaaaagatgatgttgctcagacggatctgttgcagattgacccgaattttggctccaaagaagacttcgatagcctgcttcaaagcgctaaaaagaaatccatcagagtcattctcgatttgacaccgaactatcggggcgaaaattcttggttcagcacccaggtcgacactgtagccacaaaggtaaaggacgcactggaattttggcttcaggctggtgttgacgggttccaagtgcgggatatcgagaacctgaaagacgcctccagctttctggccgagtggcaaaacatcacaaaaggctttagtgaagacagattgctgattgcaggaacaaacagttccgatctacagcagattctgagtctgctggaatctaacaaggacctgctgctgacgtctagttatctttccgactccggatcaaccggggaacacactaagtccttagtgacacaatacttaaatgccacaggcaatcgctggtgtagctggtccctgtcccaagctcgcctgctcacttcatttctcccagctcagctcctgaggctgtatcaactgatgctctttactctccctggcacaccagtattcagctacggcgatgaaatcgggctcgacgcagccgcattgccaggccaacccatggaggctcctgtgatgctgtgggatgaaagctccttccctgacattccgggggccgtaagcgcgaatatgactgtgaagggccaatcagaagatcccgggtctctcttgagtttgttccggaggctgtcggatcagcgaagcaaggaaaggtctttactgcacggcgacttccatgcgttcagtgcagggcccggtctgttctcctatattcgccattgggatcagaatgagagatttctcgttgtactcaacttcggcgatgtcggcctcagcgcaggactccaggcatctgatctacctgcctcggcgtctctgcctgctaaagccgacctgctgctgtctacccagccgggtcgggaggagggctctcctttagaattagagagactcaaacttgaaccccacgagggcctgctcctgcgctttccctatgccgcttag

SEQ ID NO: 135208 - DNA, 1896 bp, synthetic construct
  misc_feature 1..1896: note = Description of Artificial Sequence: Synthetic coding sequence
  source 1..1896: mol_type = other DNA
atggaactccaaccaccagaagcttctattgccgtcgtgagtatcccaagacaattaccagggagtcacagtgaggccggagtgcagggattgtctgccggggacgacagtgagactggctctgattgtgtgacacaagccggccttcagctgttagcatcctctgatcccccggcactagcctcaaaaaacgctgaagttaccgttgagacaggctttcaccacgtgagtcaagccgacatcgaatttctaacgtccatcgatcccaccgcaagcgcgtctggctcagccgggattacaggcaccatgtcccaggataccgaggtggacatgaaagaagtggagctcaacgagctcgaacctgagaagcagcctatgaatgctgctagcggcgcagctatgtccttagccggggcagaaaaaaatgggttggtgaagattaaggtggcagaagacgaagcagaggccgctgcagcggcaaaatttacagggctgtccaaagaggaactcctaaaagtggccggatcccctggatgggtgcgtacaagatgggccctgctactgctgttctggctagggtggttgggaatgctcgccggggccgttgtcattatcgttagggcgcctcggtgcagagagctgcctgcacagaagtggtggcataccggcgcactttaccgcatcggagatctgcaggcgttccagggccacggcgctggtaacctagccggtctgaaaggccgtctcgattacctgtcctctctcaaagtaaaagggcttgtactgggacctattcacaagaatcagaaggacgatgtcgcgcagactgatttactacagattgatcccaatttcgggtcaaaggaggattttgacagtctgttgcagagcgcaaaaaagaaatctattcgcgtcattctggatctcacccccaattatcgcggagagaactcctggttttcaacgcaggttgacactgtggctactaaggtcaaggatgccttggagttttggctccaggccggcgtcgacggttttcaggtgcgcgacatagaaaatctaaaggacgcaagctctttccttgccgagtggcaaaacatcacaaagggcttctctgaggatagacttttgatcgccgggacgaactcgtcagatctacagcagattctttccttattagaaagtaataaggacctgcttctaactagcagctacctgtctgatagtggctcgactggagagcataccaaaagcttggttacccagtatctgaatgccacagggaatcgttggtgcagctggagcttaagtcaagcccggcttctgacttcattcctgccagcgcagcttctgaggttgtaccagctgatgttgttcaccttacccggcactcccgtcttttcctacggggacgagattgggctcgacgcagctgcgttgcctggccagcctatggaggcccccgtgatgctgtgggacgagtcctcattcccagacatcccaggggctgtctcagccaatatgacagtgaagggtcagtcagaggatcctggaagcctactgagtctatttaggcggctctccgaccagcgctctaaggagcggagtcttcttcatggagacttccatgctttcagcgcgggaccaggcctgttttcatacattagacactgggaccaaaacgagaggtttttggtggtgctcaactttggcgatgtcgggctgtcggcggggcttcaggcgtcagacctgccggctagcgcatccctccctgcaaaagcagatctgctacttagcacacagcccggcagggaggagggcagccctctggagctggaacgcctcaaattggaacctcatgagggtctgttattaaggtttccgtacgccgcatag

SEQ ID NO: 135209 - DNA, 1986 bp, synthetic construct
  misc_feature 1..1986: note = Description of Artificial Sequence: Synthetic coding sequence
  source 1..1986: mol_type = other DNA
atggaactgcagcccccggaggccagcattgcagttgtgagtatcccaagacagctccccggaagccacagcgaggcaggggttcaaggactctccgcaggcgatgactccgaactaggatcacattgcgtcgcccagaccggactcgagctgctggctagtggagatccattgccatcagctagtcaaaacgctgagatgattgagactggaagcgactgtgtgacacaggcaggcttgcagctgttggcttccagcgaccctccggcactcgcctctaaaaatgcagaagtaactgagaccggcttccaccacgttagtcaggcagacatcgagttcctgacatctattgaccccacggcctccgccagtggttctgcagggatcactggcacgatgtcccaggatacggaagttgacatgaaggaagtcgaactgaacgagttagaaccggagaaacagcctatgaatgctgccagcggcgccgctatgtccttggccggtgctgaaaaaaatggtctcgttaagattaaggtggcagaggatgaagcggaggccgctgccgccgcaaagtttacagggttatctaaagaggagctcctcaaggtggcagggagcccaggctgggtgcgtacaagatgggccctcttgcttctcttctggctgggttggctgggaatgctcgccggcgccgttgttattatcgtgagagcaccgcgctgcagagaacttcccgcccagaagtggtggcatactggggctctttaccggatcggagacctgcaagctttccaagggcatggagctggaaatctggccggcctcaaaggacgccttgactacctcagtagcctgaaggtgaaggggctggtcctgggtcccattcataaaaaccagaaagacgacgttgcacagacggatcttttgcaaattgaccccaactttggctccaaggaggactttgactcattgctgcagtcagccaaaaagaaaagtatacgggttattctggatttaacaccaaactacagaggagaaaactcctggttttctacccaggtagacacggtggccactaaagtgaaggacgctctcgagttttggctgcaggccggcgtcgatggcttccaggttagggacatcgaaaatctgaaagacgctagctcctttctcgccgagtggcagaatattacaaagggttttagtgaagaccgcctcctgatagccggaactaattcgtctgacctccaacagattctctccctgctggagagtaacaaggacctcctccttactagttcttatctgtccgactcaggttcgacgggcgagcatacaaagagcctcgtgactcaatacctcaacgctacaggcaacaggtggtgcagttggtccctaagtcaggcccggttgctaactagcttcttgccagcccagctccttcgattatatcagctcatgctgttcaccctgcctggcacacctgtgttttcgtacggtgacgaaattggactggacgctgctgccctgcccgggcagcctatggaggcacctgttatgttgtgggacgagtccagttttccggatataccaggcgctgtttccgcaaacatgacagtgaaaggacaatcagaagaccccggaagcttattgtcactgtttaggcgactgagtgatcagagatccaaagagcgttccctgctccatggagatttccacgctttttccgccgggccaggactatttagttacattcggcattgggaccaaaacgagaggtttctggtcgtcctgaactttggagacgtcggtctgtctgcaggattgcaagccagcgatttgcctgccagcgcctccctacctgccaaagccgatctgctcctcagtacacagccaggtagagaggaaggctcaccccttgagctcgagcgcttgaagctggaaccccatgagggtcttttgctgagatttccatatgccgcctag

SEQ ID NO: 135210 - DNA, 1536 bp, synthetic construct
  misc_feature 1..1536: note = Description of Artificial Sequence: Synthetic coding sequence
  source 1..1536: mol_type = other DNA
atgtcccaagatacagaagtggatatgaaggaggtcgagttgaatgagttggaacccgagaaacagcccatgaatgctgcttccggcgctgccatgagcctagccggagccgagaaaaatggcctggtgaaaattaaagtagctgaggatgaagcagaagcagcagcagcggccaagtttaccggactaagtaaagaggaactgctgttttggctgggctggctgggtatgctcgctggcgctgttgtgatcattgtgagggccccacgatgtcgcgagctgcctgctcaaaaatggtggcacacgggcgctctctacagaattggcgatctgcaagccttccaggggcacggagccggtaatctcgccggcctgaaaggacgacttgattacctgagcagcttgaaggtcaagggactggtcctcggtccgattcataagaaccagaaagatgatgtggcccagactgatctgctccagatcgaccctaacttcgggtccaaggaagattttgatagtctgttgcaaagtgctaaaaaaaagtccatcagggttatactggaccttacccctaactaccggggcgaaaactcctggttttctacacaggttgacacagtggcgacaaaggtcaaggacgctctagagttctggctgcaggctggggtcgacggatttcaagtccgggacattgagaacctgaaggatgcatccagtttcctggctgaatggcagaacattaccaagggattctcggaggatcggctcttaatcgcaggcactaactcatccgatttgcagcagatcttaagcctgctcgaaagcaacaaggacctgctcctgacgagcagctacctgtcggactctggatcaacaggcgaacataccaaatcattggttacccagtacctcaatgctacagggaaccggtggtgttcctggtctctatctcaagcacggttactgacaagtttcctgccggctcagttgctacgcctgtatcagctcatgttattcaccctgcctggcacaccggtgttctcttacggagacgagatcggcctggacgcagcagccctcccaggccagcctatggaggctccagttatgctttgggacgaatcaagctttcccgatattcccggcgccgtgagtgctaatatgaccgttaagggccagtccgaagaccccggctctcttttgtctcttttcaggcgcctcagcgaccaacgcagcaaggaacgcagtttgctccatggagatttccacgccttctccgcgggtcctggcctattttcctatatccgccactgggatcagaacgagcgttttttagtggtgctcaattttggtgatgttgggctctcagccggcctccaggcatccgatcttcctgctagtgctagcttacccgctaaagcagatctcttgctctcaacacagccgggccgggaagagggaagcccactcgaattagaacgccttaaactggagccccatgaagggctcttgcttagattcccctatgccgcctag

SEQ ID NO: 135211 - DNA, 408 bp, synthetic construct
  misc_feature 1..408: note = Description of Artificial Sequence: Synthetic coding sequence
  source 1..408: mol_type = other DNA
atgtcacaggacactgaggttgacatgaaagaggtcgaacttaacgaacttgaacccgaaaagcaacccatgaacgctgcctcgggagccgccatgtctctggcgggcgctgagaaaaacggcttagtgaaaatcaaagtggctgaggacgaagctgaggccgctgccgcagctaagttcacagggttaagtaaggaagaactacttaaagtagcagggtcccctggatgggtcagaacgcgctgggcgctgctgcttctattctggctgggatggctcggcatgcttgctggggccgtagtgattattgttagagcccctcggtgtcgagagctgcctgcccagaaatggtggcatactggggccctctaccggattggggacctccaggcttttcagggccactag

SEQ ID NO: 135212 - DNA, 2058 bp, synthetic construct
  misc_feature 1..2058: note = Description of Artificial Sequence: Synthetic coding sequence
  source 1..2058: mol_type = other DNA
atggccgaagataaatcgaagcgcgacagcatcgagatgtctatgaaagggtgccagaccaacaacggatttgtgcacaacgaggacatcctagagcaaacacccgatccagggtccagtacggataacctcaagcatagcacccgggggattctaggatcccaggagcctgatttcaagggcgttcagccttatgcaggcatgccgaaggaggtgttgtttcagttctccggccaggccagataccgcatcccccgagagatcctcttttggctgacagttgctagcgtgcttgttctcattgccgcgaccatagccatcatcgctctctctccaaagtgtcttgattggtggcaggagggacctatgtaccaaatctacccaagatcctttaaggactctaataaggatggtaacggcgacttaaaggggatccaggacaaactggattatattactgcactgaacattaagacagtgtggatcaccagcttttataaaagcagcctgaaagactttcgatatggagtggaagactttagggaagtggaccctatttttggcacaatggaggactttgagaatcttgttgccgcgatccacgataaggggcttaagctcattatcgacttcatcccaaatcatacctccgacaaacacatctggttccagctttccagaactaggactggcaaatatactgactactatatctggcacgattgtactcatgaaaatggcaagacgattcctccgaataattggctctccgtgtacgggaacagcagctggcactttgatgaagtgagaaaccagtgttatttccatcaattcatgaaggaacagcccgacctaaattttcgaaatccagacgtccaggaggagataaaagagatccttagattctggctgaccaaaggcgtggatgggttctcacttgacgccgtcaagtttttgctggaagctaagcacctgcgagacgagatccaggtgaacaagacccaaatcccggataccgttacccagtattcagagctgtatcatgatttcaccaccacccaggtgggcatgcacgacattgttcgctcctttcgccagactatggaccaatactcaactgaaccggggagatataggtttatgggaaccgaggcctatgccgagtccattgacagaaccgtcatgtactacggcttgcctttcattcaggaagccgattttcctttcaacaactacctgtctatgctagacactgtaagtggcaactccgtgtacgaggtgataacctcatggatggagaacatgcccgagggcaagtggcctaactggatgatcggcgggcctgattcctcccgcctgacaagtcggctaggcaaccagtatgtgaatgtgatgaatatgctcctgttcacccttccaggcactcctatcacatactacggcgaggagatcggcatgggaaacatcgtagcagccaacctaaacgagagttacgatattaacaccttaagatcgaaatcacctatgcagtgggataacagttctaacgcggggttttctgaagcctccaatacctggctgcccacaaatagcgactatcacacagttaacgtggacgtccagaaaacacagccacggtccgccttaaagctgtatcaggatttaagtttgttacatgcaaacgagctgttgctgaacagggggtggttttgccacttgcgcaatgactctcattatgtcgtctatacccgtgagttggatggaatcgaccgcattttcatcgtcgttctgaatttcggagaaagtaccctactgaacctccacaatatgattagtggccttccagctaagatgcggatcaggctgagcactaactcagcagacaaagggagtaaagtggatacgtctggcatcttccttgataagggcgagggcctgatttttgagcacaatactaaaaacctgctacacagacagaccgccttccgggacaggtgtttcgtttcgaatcgagcctgctatagcagcgtacttaacatactttatacctcctgttag

SEQ ID NO: 135213 - DNA, 1866 bp, synthetic construct
  misc_feature 1..1866: note = Description of Artificial Sequence: Synthetic coding sequence
  source 1..1866: mol_type = other DNA
atgaaaaccttttggagtaggcctcggatccagttttcaggacaggcccgctatagaatacctagggaaatactgttctggctgactgtggcaagcgtgctggtgctcatagccgccaccatagcaatcatcgccctctctcctaaatgtctggattggtggcaggaaggtcctatgtatcagatctacccaaggtctttcaaggactctaataaggacggtaacggtgacctgaaaggcatacaggataagttggactacattacagcattgaatatcaagacagtctggatcacttccttttataaatccagtctgaaggacttccggtacggcgttgaagacttccgcgaagtggaccccatattcggcacgatggaggacttcgaaaatctcgtcgcagccatccacgataagggactgaagcttatcatcgacttcattcccaaccacaccagtgataagcacatctggttccaactgagtcggacacgcaccggtaagtacaccgattattacatctggcatgactgcacccacgaaaacgggaaaaccatcccacccaacaactggctctcagtgtatgggaattcttcttggcactttgacgaggtccggaaccagtgttattttcatcagttcatgaaggagcaacccgacctgaacttccgtaacccagacgtgcaggaagagatcaaggagatcttgcgtttctggttgaccaaaggagtggatggcttttccctggatgccgtcaaattcctgctggaagctaagcacctgagagacgaaatacaggtgaataaaacccagattccagatacagttacacagtacagtgagctctaccatgacttcacaacaacacaagtgggtatgcatgatatagttcgctcgttccggcagactatggaccagtactcaaccgagccagggcgctataggttcatgggcactgaagcttacgccgagtccatcgacagaacagttatgtattacggactgccgttcatccaggaagcagatttccctttcaataactaccttagcatgttagacacagtttcaggtaatagtgtgtacgaagttatcacctcatggatggagaacatgccagaagggaagtggcccaactggatgatcgggggccctgatagtagccgcctgacaagcaggctgggaaatcagtatgtcaatgtcatgaacatgctgctctttactctgccaggcacccccataacgtattacggagaggaaatcgggatgggaaatatagtggcagccaatctcaacgagtcctacgacatcaacaccctgagatcaaaaagtcctatgcagtgggataacagttctaatgcagggttctctgaagccagcaatacatggctccccaccaattcggactaccatacagtgaatgtcgatgtgcagaaaacgcagccccgaagcgcactgaaactgtatcaggacctctcacttttacatgcaaatgaactcttgctaaatagaggttggttctgccacttgcgtaacgatagtcactacgttgtctacacacgcgaactcgatggtattgacagaattttcatagtggtgctgaattttggcgagagcaccttactaaacctacataatatgatctccggactccctgcgaagatgcgcattcggctgagtacaaattccgcagacaaggggtcaaaagtcgatacaagtggcatttttctggataaaggagagggtctgatctttgagcacaatactaagaaccttttacaccgccagactgcttttcgagatcgctgctttgtttccaacagggcctgttacagcagtgttctcaacatcctgtatacatcttgttag

SEQ ID NO: 135214 - DNA, 1656 bp, synthetic construct
  misc_feature 1..1656: note = Description of Artificial Sequence: Synthetic coding sequence
  source 1..1656: mol_type = other DNA
atggctgaagataagtctaagcgggattctatcgagatgtcgatgaagggttgtcagactaacaacggattcgttcataacgaggacattctcgaacagacaccagatccaggttcaagcactgacaatctgaaacattcaacgaggggaattttggggtctcaggagcccgatttcaagggagtccagccttatgccgggatgccaaaagaggtgctgtttcagttttccggccaggcacggtaccgaatccctagggagattctgttctggctgaccgtagccagcgtcctcgtcttaattgctgccacaattgcgattatcgcactgagtcccaaatgtttagactggtggcaggagggtcccatgtaccaaatctatcccagaagcttcaaggatagcaacaaagatggaaacggagacctgaagggaatccaggataagttagactatattacagcactgaacataaagacagtctggatcacctctttctataagtcctcactgaaagatttcaggtatggcgttgaagatttcagggaggtggatcccatttttgggaccatggaagacttcgaaaatctggtggccgccatccacgacaaaggattgaagttgattattgacttcatcccgaaccataccagcgataaacacatatggttccagcttagcaggactagaactggcaagtacactgattactatatttggcacgactgtacacacgaaaatggaaagactatccctcccaataactggctatcggtgtacggcaattccagttggcacttcgacgaagtcaggaaccagtgctatttccaccagtttatgaaggaacaaccagatcttaatttcagaaatccggacgttcaagaggaaattaaggagatcctgaggttttggctgactaagggcgtggatggcttctctctggacgctgttaagtttttgctagaggccaagcacctgcgagatgaaatccaggtgaacaagacccaaatccccgacactgtgacacagtacagcgagctgtatcacgactttaccactacacaggttggaatgcatgacatcgtaagaagctttcgacagaccatggatcaatatagcaccgagccaggaagataccgcttcatgggaactgaggcttacgcggaatcaattgacaggacagtgatgtactatggcctccctttcatccaagaagccgacttcccattcaataactatttgagcatgctggataccgtgagcggtaacagcgtatatgaggtgataacttcttggatggagaatatgcctgagggcaaatggcccaactggatgataggcggcccagatagctccaggcttacctctaggctcggtaaccaatatgtgaacgttatgaatatgctcctgttcacgcttcccggcaccccaatcacctactacggggaagagatcgggatggggaatatcgttgccgctaaccttaatgaatcctatgacataaatactcttaggtccaagtcacccatgcagtgggacaacagctctaatgctggctttagtgaagcgagcaacacctggctgccaactaattctgattatcacaccgtgaacgttgatgtgcttctgcgtcacccatgtagctctgcggtggcctag

SEQ ID NO: 135215 - DNA, 1524 bp, synthetic construct
  misc_feature 1..1524: note = Description of Artificial Sequence: Synthetic coding sequence
  source 1..1524: mol_type = other DNA
atgggatgctgggggcgaaatcgtggcaggcttctctgtatgctggccctgacatttatgtttatggtcctggaggtggtagtgagccgggttacttcatctctggcgatgttatccgatagtttccatatgctgagtgatgtcctggccctggtggtcgccttggtggccgaacggttcgcacggcgtactcacgccacacagaagaatacttttgggtggattcgcgcagaggtgatgggggcgcttgtcaatgcaatatttttgaccgggctatgctttgctatactcctggaagccatcgaacgtttcatcgagcctcatgaaatgcagcagcccctcgtggttcttggggtaggcgttgctggactgctcgtgaacgtgttgggtctctgcctgttccaccatcacagtggattctcacaggacagtggacatggtcatagccacggggggcatgggcacgggcatggtctgcccaaagggccaagggtaaaatctaccaggccaggctcatctgatatcaacgtcgcgcccggggaacaggggcctgaccaagaagaaaccaatacccttgtggccaatacttccaacagtaacggacttaagctggacccagcagaccccgagaacccgcgttccggggacactgtcgaggtccaggttaacggaaacctggtgcgtgagcctgaccacatggagctggaggaagacagggcgggccagttgaatatgagaggagtgtttctgcatgtactgggagatgcccttggctccgtgatcgtcgttgtgaatgccctggttttttattttagctggaagggttgttctgaaggcgacttttgcgtgaatccgtgtttcccagatccctgtaaagcctttgttgaaatcatcaacagcacccatgcctccgtctatgaggcagggccctgctgggtgctgtatttagacccaaccctttgcgtagtcatggtctgtatccttctttacaccacttatcccctgttaaaagaatccgcgcttatcttactgcagacagtcccgaaacagatcgatatacggaatcttatcaaggaactcaggaacgtcgagggagtggaagaggttcatgagttgcacgtgtggcagctcgccggctcaaggataatcgctaccgcacacattaagtgtgaggatccaacctcttacatggaagtcgcaaagacaatcaaagacgtgtttcacaatcacggcatccacgccactaccattcaacctgagttcgctagtgtagggagtaaatcatccgttgtgccctgtgaactggcttgccgtacccagtgtgccttaaaacaatgctgcggtacgttaccacaagcgccttccggaaaggacgctgaaaaaacgccggccgttagtatctcttgcttagagctgtccaacaatctcgagaagaaaccaagacggaccaaggccgaaaacatccctgcagtcgtgatcgaaattaaaaacatgccaaacaagcagcctgagagttccttatag

SEQ ID NO: 135216 - DNA, 1119 bp, synthetic construct
  misc_feature 1..1119: note = Description of Artificial Sequence: Synthetic coding sequence
  source 1..1119: mol_type = other DNA
atggaggccaaagaaaagcagcatttactcgacgctagaccagccatccgaagctacaccggcagtctatggcaagaaggggccggatggattcctttgccacggccggggttggacctccaggctatcgaactggctgcacagtccaaccaccattgtcatgcacaaaagggccctgatagtcattgcgaccctaagaagggcaaagcacagagacagttatacgtagcctcagccatttgtttgttgtttatgattggtgaggtcgttggcggctatctggctcatagtttggctgtgatgactgatgctgcccatctgttaactgactttgcgagcatgctcatttccctattctctctgtggatgagctccagacccgcgacaaagaccatgaacttcggttggcagagggccgagattttgggagccttagtttccgtcctgagcatctgggtggtaacgggagttctggtataccttgccgtggagagactcatttcaggtgactacgaaatcgatggcggcactatgcttatcacaagcgggtgtgctgtggccgtgaatatcataatgggattgactttacaccaaagtggccacggccactctcacggcaccactaaccagcaggaggagaacccgtctgtgagggcagctttcatccatgtaattggcgatttcatgcaaagcatgggagtgcttgtcgctgcgtacattttgtactttaaacctgagtacaaatacgtagaccctatctgcacgtttgtgttctcaatacttgtgctcggtactaccctgaccatactccgcgatgttatactggtgctgatggaaggaacacccaaaggggtggatttcaccgccgtgcgagacctgctgctgtccgtggagggcgtcgaggcactgcactccctgcatatctgggcactaactgtcgcccagcctgtgctgtcggtgcacattgccatcgcacagaacactgacgcccaggctgtgcttaaaaccgcatcttccagattgcagggcaagttccactttcataccgttaccatccaaatcgaagattattctgaggacatgaaagactgtcaagcctgtcaaggaccctctgattag

SEQ ID NO: 135217 - DNA, 972 bp, synthetic construct
  misc_feature 1..972: note = Description of Artificial Sequence: Synthetic coding sequence
  source 1..972: mol_type = other DNA
atggaggcgaaagaaaaacagcacctactggacgccaggccagccattagatcctatactggcagcctgtggcaggagggagcaggctggatcccgttgccgaggcctggcttggacctgcaggccatcgaacttgcagctcaatctaaccaccattgccacgcgcagaaaggccctgacagtcactgtgaccctaaaaaaggcaaagcgcagcgccagttgtatgtggcctcggcaatttgtctgctatttatgattggggaagttgtcgagatcttgggagctcttgttagcgtgttatccatttgggtagtgaccggtgttctggtctatctggcagtggagaggctaatatccggggattatgaaattgatggcgggactatgttgattaccagtggctgtgcggtggcggtaaacatcatcatgggtctcacactacaccaatcgggtcatggacacagtcacggcactacgaatcaacaggaagaaaacccttcagtgcgggcagcctttattcacgttatcggggatttcatgcagtctatgggcgtgctggtcgccgcctacattctgtactttaagcctgaatataagtacgtggaccctatatgcacctttgtgttcagcatccttgtcctgggtacaactctgacaattctgagagacgtgattctagtcctcatggaaggcactcccaaaggcgtggacttcacggctgtgagggaccttctgctctcggtagagggcgtggaggctcttcacagtctccacatctgggccctcacagtggctcagccagtcctgtctgtccatattgctattgctcagaataccgatgcacaggccgtgctgaaaaccgcctcatccaggcttcaaggaaagttccacttccatactgtaactatacaaatcgaggattactcagaggacatgaaagactgtcaggcctgtcagggaccctccgactag

SEQ ID NO: 135218 - DNA, 345 bp, synthetic construct
  misc_feature 1..345: note = Description of Artificial Sequence: Synthetic coding sequence
  source 1..345: mol_type = other DNA
atgggacccagacgaaggagccgaaagccggaagcaccccgtagaaggagtccctcacccacacccacccctgggccttctaggcgggggccatcgctgggggccagctctcatcagcactcaaggaggagacaggggtggctcaaggaaattcgcaagttgcagaaatctacccaccttttaattcggaaactaccattctcacgtctcgcagcggaagctttcctggtccatctttttgaggacgcataccttctaaccctgcacgctggtcgcgtcaccttattcccgaaagacgtccagttggccaggagaatacggggactggaggaaggactggggtag

SEQ ID NO: 135219 - DNA, 300 bp, synthetic construct
  misc_feature 1..300: note = Description of Artificial Sequence: Synthetic coding sequence
  source 1..300: mol_type = other DNA
atgccatttcatcactgccacagagatcctttacccccgccagggttaacacctgagcgcctgcacgccaggagacagctatacgctgcatgcgcagtctgtttcgtctttatggccggcgaagtggtcggcggatatctggcccattcattagcgatcatgacagatgccgcccatcttctcgctgacgtgggcagcatgatggggtccctgttctctttgtggctctccactcgccccgccacgcgaaccatgacctttggctggcacagatctgaaacgctcggtgctctggcttag

SEQ ID NO: 135220 - DNA, 723 bp, synthetic construct
  misc_feature 1..723: note = Description of Artificial Sequence: Synthetic coding sequence
  source 1..723: mol_type = other DNA
atgccttttcaccattgtcatcgcgatcccctgcctcctcccgggctgacccctgagaggcttcacgcccgacgccaattgtacgccgcctgcgcagtatgcttcgtattcatggccggggaggtggtcggtgggtacctggcacactcgctggctattatgaccgatgctgcccaccttctggcagatgtaggttcaatgatggggtcactgttctccctttggctgagcacccgccctgcaaccaggaccatgacatttggctggcaccgctccgaaaccctcggagccttagcctctgtggtgagtctatggatggtgacaggcattcttctctacttagctttcgtgagactgctccattctgattatcacatcgagggcggagcaatgctgctgactgcgtcaatagccgtctgcgccaacctcttgatggccttcgtgctccatcaagccgggccaccccattctcatggcagtcgaggtgctgaatacgctccacttgaggaaggtccggaagagcccctccctcttggaaatacgagcgtgagggcggccttcgttcacgtgctcggggaccttctccagagtttcggagtcctcgccgcctcaattcttatttacttcaagccacaatataaagctgcggacccgatttcaacattcctgttttcaatctgtgctctcggttcaacagcgcccacccttagagatgtgctgtag

SEQ ID NO: 135221 - DNA, 1152 bp, synthetic construct
  misc_feature 1..1152: note = Description of Artificial Sequence: Synthetic coding sequence
  source 1..1152: mol_type = other DNA
atgcgcgttgccgccggagccagaggcgagaacatcgagcatttaaagcttcgcctcgaggcccggccgccaactctactgctcttcaccgagccaagcgagcccctacccgaagaatccaagccagtggagatgccatttcaccactgtcaccgtgaccccctgccgcctccgggactcactcctgagcgactgcacgctcgaaggcaactatacgctgcctgtgccgtgtgtttcgtgtttatggccggcgaggtggtcggaggatacctggcccactccctggcgataatgacagacgctgctcacctactcgccgatgtgggatctatgatgggcagcttatttagcttatggctctccactcgtccagctacgaggacgatgaccttcggatggcaccgaagcgagacactcggcgctttagcctccgtggtgtcattgtggatggtgacaggcattctcctctatctggctttcgtgcggctcttacactccgactatcatatagagggtggtgcgatgttgttgaccgccagtatcgccgtttgtgccaatctgctgatggcatttgtgctgcatcaggctggacctcctcacagccacggatcacgtggagccgaatacgcacccctagaggaagggccggaggaaccacttccacttgggaatacaagtgttagagccgcgtttgtacatgtgctgggtgatctgctccagagtttcggggttctcgccgcttctattctgatctatttcaagccacaatataaagccgctgatcctatctctacctttttattcagtatctgtgcactggggtctacagccccaaccctgcgggacgttttacgaattcttatggaggggactcccaggaatgtgggatttgagcctgttagagacaccctgctttccgtgccaggagtccgcgctacgcacgagctgcacctgtgggccttgacactaacctaccatgtagccagtgctcacctagccattgatagcactgcagatccggaagcagtcctcgcggaggcctcaagcagactttactcacggtttggtttctcgtcgtgtacactgcaggtggagcagtaccagccagaaatggcccaatgtctgaggtgccaggagcctcctcaagcgtag

SEQ ID NO: 135222 - DNA, 336 bp, synthetic construct
  misc_feature 1..336: note = Description of Artificial Sequence: Synthetic coding sequence
  source 1..336: mol_type = other DNA
atgcctttccaccattgtcacagggatcccctgccccctcccggcctcacgcccgaacggctgcacgcaaggagacagctttatgcagcatgtgcggtttgcttcgtcttcatggccggggaggttgtcggtgggtatttggcccattcactagccattatgacagacgcagcacacttactcgcagatgtaggctccatgatgggaagccttttttccctgtggctttctacacgcccggctacccggaccatgacctttggctggcatcggtccgagactctgggagcactcgcctccgtcgttagtctgtggatggttaccggcattttatag

SEQ ID NO: 135223 - DNA, 1290 bp, synthetic construct
  misc_feature 1..1290: note = Description of Artificial Sequence: Synthetic coding sequence
  source 1..1290: mol_type = other DNA
atggcgggcagcggcgcctggaaaagactgaagagcatgttaaggaaggacgacgcgcctttgtttttaaatgacacctctgcattcgatttctccgacgaggctggcgatgaaggactgtccaggtttaataagctccgagtcgtggtcgcagatgatgggagcgaagcgcccgagcgccccgtgaacggcgctcatcctaccctgcaggctgatgacgattccctgttggatcaggatcttcctctgaccaattcacagttgagtcttaaggtggatagttgtgacaactgcagtaaacaacgagaaatcctgaaacagcgcaaggtgaaggccaggctcacaatcgcagcagtgctttacctcctcttcatgattggcgaactggtgggcggttacatcgctaattccttagcgataatgaccgacgccttgcacatgctgaccgatctgtcggccattatcctgacacttttagcactctggctttcgtccaagtcacctacaaagcggttcacattcggatttcacaggcttgaagttctttccgccatgatatctgtgctgctcgtatatatcctgatgggcttcctgttatatgaggcagtgcagaggaccatccatatgaattacgagattaacggtgacatcatgttaatcaccgctgcggtcggagtcgcagtgaacgtgatcatggggtttctactgaaccagtccggtcaccggcacagccacagtcactcacttccctctaatagcccaacacgcggctctggatgtgaacgcaatcacggacaggactctcttgcagtgcgagccgcattcgtgcatgcactgggtgacctggtgcagtccgtgggtgtcctgatagccgcctacattatcaggtttaaacccgagtataagatcgcagatcccatttgcacttacgtgttcagcttgttggtggctttcactacgtttagaatcatttgggataccgttgtaatcatcctggaaggagtgccgagtcatttgaatgtcgactacataaaagaggctctgatgaaaatcgaagacgtgtacagtgtcgaggatttgaatatctggagcctaaccagcggtaagtccactgccatcgtgcatattcagctgatccccgggtcatcatccaaatgggaagaggtccaatcaaaggctaatcacctgctcctgaacacttttggcatgtatcggtgtactattcagctgcagtcttaccgccaggaggtggacaggacatgtgccaactgtcagtcaagtagtccttag

SEQ ID NO: 135224 - DNA, 357 bp, synthetic construct
  misc_feature 1..357: note = Description of Artificial Sequence: Synthetic coding sequence
  source 1..357: mol_type = other DNA
atggaagaaaagtacggaggagacgtgctggctggtcctggtggaggcggaggcctgggtcctgttgacgtcccctcggcacgactaacgaagtatatagtgctcctgtgcttcacgaagtttctgaaggccgtcggcctctttgagagctatgacctgctgaaggctgtacacatcgttcagttcatcttcattctgaagctgggaacggcattttttatggtgctctttcagaaacccttctcatctggcaaaacaatcactaagcaccagattattggatctctcaaaattcctgggcgaaaggagttcaaagacaagaagctgaatgatcctcgcaagctggtgggaaactag

SEQ ID NO: 135225 - DNA, 2298 bp, synthetic construct
  misc_feature 1..2298: note = Description of Artificial Sequence: Synthetic coding sequence
  source 1..2298: mol_type = other DNA
atggaagagaaatacggcggggacgtgctggcaggacctggaggtggcgggggcttgggtcctgtggatgtgcctagtgccagactcactaagtacatagtgctgctgtgctttaccaaattcctcaaggcagtggggctcttcgaaagctacgatctcctaaaggcagtgcatatagtccagtttatatttattctgaagttaggtacagcttttttcatggtgctgtttcagaagcccttcagctctgggaaaactatcaccaagcatcagtggatcaaaattttcaagcatgccgtggccggctgcatcatatcgttactgtggttcttcggcttaactctgtgtggtccattgagaacactgttattattcgaacacagtgacattgtcgttatctcactgctgtccgtgctcttcactagctcgggagggggaccagccaagactcggggcgctgcatttttcatcatcgcggtaatatgcttactactcttcgataatgacgacttgatggccaaaatggccgaacaccctgaagggcaccacgacagcgctttgactcacatgctctataccgctattgcatttcttggagtggcagaccataagggcggcgtcttgctgctggtgctggccttatgctgcaaagttggatttcataccgcctccagaaagctgtctgtcgatgtggggggggcaaagagactgcaagctctttcccatttggtgagtgtcctcctcctctgtccctgggtgattgttttgtcagtgacaacggagagcaaggtcgagagctggttctccctcataatgcccttcgcaactgtaatattctttgtgatgatactcgacttctacgtagattccatatgctctgtaaagatggaggttagtaagtgcgcacggtacggatcctttcctatattcataagcgcgctcctgtttggcaacttttggacacaccccattactgaccagctccgggccatgaataaggccgcccatcaggaaagcactgagcatgtcttgagcggaggggttgtggtaagcgctatattctttattctcagtgccaacatcctcagttcaccttccaagcgcggacaaaaggggacactaattggctattccccggagggtacacccctgtacaactttatgggcgacgcttttcagcatagctctcagagcatcccaaggtttattaaagagagcctcaagcagatcttagaggagtcagacagtaggcagatcttctacttcctatgcctcaatctgctgttcacatttgtggaactattttacggcgtcctcacgaacagtttaggactcatctcagacggattccacatgcttttcgattgttctgcacttgtcatgggtctgtttgcggcacttatgtccagatggaaagccacccgtatcttttcttacggatacgggcgtatcgagatactcagtggcttcattaacggcctgttcttaatagtaatcgctttcttcgtgtttatggaatccgtcgctagattgatagatcccccagagctggacacccatatgctcacgcctgtctctgtaggaggcctgattgtcaatctgatcggcatttgcgctttttcccatgctcactcacacgcacacggagcctcgcagggctcgtgtcattcaagtgaccattcccacagccatcatatgcacggccattcggaccacggacacgggcattcccacgggtctgcgggcggaggtatgaatgctaacatgcgcggtgtattcctgcatgtgctagcagacaccctggggtcaattggagtaattgtttccactgtgctcattgagcaattcggatggttcatcgcggaccccctgtgctcactcttcatagccatcctcatattccttagtgtagtaccattaatcaaggatgcttgccaggtgcttctgcttaggctcccccctgaatatgagaaggaattgcacatcgcactggaaaaaatccagaagatagagggactaattagctatagggatccacatttttggcgccatagtgcttcaatagtagccggcactatccacattcaggtgactagcgatgtactcgagcagcggattgtgcagcaggtgactggaatccttaaggacgcgggggtcaataaccttacgattcaggtggaaaaggaggcttacttccaacatatgagtgggctgtctaccggattccacgacgtgctggctatgaccaagcagatggaaagcatgaagtattgcaaggacgggacctatattatgtag

SEQ ID NO: 135226 - DNA, 1083 bp, synthetic construct
  misc_feature 1..1083: note = Description of Artificial Sequence: Synthetic coding sequence
  source 1..1083: mol_type = other DNA
atgggggacgcatttcagcactcgagccaaagtatccctcgatttatcaaggagagcctgaagcagatcctggaagagagcgactcaaggcagattttctatttcctttgcttaaatctgctctttacctttgtcgaactcttctacggagtgctcaccaactcactgggcttgatcagtgatggcttccacatgctgtttgactgtagcgccctggttatggggttgttcgcggcccttatgtccaggtggaaagcgacgcgcatcttcagctacggatatggcagaattgagatcctgtcagggttcattaacggtttgttcctcattgtgatcgccttcttcgtgttcatggagtccgtggccaggttaatcgatccacccgaattggacacccatatgttgactccctgccactcacatgcccatggagctagccagggcagctgccacagcagcgatcattcccattcacaccatatgcatggacattccgatcacggccatgggcacagccacgggagcgcaggcggaggtatgaatgccaacatgagaggtgtcttcctacacgtcctggctgatacattagggtctatcggcgtcattgtcagcacggtcctaatcgagcagtttggatggtttattgctgatccactgtgtagtctctttatagccatcctaatattcctctccgttgtccccctgatcaaggacgcgtgtcaggtgctactgctgaggctcccccctgagtacgaaaaggagctgcacatcgccctagagaaaatacaaaagattgagggcctcatctcatatagggacccacacttttggagacattcagcgagtattgtcgctgggaccattcacatccaggtgacaagcgatgtgttggaacagcggattgtccaacaggttactggaatcttaaaggacgccggcgttaacaatctcaccatccaggttgagaaggaggcctactttcagcacatgtcaggcctgagcacaggtttccatgatgtcctcgcgatgaccaaacaaatggagagtatgaagtattgcaaggatggcacatacatcatgtag

SEQ ID NO: 135227 - DNA, 1386 bp, synthetic construct
  misc_feature 1..1386: note = Description of Artificial Sequence: Synthetic coding sequence
  source 1..1386: mol_type = other DNA
atgggaacgattcacctctttaggaaaccacaaaggagcttttttggtaagttgttgcgcgaattccgcctggtagccgccgacaggcgctcatggaaaatcctgctgtttggagtgattaatctgatatgtacagggtttctgctcatgtggtgctccagcaccaattctatcgccttgacagcctacacttacttgactatttttgacctcttcagcttaatgacatgtctgattagctactgggtgaccctgcggaagcctagtccagtgtattcttttgggtttgagcgattggaggtcctggccgtgttcgcatcaacagtattggcgcagctcggcgctttatttatcttaaaggagagcgcagaacgctttctcgaacagcctgaaatccacacaggtagattactggtcggaacctttgtggctctgtgtttcaacctgtttaccatgctgagtatccggaataagccatttgcttatgtctcggaggccgcctccacctcttggctccaggaacatgtggcagatctgtcgcgcagcctatgtggtataataccaggcctgagcagcatcttcctgcctcgcatgaatccgttcgtattaattgacctcgcaggagctttcgccctttgtatcacttatatgctgattgagattaacaactattttgccgtggatacagccagtgctattgcgatcgccctaatgacatttggaacgatgtatccaatgagcgtctatagcggaaaagtccttttgcagaccacacctcctcacgtgatcggccaactggacaaattaattagggaagtgtccaccctggatggcgttttagaagtgcgtaacgaacacttttggacgctcggcttcggcagtttagctggctcggttcacgtgaggatccggagggacgccaatgagcagatggtcttggcgcatgtgactaatagactatacacgcttgtgtctacactcacagtgcagatattcaaggatgactggatccgcccagccctgctgtcagggcctgtggccgccaatgtccttaatttttccgaccaccatgtgatacccatgccactcttaaagggcaccgacgacctcaatccagtgacttccaccccagctaagccttctagtccccccccagagttctctttcaacactcccggaaaaaatgtcaatccagtcatcttactgaatactcagacaaggccctacggatttggcctcaaccatgggcacactccatatagctcaatgctcaatcaaggactaggcgttcccggcatcggagccacacagggcctgcgcaccggcttcaccaacattcctagtcgttacgggacgaataaccgaatcgggcagccccggccatag

SEQ ID NO: 135228 - DNA, 795 bp, synthetic construct
  misc_feature 1..795: note = Description of Artificial Sequence: Synthetic coding sequence
  source 1..795: mol_type = other DNA
atgaacccctttgtgttgatcgacttggcaggggctttcgcactatgcatcacgtacatgttaatcgaaatcaataactatttcgctgtggacactgcctctgccattgctatcgctctaatgacatttggcacgatgtaccccatgagcgtatattcgggtaaagtcttgctgcagactacccctcctcacgtcattgggcagttggacaaactgatccgcgaagtttcaactctggatggtgtcctagaagtgaggaatgagcacttttggaccttgggcttcgggagcctcgccggctcggttcacgtacgcattcgccgcgacgcaaatgagcagatggtgcttgcccacgtgactaatcgactgtataccttggtgagtaccttgaccgtccagatctttaaagatgactggatcagacctgccctcctgagtggaccggtggccgccaacgtcctcaacttctccgatcaccacgtgatccctatgcccttgctaaaaggaacagatgatctcaaccccgtgaccagcacacccgccaaaccatcttcaccgccgcctgaattctcttttaacacacccggtaagaatgtgaacccagtgattctcttaaacactcagactcgcccatacggcttcggcttgaatcacggccacactccttatagcagtatgctgaatcaaggactaggagttcccggaatcggcgcaacccaaggtctgcggacggggttcaccaatatccctagccgatatggaaccaacaacaggatcggacagcctcgcccatag

SEQ ID NO: 135229 - DNA, 1506 bp, synthetic construct
  misc_feature 1..1506: note = Description of Artificial Sequence: Synthetic coding sequence
  source 1..1506: mol_type = other DNA
atgggtactatccatctattccggaagccccaaagatccttctttggcaagctactccgcgagttccgtctggtggccgccgacagacgctcctggaagatactgttgttcggagtgattaacctcatctgcaccggcttccttctgatgtggtgcagctccacaaactccatagctctaaccgcctacacctaccttactatattcgatctctttagggacggcgtatctcctttttggctgggatggtcccagaccccagatctgaagtggtctactcacctcggactgccgaagtgctgggacaataggcgggaactgccctgcctaagcaatagcttgatgacctgccttatcagttactgggtaactctgcggaagccttcccccgtgtacagctttggatttgagcgtctggaggtcctcgcagtgttcgctagcacagtgctggcacagctaggagcgctgttcatcctgaaagagtcagctgagaggtttctggagcagcctgaaatacacaccggccgcctgctggttgggacttttgtggccctgtgcttcaacctgttcacaatgttgtcgatcaggaacaaaccttttgcctacgtttctgaagcggcctctacatcttggttgcaggaacatgtggcagatttatccagatcactttgcggaatcattccgggactatcctcaatctttctgcctagaatgaatccatttgtgctaattgacttggctggcgccttcgccctgtgcatcacatatatgctgattgaaatcaacaactattttgcggtcgatactgcttccgcaatcgcgatagcccttatgactttcggcactatgtatccgatgtctgtttatagtggcaaggttctccttcagactacccctcctcacgttatcgggcagctagacaagctgatccgcgaggtgagtacactggacggcgttctcgaggtgaggaatgagcatttctggacgttggggtttggttctctcgccgggagcgttcatgttagaatccgccgggatgccaatgagcaaatggtcctagcccacgtcacaaatcggctgtacactctggtgagcacactgacagtgcagattttcaaggacgactggattagaccagccctattaagcggtccagtcgcagccaacgtcctgaacttcagtgaccaccatgtgatcccgatgcccctgctgaagggaacagacgaccttaacccagtaacatcaacgccggccaagcccagttcaccccctccagagttcagcttcaatactccaggcaaaaatgtgaatcctgttattcttctgaatacccaaacgcgcccctatggatttggtcttaaccatggacacacaccatacagctctatgctgaaccagggactcggtgttccaggtattggcgccacgcagggactgagaaccggcttcacaaatataccttcacggtacggcacgaataatcgtataggccagcccagaccctag

SEQ ID NO: 135230 - DNA, 1164 bp, synthetic construct
  misc_feature 1..1164: note = Description of Artificial Sequence: Synthetic coding sequence
  source 1..1164: mol_type = other DNA
atgacttgcttgatctcatactgggtcactctccgaaaaccttcacccgtgtacagttttggttttgagagacttgaagtgctggctgtgtttgcaagcaccgtgttggctcaactgggggccctttttatccttaaagagtcggccgaaagattcctagagcagcccgaaattcataccggacgactcctcgtaggtacttttgtagccctgtgcttcaacctgttcacgatgctctctattcgaaataagccttttgcttacgtctccgaagccgcaagtacctcatggctgcaggaacacgtggcggatctttctcgctctctatgcgggataatccctggactgagtagtatttttctcccgcgaatgaatcctttcgttctgattgatctggccggagcttttgccctatgcatcacatatatgctgattgagatcaataattacttcgccgtggacactgcttctgccattgctattgctctaatgaccttcgggaccatgtaccccatgagtgtttactccgggaaagtgttattgcagaccacgcctcctcacgtcatcggccagctggataaattaattagggaggtgagcacgctcgatggcgtgcttgaggtgcgaaacgagcacttctggaccttgggattcgggagcctggcagggagtgtgcacgtacgaatccgcagagacgctaatgagcagatggtgttggcccatgttacaaacaggctttacacactggtgtccacactgaccgtccagatatttaaggacgattggatccggccggcgctgttgtctgggcccgtggccgccaatgtccttaattttagcgaccatcatgtcatcccgatgcctttgctcaaaggcactgatgatttaaatcctgtaacaagcacgcccgccaaaccgagcagtccacccccagagttctcatttaatactcccggaaaaaacgtgaacccagtcattttactgaatacccagactaggccctacgggttcggactgaaccacggtcacaccccctacagttccatgttgaatcagggacttggcgtaccaggcatcggggctactcagggactcaggactggattcaccaacatcccatctcgttatggcaccaacaataggattggacaaccccggccctag

SEQ ID NO: 135231 - DNA, 1317 bp, synthetic construct
  misc_feature 1..1317: note = Description of Artificial Sequence: Synthetic coding sequence
  source 1..1317: mol_type = other DNA
atgggtacaatccacttgtttcgcaagccacagaggtctttctttggaaagcttctgcgcgaattccgcctcgtggcggctgaccgccgcagctggaagattctgttgttcggtgtcatcaatcttatatgcaccggctttctgcttatgtggtgttctagtaccaatagcattgcactcactgcgtacacatacctgacaatttttgatctcttcagccttatgacctgcctgattagctactgggtcactttgaggaaaccatcacccgtatatagcttcggatttgagagacttgaggtgttggccgtgttcgcctccactgttctagctcaactgggtgccctcttcatcctcaaagagagtgccgaaagattcctggaacaaccagagatccacacgggtaggcttctggtgggcaccttcgtcgccctgtgcttcaacttgttcacaatgctctccatccggaataagccatttgcttatgtgagcgaagctgcgagtacctcatggttgcaggagcacgtggctgacctgtcgcggagtctctgcggaattattcctgggctctcctcaattttcttacctcgcatgaatccatttgtcctcatcgacttagcgggtgcctttgccttatgtatcacctatatgcttattgaaatcaacaattatttcgcagtcgatactgccagcgcaatcgctatcgcccttatgacctttggtaccatgtatcctatgagtgtgtatagtgggaaagttctgctccagacaactcccccccacgttattgggcagctggataaacttatacgggaagccggtagcgtccacgtgagaattcggcgagacgctaatgagcagatggtgctcgcccacgtgacgaatcgcctgtacactctcgtgtccacattgacggtccagatctttaaagatgattggatccggcccgcacttctcagtggaccagtggccgctaatgtgttaaattttagcgaccatcacgtgattccgatgccccttctgaaaggtaccgacgacctgaatcccgtgacaagcactcccgccaaaccctcctctcctcctcctgaattcagctttaacacgcccggtaaaaacgtcaatccagtcatcctgcttaatacgcagacaaggccctacggctttggattgaaccacggtcatacaccatattcttcaatgttaaatcagggcttgggcgtgccaggtatcggcgccacgcaagggctccgcacaggcttcaccaatatcccctcaaggtacggcaccaacaatcgaatcggacaaccccgaccatag

SEQ ID NO: 135232 - DNA, 1299 bp, synthetic construct
  misc_feature 1..1299: note = Description of Artificial Sequence: Synthetic coding sequence
  source 1..1299: mol_type = other DNA
atgtcgtggaaaatcctgctcttcggagttattaacctcatctgtaccggattccttctgatgtggtgttcttcgactaactcaatcgcactgacagcctacacctacctcacaatctttgatctgttctctttgatgacatgtctgattagctactgggttaccttaaggaagccgagtcccgtctactcctttgggttcgagcgccttgaggtgctggcagtcttcgcatccacagtactcgcacaactcggcgccctgtttattcttaaagagtcagccgagagatttctggaacagccggagatccacacagggcggttgttagtgggtacatttgtggctctctgttttaatctgttcacgatgctgtctattagaaataaacccttcgcgtacgtatctgaagccgcatcaaccagttggctacaggagcatgtggccgatctgtccaggagcttatgtggtatcatccctggcctttccagtattttcctacctcgaatgaatcccttcgtcctgattgatctcgctggggcctttgcattatgtatcacctatatgctgatcgaaataaacaactattttgctgtcgacaccgcttccgccatcgcaattgccctgatgacctttggcacaatgtatcccatgtccgtgtattccggcaaggtgttgctccagactacccctccccacgtcatcggccagctcgataaactgattcgggaggtgagtacgcttgacggcgtgttggaggtgcggaacgagcatttttggacactgggattcggctccctcgccggctccgttcacgtgagaataaggcgcgacgccaatgaacaaatggtgctggcgcatgtaaccaacaggctctacaccctcgtctctactttaactgtgcagatatttaaggacgactggatacgccccgccctgctctccggccccgtggccgccaatgtcttgaacttcagcgaccatcacgtaattccaatgccacttttaaaggggactgatgacctcaatcctgtcaccagcacccccgccaagccatcatcccctccaccagaattcagttttaacactcctgggaaaaatgtaaaccctgtaattctgctcaacacacaaactcgcccgtatggtttcggcctgaatcacgggcacactccatactccagcatgctgaatcaggggcttggggtcccggggatcggtgccacccagggcttaagaacaggatttacaaacattccttctagatatggcaccaacaacaggattggacagccccgcccgtag

SEQ ID NO: 135233 - DNA, 1131 bp, synthetic construct
  misc_feature 1..1131: note = Description of Artificial Sequence: Synthetic coding sequence
  source 1..1131: mol_type = other DNA
atgctccccctcagcattaaggacgacgagtacaagccccctaaattcaatctgttcggaaagatcagcggttggttcaggtcgatcctgtcagacaaaacttccaggaacctattctttttcctgtgcctgaatctctctttcgcgttcgtcgaactgttgtacggcatctggagcaactgcctgggactcatttctgatagtttccatatgttttttgactcaaccgcaatccttgccggattggctgcttcggtgatcagcaagtggcgggataatgatgcttttagctatgggtatgtacgcgcagaagtgctcgctggttttgtcaacgggctcttcttaatcttcactgctttcttcatattctccgaaggagtcgagcgtgccttagcgccccctgatgtgcatcacgagagactgctgctggtgtcgatactcggcttcgtagtgaatctgattggcatatttgtgttcaagcatggcgggcatggccatagccatgggtctggccacggccactctcactcgctattcaatggggcactggatcaggctcacgggcacgtggaccactgccattcccatgaggtgaagcacggcgcagctcactcgcacgaccatgcacacggacatgggcacttccattcacacgacggaccatccctgaaggaaaccacaggcccatctcgtcagatcctgcagggggtgttcctgcacatcttagcagataccttgggaagtatcggcgtgatcgctagcgctataatgatgcagaatttcggattaatgatcgccgatcctatatgtagtatcctgattgctatcttgattgtggtgtccgtcattcccctgttgcgtgagtcagtaggaatactgatgcaacggacgccaccacttttagagaattcactgccacagtgctatcagcgggtccagcagctccagggcgtctactcattgcaagagcagcatttctggaccctttgttcagacgtttacgttgggactctgaaactgatcgtggcaccagacgccgatgctaggtggatcctcagtcagacgcataatatctttacccaggcgggggttcgacagctctacgtccagatagacttcgcagccatgtag

SEQ ID NO: 135234 - DNA, 273 bp, synthetic construct
  misc_feature 1..273: note = Description of Artificial Sequence: Synthetic coding sequence
  source 1..273: mol_type = other DNA
taggtgattccactgctgcgcgagtccgtggggattttgatgcagcgcacgccgcccctgctggaaaattcacttccgcagtgttatcagcgtgtccaacaactgcaaggagtttacagtctccaggaacaacacttctggaccctctgtagcgacgtctacgtaggaaccttaaaactgatagtggctcctgacgccgatgctaggtggatcctgtctcaaacgcacaacattttcactcagaagttggaggaggagaatgaaaatctgtag

SEQ ID NO: 135235 - DNA, 1131 bp, synthetic construct
  misc_feature 1..1131: note = Description of Artificial Sequence: Synthetic coding sequence
  source 1..1131: mol_type = other DNA
atgttgcccctatccatcaaggatgatgaatacaagccaccaaaattcaatctgttcggcaaaattagtggctggttccggtctatcctctctgacaaaactagccgtaacctcttcttttttctgtgtttgaacctctcctttgcttttgttgagttactgtatgggatttggtctaactgcctcggcctaatctcagactcgtttcatatgttcttcgactcgaccgcaatcttggctggattggccgccagtgtcatttctaaatggcgggacaacgacgcctttagctatggttatgtgcgagccgaagtgctggctggttttgtgaatggattgtttcttatcttcacggcatttttcatcttctctgagggagtcgagagagccttagctcctcctgacgtccatcatgagcgcttactgctggtgagcatcttagggtttgtagtcaatctgatagggattttcgtgttcaagcacggaggccacggtcatagccacggtagcggtcatggacattcccactccctgttcaatggcgccctggaccaggcccacggccacgtagaccattgtcattcgcatgaggtgaagcacggcgcagcgcacagtcatgatcacgcacatggtcacgggcattttcatagccacgacggaccatctctcaaagagaccacaggacctagcaggcaaatcctccaaggtgtgtttttgcacattctagcagacacgttgggctccataggcgtcatcgcctccgctattatgatgcagaacttcgggttaatgattgccgatcctatctgctcaatccttattgctattctcattgtcgtatccgtcattcctctgctgcgcgagagtgtgggcatcctgatgcagaggacaccaccattactcgaaaacagtctgccccaatgctaccagcgggtccagcagctgcagggggtgtactccctccaggagcaacacttctggaccctgtgctccgacgtgtatgtcggcactctgaagttaatcgttgcccccgacgctgacgctagatggatcttgagtcagacacacaatattttcactcaagcaggggtccgtcaactgtatgtgcaaatcgactttgctgcaatgtag

SEQ ID NO: 135236 - DNA, 963 bp, synthetic construct
  misc_feature 1..963: note = Description of Artificial Sequence: Synthetic coding sequence
  source 1..963: mol_type = other DNA
atgtaccattgccatagcggcagtaagcctactgagaagggtgcaaacgagtacgcctacgccaaatggaagctgtgcagcgcctcagccatctgtttcatttttatgatcgcagaagtggtaggagggcacattgcaggcagcttagcggtggtgactgacgctgctcacttgctgatagatctgaccagcttcctcctatccttgttctcactgtggcttagcagcaagccgccatccaaaagactgacattcggttggcatcgagcagaaatcctgggcgctcttctttctattctgtgcatatgggtggtaacaggtgttctggtgtacttggcatgcgagagactgctatatcctgattatcagattcaagccactgtgatgattatcgtgagcagctgcgccgtggctgcgaatatcgttctgactgtggtactccaccagagatgtcttggccacaatcataaggaagtccaggccaatgccagcgttcgggccgcctttgtccacgctctcggtgatctcttccaatctatctcagtactaatcagcgcgctcataatctactttaagccggaatataagattgctgatcccatctgcactttcatcttctctattctggtgctcgcctctaccatcaccatacttaaagatttttccattttgctcatggagggcgtccctaagtcactgaactatagtggtgtgaaagagctgattttagcggttgatggcgttctgtcagtgcacagccttcacatttggtccctgacaatgaaccaggtgatcctctccgcccacgtcgctacagcagctagccgcgactctcaggtcgtgcgcagagagattgccaaggccctgagcaaaagcttcacgatgcactcgttgacgattcagatggagagcccggtagaccaggacccagattgcctgttctgcgaggacccgtgcgactag

SEQ ID NO: 135237 - DNA, 1110 bp, synthetic construct
  misc_feature 1..1110: note = Description of Artificial Sequence: Synthetic coding sequence
  source 1..1110: mol_type = other DNA
atggaattcttagagaggacatatctggtgaatgataaagccgcgaaaatgtatgcctttaccctggagtctgtcgagttacagcaaaaacccgttaataaggaccagtgcccacgagagcgacctgaggagctagaatccggcgggatgtatcattgtcactcgggctcaaagcccaccgaaaaaggagctaatgagtatgcctatgcaaaatggaagctgtgctcagcgtcagcgatatgcttcatcttcatgatcgctgaggtggtgggcggtcacatagcaggatcccttgcagtggttacggacgcggctcatttgttgatcgacctgacaagctttctgttgtctctctttagcctctggctgtcctctaagccgccttctaaacgtctgacgtttggttggcaccgcgcggaaatacttggggctttgctctctatcttgtgcatatgggtggtgacaggtgtgttggtgtatctcgcctgcgaaagactcctgtatccggactaccagatccaggccaccgtgatgattatagtatcaagctgcgccgtggcagcaaacattgtgttaacagttgtgttgcatcaacgttgcttagggcataatcataaggaggtgcaggctaacgcctccgtgcgggcggccttcgtccatgcactgggcgatcttttccagagtatttcagtgttaatctcggcgctgatcatttattttaagccagagtacaagatcgcagaccccatttgtacgtttattttttcaatccttgtgctggcctccactattaccattctaaaggactttagcattcttttaatggaaggcgtaccgaagtctctgaattacagcggggtcaaggagttgatattagcggtggatggcgttctgtccgtacactcactgcatatctggtcactaaccatgaaccaagtgatcctgagtgcccacgtcgcgaccgctgcctcccgcgacagccaagtggtacgacgcgaaatcgcgaaggcactgagcaagtcatttaccatgcactcgctgacaatccagatggagagcccagtggaccaggacccagactgcttgttttgtgaagatccctgtgactag

SEQ ID NO: 135238 - DNA, 1458 bp, synthetic construct
  misc_feature 1..1458: note = Description of Artificial Sequence: Synthetic coding sequence
  source 1..1458: mol_type = other DNA
atgggccgctattcaggcaaaacctgccgtctactgttcatgctcgtgctcaccgtggcattctttgtggcggaacttgtgtccgggtacctgggaaactccatcgcacttttgagcgattccttcaacatgctctctgacctgatcagcctctgtgtgggactcagtgctgggtatatagctcgacggcctacacggggctttagcgcaacttacgggtatgcccgggctgaggtagtgggggccttgagcaacgcggtgttcctcaccgcactgtgtttcacaatttttgtggaagctgtgctgaggctggcccgccctgagcgcatagacgatcccgaactcgtactgatcgtaggggtactggggctgcttgtgaacgtcgtgggcctcctaatctttcaagattgtgcagcctggtttgcgtgctgcctccggggcagatcccgcaggctgcagcagcggcaacagttggcagagggatgcgttcctggcgcttttggcggtcctcagggggcggaggatccgcggcgcgcagcagatcctacggcccctggatcagactccgctgttacactgaggggtacctcagtggagcgcaagagggaaaagggcgccacagtgtttgccaatgtggccggagactcctttaatacccagaatgagcccgaggacatgatgaaaaaggaaaagaaatcagaggccctgaacatcaggggtgttctgctgcatgtgatgggggacgctcttggcagtgttgtcgtcgtcatcacagctatcatcttctatgtgctaccccttaaatccgaagatccgtgcaattggcagtgttacatcgatccttccttaacggttctcatggtgatcattatactgtcttctgcattccccctgattaaggagacggccgcgattctgctgcagatggtgccgaagggggtgaacatggaagagctgatgtctaaattgagtgccgtgccaggcatatcttccgtgcacgaggtgcacatttgggaactcgtcagcggaaagatcattgccacactccacatcaagtatcctaaggaccgggggtaccaggacgcttctaccaaaataagggaaatctttcatcacgcaggcattcacaacgttacgattcagttcgaaaatgtggatctcaaggagcctcttgagcagaaagacctgctgctgttatgcaattctccctgcatctctaagggatgcgcaaagcagctttgttgcccccctggtgctctgccgctggctcatgtgaatgggtgtgctgaacataatggaggccccagcttggacacctacgggtcggatgggctatctcggagagatgctagggaagttgcgattgaagttagcctggattcctgcttgtcagaccatggccagtccttaaataagacccaagaggatcagtgttacgttaatcgcacacacttttag

SEQ ID NO: 135239 - DNA, 723 bp, synthetic construct
  misc_feature 1..723: note = Description of Artificial Sequence: Synthetic coding sequence
  source 1..723: mol_type = other DNA
atgggggacgccctgggcagcgtggtggtcgttattactgccattattttttatgtactgcctctgaaatctgaggacccatgtaattggcagtgttatattgatcccagcttgaccgttttgatggtgatcattatactttcatccgcttttcctttgattaaagagactgccgctattctgctgcaaatggtgcccaagggagtgaatatggaggaactgatgtcgaaactctcggctgtccccggcatcagcagcgtccatgaagtccacatttgggagctggtttcgggcaaaatcatcgcaaccctgcacataaagtatcccaaagatcggggctaccaggacgccagtaccaagatccgggagatatttcaccacgccgggattcataatgtcaccatccagtttgagaacgtggacctcaaagagcctctggagcaaaaggacttactgttgctctgcaatagcccgtgtatttccaaaggttgtgcgaagcaactctgttgtccaccgggagcccttcccctggctcacgtaaacgggtgcgcggaacataacggcgggccttcattagacacctacgggtcagacggactgagccgacgcgatgccagagaggttgccatcgaggtttctctggactcctgtttgtcagaccacgggcagtccctgaacaagactcaggaagatcagtgttacgtaaaccgcacacatttctag

SEQ ID NO: 135240 - DNA, 672 bp, synthetic construct
  misc_feature 1..672: note = Description of Artificial Sequence: Synthetic coding sequence
  source 1..672: mol_type = other DNA
atgggcaggtacagcggcaagacctgccgcctcttgttcatgcttgttctcaccgtagctttctttgtcgctgagttagttagcgggtacttgggcaactcgatcgcgctgctgtccgattcttttaacatgctgtccgacctgatttccctgtgtgtcggcctgagtgctgggtacatcgcacggcggccgacccgggggttctcggccacttatggatatgcacgggcagaagtggtaggtgccctgtcaaatgcagtcttccttacggccctgtgtttcacaattttcgttgaggcagttctgcgattagcccggccagaaagaatagacgaccctgagctggtcctgattgtgggtgtgctcggtctcctcgtaaacgttgttggactgctgatcttccaggactgcgccgcctggtttgcctgctgcctcagaggtcgtagcaggaggttacagcagaggcagcaactagccgaggggtgcgtacccggcgcttttggtgggcctcagggagctgaagatccaaggagggccgcagacccaaccgcaccagggtcggactctgccgtcacactaagggggacatccgtcgaacgaaaaagagagaagggtgccaccgtgttcgctaacgtagccgagctcattcataatactaggtttctgctgtag

SEQ ID NO: 135241 - DNA, 567 bp, synthetic construct
  misc_feature 1..567: note = Description of Artificial Sequence: Synthetic coding sequence
  source 1..567: mol_type = other DNA
atggaccactcacaccacatgggcatgtcttacatggattccaattccactatgcagcccagccaccaccacccaaccactagcgcatctcactcccatggtgggggagactcttccatgatgatgatgccaatgaccttctacttcggcttcaagaatgtcgaactcctcttttccggcctcgttatcaacaccgcaggggaaatggccggagcatttgtcgcagtgttcttgctcgcgatgttctatgaaggcctgaaaattgctcgggagagcttgctcaggaaatcccaggtgagcattaggtacaatagcatgcccgtgcccggcccaaacggaaccatcttgatggagactcacaagacagtgggccaacagatgctgagctttcctcatctcctccagacttgctgggactacagacatgaaccccctcacttaagtttaagtccttcatactactcggatcttaattaccctaaaaaagctaaggtgctgctccgcgtatccgtggaattaatgatccaggaggcattaatgatcaccgccggcgattccctctgttag

SEQ ID NO: 135242 - DNA, 573 bp, synthetic construct
  misc_feature 1..573: note = Description of Artificial Sequence: Synthetic coding sequence
  source 1..573: mol_type = other DNA
atggaccacagtcaccatatgggaatgtcctatatggatagcaacagtactatgcagccctcccaccatcatccgacgacctcagctagccactctcatggcggcggggactcatcaatgatgatgatgcctatgactttctatttcggattcaaaaacgtagagctcttattcagcggactggtcatcaataccgctggggagatggctggggccttcgtcgcagtctttcttctagcgatgttttacgaagggttgaaaatcgcccgcgagtctctcctgcggaagagtcaggtgagcatcaggtacaatagtatgcccgttccaggccctaatggaaccatacttatggagacccacaagacggtcggccagcagatgctgtcttttcctcacctgctccagacagttctgcatatcatccaagtagtgatctcatatttccttatgctgattttcatgacatacaacggctacttgtgtatcgctgtcgcagctggggctggcacaggttacttcctattcagttggaagaaagccgtggtcgttgacatcactgagcattgtcactag

SEQ ID NO: 135243 - DNA, 432 bp, synthetic construct
  misc_feature 1..432: note = Description of Artificial Sequence: Synthetic coding sequence
  source 1..432: mol_type = other DNA
atggctatgcacttcattttttccgataccgcggtgttactgttcgacttttggtccgtccattcacctgccggcatggccctgagcgtgctggtcctgttacttctggcagtgttatatgaaggtataaaagtggggaaggccaagctgctcaatcaggtgctagtcaatctgccaacgagcatctcgcagcagactattgctgagaccgacggcgatagtgccggatccgatagcttcccggtgggtcggacccatcaccgatggtacctgtgccactttggacagagtctaattcatgtcattcaggtagttattggttacttcatcatgctggccgtgatgtcgtataacacttggatttttctgggcgtagtgctgggcagtgccgttggctattatctggcctaccctctgttgagcacggcttag

SEQ ID NO: 135244 - DNA, 1650 bp, synthetic construct
  misc_feature 1..1650: note = Description of Artificial Sequence: Synthetic coding sequence
  source 1..1650: mol_type = other DNA
atgtcgcctacaatcagccataaggatagttccagacagaggcgccccggaaatttttcccactcactggacatgaagagtggacctctgccgcccggcgggtgggacgattcccacttggatagtgctggtagagaaggcgatagagaagccctgctcggggacacaggaaccggcgactttctgaaggccccacagtcattccgtgccgagctgagctcgatcctgctgcttttatttctgtacgtgttgcagggtattccgctcggtctggccgggtcaatccccctcattctgcagagtaaaaacgtgagctacactgaccaagcattcttctcctttgtattttggccgtttagccttaaacttctgtgggctccactggtggacgctgtttacgtgaagaactttggccgaaggaaatcatggcttgtccccactcaatacatcttgggtctatttatgatttacctgtccacacaagtggaccgactgctgggaaacacagacgacagaacgcccgatgtcatcgctctaaccgttgcattctttttattcgaatttttggccgccacccaggacatcgctgtcgacggctgggctctcaccatgctctctcgagagaacgtgggctacgcaagcacttgcaactcagtgggacagacagcgggttatttcctgggaaacgtgttattccttgccttagagtcagctgatttctgtaacaaatatttgcgattccagccccagcccagaggtattgtgaccctgtccgacttcctctttttttgggggaccgtattcttgattacaaccacgctggtcgctcttctcaagaaggagaatgaggtgtcagtggtgaaagaagagactcagggtattactgatacctacaagctgctgttcgcaatcattaagatgccagctgtgctgacgttctgtttgctgatcctcactgctaagattggtttttctgctgctgacgcagttactggtctgaagctcgtcgaggaaggagtcccaaaggagcatctggcgctgctggccgtcccgatggtgcccctgcaaatcattcttcctttgattatatccaagtacactgctggccctcagccactgaatacattttataaagccatgccttatagactgctgctgggcctcgagtacgctctgcttgtgtggtggacaccgaaggtggagcatcagggagggtttccaatctactattacatcgtggttcttctgagttatgccttacaccaggttaccgtgtacagcatgtacgtatccatcatggcatttaacgctaaagttagcgatcctctgatcgggggaacctacatgactttgttaaacaccgtgtcgaacctaggaggaaattggcccagtaccgtagctttgtggctcgtcgacccacttactgtaaaagagtgcgtaggagcaagcaatcagaactgccgtacacccgacgctgtggagctgtgcaagaagttagggggttcttgtgtgaccgcacttgatggctattatgtggagagcatcatttgcgtcttcatcggttttggttggtggtttttcttgggccccaaatttaagaagcttcaggacgaggggtcatcctcttggaagtgcaagcgtaataattag

SEQ ID NO: 135245 - DNA, 1650 bp, synthetic construct
  misc_feature 1..1650: note = Description of Artificial Sequence: Synthetic coding sequence
  source 1..1650: mol_type = other DNA
atgtcccccacaattagccacaaggattcttctcggcaacgaagacccggcaactttagccacagtctggatatgaagagtgggccgttgccgccaggaggatgggacgatagccacctggatagcgccggcagggagggagaccgggaggcgttgcttggcgacaccggtaccggcgacttcctgaaggcaccacaaagtttcagagcggagctttcttcaatattgttactcctttttctatatgtcttgcaggggatccctctgggcctcgctgggagcattcccctcatcctgcagtcaaagaacgtcagctacaccgatcaggcgtttttttccttcgtgttctggcccttctcgctcaagctgctctgggccccattggtggacgcggtatacgtcaagaactttggacgtaggaagagctggctggtgcctactcagtacatcttgggcctattcatgatctacctttcaacacaggtggacagactgctcggaaacacagatgatcgaacacctgacgtcattgcacttaccgtggcctttttcctcttcgaatttttggcagcaacccaggacattgctgtggatggttgggccctgaccatgctgagcagggaaaacgtcggatatgcaagtacttgtaattcagtcggacagaccgccggatacttcttgggtaatgtgttgttccttgccttagaatccgccgacttctgtaataagtacctcaggttccagccgcagcccagaggcatcgtcacactcagtgactttctatttttttggggcaccgttttcctcataaccactactctagtcgcattactgaaaaaagagaatgaggtgtcggtggtgaaagaggaaacacaggggatcaccgatacatacaagctacttttcgccatcatcaagatgcccgccgtgctcacgttttgtctgctgattctaacggctaaaattggcttctcagcagcagacgccgtaacaggccttaagctggttgaagagggcgtgccaaaggagcacctagcattgctggccgttcccatggtcccactgcaaattatcctgccactcattatttctaagtacacagctggaccacagcccctgaacaccttctacaaagcaatgccttaccgcctcctcttagggctggagtacgcactcttggtgtggtggactcccaaggtagaacaccagggcggattccctatttattactacatcgttgttctcctgtcttatgccctccatcaggttacggtctattccatgtacgttagcattatggccttcaatgcaaaggtatctgaccctctgattggagggacctacatgacactattgaatactgtctccaatctcggcgggaattggccatctactgtggcgttatggctggtggatccattaacagttaaggagtgtgtgggcgccagcaatcagaattgcagaacccccgacgccgtggaactgtgtaaaaagctcggaggatcttgtgttacggcactcgatggctattacgtggagtccataatatgtgtatttattgggtttggttggtggttcttcctcggaccaaagtttaaaaagctgcaagatgaaggctccagtagctggaaatgcaagcggaataattag

SEQ ID NO: 135246 - DNA, 1920 bp, synthetic construct
  misc_feature 1..1920: note = Description of Artificial Sequence: Synthetic coding sequence
  source 1..1920: mol_type = other DNA
atgctttcttacggtgagcggctaggctctcctgccgtgtctcctttgccagtgcgagggggacacgtgatgcgtggaaccgcctttgcctatgtgcctagcccgcaagtgctgcaccgtattcctggtactagcgcctacgccttcccctccttaggaccagtagcactggcagagcacacttgcccctgtggcgaggtgctggaaaggcatgagccgctcccggctaagctggcattggaggaggaacagaagccagaatcgcggctcgtgccaaaacttaggcaggccggagcgatgctgctgaaggtccccctgatgttaacgttcctgtacctatttgtgtgctcactggatatgctcagttccgcctttcaactggccgggggcaaggttgcaggcgatatctttaaggacaacgcgatcctgtccaaccctgtggcaggcctggtcgtcggtatcctggtgactgtgctggtgcagtcatcgtcaacaagtaccagtatcatagtgagtatggtgagctcaggtctcctggaagtatcctcagctatccctattattatggggtccaatatcggcacctcggtgacaaacacgatcgtagccctcatgcaggccggagatcggaccgactttcgtcgcgcgtttgctggagctacagtgcatgactgttttaattggctttcagtcctcgtattactccctttagaggccgcaacaggctacctgcaccacattacacggctcgtcgtggcttcatttaatatccacggaggcagagatgccccagacttgctgaagattattactgagcctttcaccaagttgatcatccaattagacgaaagtgtcatcacatccattgccactggcgacgagagtttgagaaaccattcactgatacagatatggtgccacccagactccctgcaggcccccacatctatgtctagggccgaagcgaactcctcccagacattgggcaacgcaactatggagaagtgtaatcatatttttgtggataccgggcttccggacctggctgtgggactcatcttacttgccgggtcacttgtgctgctgtgtacatgcctgattttgctggtgaagatgctcaactccttgctaaaggggcaagtggcgaaagtaatacagaaagtcatcaataccgatttcccggcacctttcacttgggtgaccggttatttcgcgatggtggtgggggctagcatgactttcgttgtccagtcttcctctgtgttcacatctgccataacccccctcatcggtctaggggtaatcagcatagagagagcctaccctctgacactcggaagcaatattggcacgaccaccacggctatcctggccgcactggcttctcccagagagaagctttcttccgctttccaaatcgccctctgtcacttctttttcaacatcagtggtatcctgctttggtaccccgtgccatgtacgcgcctgcctatcagaatggcaaaggcgttgggaaagcgaaccgcaaagtaccggtggtttgctgttctgtacctgctagtgtgcttcctgctgttacccagcctagtttttggcatttctatggccggatggcaggttatggttggtgttggaaccccttttggagctcttcttgcctttgttgtgctgataaacgtactgcagagtcgctcacctggtcatctgccgaaatggctacagacatgggacttcctgcccagatggatgcatagccttaagcctttggaccacctgattactagggccacactgtgctgtgctaggccggaacctcgttctcctcccctgccacccagggtctttcttgaagagcttccgcctgccaccccaagcccgagactggctctgccagcccatcacaacgctacccggctgtag

SEQ ID NO: 135247 - DNA, 330 bp, synthetic construct
  misc_feature 1..330: note = Description of Artificial Sequence: Synthetic coding sequence
  source 1..330: mol_type = other DNA
atgctgtcctacggcgagcgccttgggtcccctgcagtaagtccacttccggtcagaggaggacatgtgatgcggggtaccgccttcgcctatgtgccttcgcctcaggtgctgcacagaattccaggcacaagcgcatatgcatttcctagccttggaccagtggcattagctgaacatacctgcccatgcggcgaagtgcttgagcgccatgagcctctgccagcaaagttggccttggaggaggagcagaaaccagagtcccggctggttccaaaactgaggcaagctggtgcgatgttactgaaggtgccccttatgctcacgtag

SEQ ID NO: 135248 - DNA, 1023 bp, synthetic construct
  misc_feature 1..1023: note = Description of Artificial Sequence: Synthetic coding sequence
  source 1..1023: mol_type = other DNA
atgctatcatacggcgaaaggctggggtctccagccgtcagcccactcccggttcgaggaggccacgtcatgcgcgggacggcttttgcctatgtgccttctccccaggtgctccacaggatccccggtaccagcgcatacgctttcccctctcttggacctgtggccctcgctgagcatacgtgcccctgtggggaggtcctggaaagacatgagccgttgccggctaagctagctctcgaggaagaacagaagccagagagcagactggttccaaaactgaggcaggcgggagcaatgctcctgaaggtgccattgatgctcacatttctttacctttttgtatgtagcctagatatgctctcctccgccttccagctggcaggcgggaaagtggccggagacatctttaaggataatgccattctgtcgaacccagtcgcaggactcgtggtcggaattctcgtcacggtgctggtacagtcatctagcactagcaccagcattattgttagcatggtaagtagcggcttactggaggtgtcttccgctatccccattattatgggctctaacattggaacctccgtgaccaatactatcgttgctctaatgcaagccggggataggaccgatttcagacgagccttcgcaggtgcgacagttcacgattgtttcaactggctctcggtactggtgttacttcctctggaagccgccaccggatatcttcaccacatcactcgattagtggtggcctcctttaacatccacggtggacgagatgcccccgacttgctcaagattattacagagcctttcactaagcttatcatacagttggacgagtccgttatcacttcaattgccactggtgacgagtccctgcgcaaccacagtcttatacaaatctggtgtcatccagattctctgcagcagaacctggaaggccgggaaattacgcattttgacttacgcaagaagcaggctatggaagattcaagcgtaccacactgtccctag

SEQ ID NO: 135249 - DNA, 2073 bp, synthetic construct
  misc_feature 1..2073: note = Description of Artificial Sequence: Synthetic coding sequence
  source 1..2073: mol_type = other DNA
atggctccctggcctgagcttggtgatgcacagccaaatcccgataagtatctggagggtgccgccggccagcagccaacagctcccgacaaaagcaaggagactaacaaaacagataacacggaggcgcccgttactaagatcgagttacttcctagctattcaactgccacgcttatcgatgaacctactgaggtcgacgacccttggaacctgccaaccctgcaggactctggtatcaagtggagcgagcgagacacaaaggggaagatcctgtgtttctttcagggaataggaaggctgatcctcctgctgggcttcctatactttttcgtctgttcactggacattctttccagcgcattccagctggtagggggcaaaatggctggtcaatttttcagtaacagtagcatcatgagcaatccccttctgggtctcgttatcggggtgctggtgactgtactagtccagtcgtcctccaccagcactagcatagtcgtttccatggtgtcgtcttcactgctgacggtccgagcagccatcccaattatcatgggagctaacattggaacttcaattacgaataccatcgttgcgctgatgcaggttggcgaccgcagcgagtttagacgggcatttgcaggggccaccgtgcacgactttttcaattggctgtccgtcctcgtcctcttgccagtggaggtggctacgcattacctggaaattattactcaactgattgtggaatcctttcacttcaaaaatggcgaggatgctccagaccttctcaaggtcataacaaagccattcacaaaactgattgtgcagctggacaagaaggttatttctcagatcgccatgaacgatgaaaaagctaagaataaaagcctggtaaagatctggtgtaagacattcacaaacaaaacacagatcaatgtgacagtgccctctactgccaattgcacaagccccagcctatgctggacagatgggattcagaattggaccatgaagaatgttacgtataaggagaacattgccaagtgccagcacattttcgttaatttccatttgcccgacctggccgttggcacaatcttactgattctatccctcttagtattatgtggctgccttatcatgattgtgaagattctggggtcagttctgaaaggccaagtcgcaaccgtgattaaaaagaccatcaataccgacttcccattccccttcgcttggttaacaggatatcttgctattctcgtgggcgccggcatgacattcattgtgcaaagcagctcggtgtttactagtgccttgacgccactcattgggatcggcgttatcacaatcgaacgggcctatccacttaccctcgggtcaaacatcggtaccacgacaacagctatcttagccgctctggcttcacccggcaatgcgcttagatcatcattgcagatagctttgtgccattttttcttcaacataagcgggatccttctgtggtacccgatcccttttactaggctacccatcagaatggccaagggtctgggcaatattagcgccaagtatcgctggttcgcagttttttatctgattattttctttttcctgattccactgacggtgtttggtctttccttggccggatggcgggtcctggtgggagttggagtacctgttgtgtttatcatcatcttggtgctgtgtctgcggctccttcagtcgcgctgcccccgcgtcttacctaagaagctccaaaattggaattttctcccgctctggatgaggtcactgaagccttgggatgcagtggtaagcaaattcactggttgctttcaaatgcgttgttgttgctgttgcagggtgtgctgtcgggcctgttgcctcctgtgtgattgccctaaatgctgcaggtgtagcaagtgctgtgaggatctggaagaggcacaggaaggccaagatgttccagtgaaggcgcccgagaccttcgacaacattacgatttctcgcgaagcccaaggggaggtacctgcttctgacagtaagactgagtgtactgccctttag

SEQ ID NO: 135250 - DNA, 2070 bp, synthetic construct
  misc_feature 1..2070: note = Description of Artificial Sequence: Synthetic coding sequence
  source 1..2070: mol_type = other DNA
atggccccttggccagagctgggagatgctcagcccaacccagataagtatttggagggggccgctggccaacaacccactgcaccagataaatctaaggagaccaataagaacaatacagaggctcccgtgactaaaatcgagctgttgcctagctattcgaccgctacactgattgacgaacccaccgaggtggatgatccttggaacctgcctactctgcaagacagcgggatcaagtggtctgaaagagatacgaagggaaagattctatgcttctttcaaggtattgggaggctgattctgctcctgggtttcctctacttctttgtgtgcagtttggacattctttcaagtgccttccagctcgtgggcggtaagatggctgggcagtttttcagcaattcctcaatcatgtccaatccactactaggactcgtgattggagtgctcgtcaccgtattggtgcagagttcatccacaagtacaagcatagtggtgtccatggtgtcttcttcactcttaacagtgagggccgccatacccatcatcatgggcgctaatatcggaacaagtatcactaacacaattgtcgcactcatgcaggtgggagaccgctccgagtttagacgagcttttgctggggctacagtgcatgatttctttaattggctgtcagtgctcgtgttactacctgtagaagtcgccacacattatctcgaaattattacacaattgattgtggaatcattccattttaagaacggggaggacgcccctgacctacttaaagttattaccaaacccttcactaagctgattgtgcaactggacaagaaggtgatctctcagatcgccatgaacgatgagaaggctaagaataagtctctcgttaaaatatggtgtaagacgtttactaacaagactcagattaatgttaccgtgccctctaccgctaactgtacgtccccgtccttatgctggacagatggaattcaaaactggacaatgaaaaacgttacctataaggagaatattgccaaatgtcagcatatcttcgtgaatttccaccttcccgacttggccgtgggcacgatcctcctgattctgagccttctggtgttatgcgggtgcttaatcatgattgtcaagatccttggtagcgtcctcaagggacaggtggccacagtgataaaaaagactatcaacactgatttcccattccccttcgcttggttgactgggtatctggccattctggtgggagcaggcatgacttttattgttcagtcatcctccgtgttcacctctgcgctgactccactgattggtataggagtgatcaccatcgagagggcctatcccctgactctcgggtcaaatattgggacaactaccaccgcgatcttagcggcacttgctagtccgggaaacgcactccgatctagtctgcagatcgcactgtgccacttctttttcaacattagcgggatcctgctttggtatcccatcccctttacacggttacccatccggatggccaagggcctgggaaatatatctgccaaatacaggtggttcgcagtgttctatcttatcatctttttcttccttatcccactcacagttttcgggctctcattggcaggatggcgcgtactcgtcggcgtgggcgtaccagtagtcttcatcattatcttggtgttgtgccttcgactcttacagtctagatgtccgcgggttttgccaaagaagctgcagaattggaactttctgcctctgtggatgcgaagcctgaaaccttgggatgctgtggtcagcaagtttaccgggtgcttccagatgcgctgttgctgctgctgccgtgtttgctgtcgggcttgctgtctgctttgtgactgcccaaagtgctgtaggtgcagcaaatgctgtgaggatctggaagaggcccaggaggggcaggacgtgccggtgaaagctccagagaccttcgacaatatcacaatttctagagaggctcagggggaggtgccggcttcagatagtaagacagagtgcaccgccctgtag

SEQ ID NO: 135251 - DNA, 2070 bp, synthetic construct
  misc_feature 1..2070: note = Description of Artificial Sequence: Synthetic coding sequence
  source 1..2070: mol_type = other DNA
atggccccctggcctgaactgggagatgcccagcccaaccctgacaaatatctcgaaggggctgcaggacagcagcctacagctccagacaaatcgaaagaaaccaataaaaacaatactgaagccccggtaacaaaaatagaactgctaccatcctattccacagctacgctcatcgatgaacccaccgaggtcgatgacccctggaatctccctaccttgcaggacagcgggatcaaatggagcgagagagataccaagggtaaaattctctgtttcttccaggggattggccgcctcatcctccttttgggattcttgtatttctttgtctgttccctcgacatcttgagctccgcattccaactggtagggggcaagatggcaggtcaatttttctctaactcctcgattatgtcgaatcctctcctcggcctggtcatcggcgtcctggtcacagtgcttgtgcagtctagcagcacctctactagcattgttgtgtcaatggtgtcttccagcctcttgacagttcgggctgctatccctatcatcatgggggcaaacatcggaacctccataacaaatacgatcgtggctctcatgcaggtgggtgaccgcagtgaatttagacgagcattcgctggtgctaccgtccacgacttcttcaactggctgagcgtcctggttttactgcccgttgaagtggccactcattacctggaaataattactcagttgatcgtggagtcctttcacttcaagaacggcgaagacgcccccgacttactgaaagttatcaccaaacccttcaccaagcttatcgtgcaactggacaagaaagtgatttctcaaatcgcaatgaatgacgaaaaagctaagaacaagagtctggttaagatttggtgtaagacctttaccaataaaacccaaataaatgttacggtcccgtctactgctaactgtaccagcccttctctatgctggaccgatggcatccagaattggacgatgaagaatgtaacctacaaggaaaacattgctaagtgccaacatatttttgtgaacttccatctgcctgaccttgcggttgggacgatccttctgattctgtctcttctggtgctttgtggatgccttattatgatcgtgaagatccttggcagtgtgttgaaaggacaggtggccaccgtaataaagaaaactatcaatactgatttcccatttccttttgcttggctgaccgggtacctggcgatccttgtgggcgcagggatgacattcatcgttcagtcatcctccgtgttcacatccgcactgacgccattgatcggaatcggggtcattactatcgagcgcgcctatcccctcacacttgggagtaacatcgggaccacaacaactgcaatcctggctgccctggcgtcccctggcaatgctctgaggtcttccctgcagatcgccctttgccatttctttttcaatatttccggcattctgctttggtaccccattcccttcacgaggcttcctatcagaatggcgaaaggtctcggcaatatttcagctaagtacagatggttcgccgtcttttacctgatcattttcttctttctcatccctctgaccgtgtttgggctttcgctagctggatggcgggttctggttggagttggtgtgcctgtagtattcataattatattggtgctgtgtctgcggctgcttcagagccggtgtccccgcgtgctaccgaagaagctgcaaaactggaattttttgcctttatggatgcggagcttaaagccctgggacgccgtggtgtctaagttcaccggctgtttccagatgagatgttgctgttgctgcagggtttgctgtcgcgcttgctgcctcctttgtgattgtcccaaatgctgccggtgtagcaagtgctgtgaagacctggaagaggcccaggaaggtcaggacgtgccagtcaaagcaccagaaaccttcgacaacattacaatctcccgtgaagcgcagggagaggttcctgcatcagactcaaagacggaatgtaccgcattgtag

SEQ ID NO: 135252 - DNA, 486 bp, synthetic construct
  misc_feature 1..486: note = Description of Artificial Sequence: Synthetic coding sequence
  source 1..486: mol_type = other DNA
atggccccatggcctgaactgggcgacgctcaaccaaaccctgataaatatttggaaggtgcagccggccaacagccaaccgccccggacaaatccaaagagactaataaaacggataatacagaggcccccgtcacaaaaatcgaactactcccctcctatagtacagcaactttgattgacgagcccactgaggttgacgatccgtggaaccttccaacacttcaggacagcgggataaagtggagcgagagggatactaaaggaaagattctgtgttttttccaaggcattggacgtctcatcctgctcctgggttttctatatttttttgtctgtagcctcgatatcctctcctctgctttccagcttgtcgggggcaagatggccggacagttctttagtaactcctcaattatgtccaacccactgctaggcttagtcattggagtgctcgtgacagtgttggtgcagtccagcagctag

SEQ ID NO: 135253 - DNA, 492 bp, synthetic construct
  misc_feature 1..492: note = Description of Artificial Sequence: Synthetic coding sequence
  source 1..492: mol_type = other DNA
atggccccatggcctgaactgggagatgcccagcccaaccctgacaagtatctggagggagccgcgggacagcaacccacagcccccgacaaaagcaaggaaactaacaaaaacaatacagaggcgcccgtgactaagatagagctgcttccttcctattcaaccgctaccctgatcgatgaacctacggaggtggacgacccttggaatctgccgacattgcaggattccggcattaaatggtctgaacgcgatacaaagggaaagatcctgtgtttcttccagggaatcgggaggttaatcctgctgctggggtttctctacttttttgtctgctctctggacattctgagttccgcattccagctggtgggcggtaaaatggcaggccagttcttctcaaactcttccataatgtccaacccactccttggactggtgataggagttttggttaccgtactggtgcagagctccagtactagcacatag

SEQ ID NO: 135254 - DNA, 1800 bp, synthetic construct
  misc_feature 1..1800: note = Description of Artificial Sequence: Synthetic coding sequence
  source 1..1800: mol_type = other DNA
atgccatctagcctgccgggatcccaggtgcctcacccaaccctcgacgccgttgacttagtggaaaaaactttgcgcaacgagggaacctcttctagtgctcccgtgttggaagaaggagatacagatccttggacgctccctcaactaaaagatacttctcagccatggaaggaattacgcgtggccggtcgcctcaggagggtggcaggttcggtcttgaaggcatgcgggctgctgggatcactctacttctttatctgcagcctggatgtactctcttctgcgtttcagctcctcggaagcaaagtggctggagacatattcaaagataacgtggtcctgtcgaaccccgttgcggggttagtgatcggtgttctcgtgaccgcattggtccagagttcttcaacaagctcaagtatagttgtgtctatggtcgcggccaagctcctgactgtccgcgtttcggtccctatcattatgggcgtgaacgttgggaccagcataacttcaacgctcgtatcaatggcacagagtggagaccgagacgagttccagagggccttctccgggtcagccgttcatgggatttttaactggctgacggttttagtcctgctgccactcgagagcgccactgccctgttagaaaggctttcagagctggcattgggtgctgctagcctaacgccaagagcccaggctccggacatactcaaagtgcttaccaagccactcacacatctgatcgttcagttggactcggatatgatcatgtcctccgcaacggggaatgccacaaacagcagcctgattaagcactggtgtgggactaccggccagccgacccaagagaactcttcttgtggagcatttggcccgtgtaccgagaaaaattctaccgcaccggccgacagactaccctgccgtcatctgttcgctgggacagaactcacagacctggccgtgggctgcattctgcttgctgggtcactcctggtgctgtgtggatgcctggtgcttatcgtgaagctgctcaacagcgtcctccgaggtagggtggcccaagtagttagaaccgtaattaatgcagactttccattccctctgggttggctgggaggatatctggctgtgctggccggagccggcctcacatttgctttgcagagctcttccgtatttaccgctgccgtcgtccccctgatgggggtgggtgtaatatcgctggaccgcgcctacccacttctgctgggatccaacataggcacaaccactacagcgctgctggctgctctagcatcccctgcagataggatgctctcagccttgcaagtagcgctgattcattttttctttaatctagctggaattctcctctggtatctggtccctgctttgcggctgcccatccctctggcgcgacattttggcgtggtgacggcccggtaccgatgggtcgcaggggtgtatctcctcctcgggtttctgctcctccccctggcagccttcggcctcagcctcgctggaggaatggaattagctgctgtcggcggacccctagtaggccttgtgctgctcgtcatccttgtcacggtactacaacgcagaagacccgcctggcttccagttaggctgcggtcttgggcgtggctccccgtgtggctgcattctcttgagccctgggataggcttgtcacccggtgctgcccatgcaacgtgtgcagccctcccaaagcgaccacaaaggaggcgtactgctacgaaaatcctgagatcctggcttcccagcagctgtag

SEQ ID NO: 135255 - DNA, 1800 bp, synthetic construct
  misc_feature 1..1800: note = Description of Artificial Sequence: Synthetic coding sequence
  source 1..1800: mol_type = other DNA
atgccgagcagtttgcccggttcccaagtaccccatcccactctggatgccgtagacctggtggaaaaaacactgcggaacgaagggactagcagctcggcacccgtgctggaggagggcgatacagacccgtggacactgccgcagctcaaagatacctcgcagccatggaaagagctgagggtagccggcaggctgcgaagggttgcaggctccgttttgaaagcttgcggacttctcggatccctttacttcttcatctgctcactagatgtactgagcagcgccttccagctccttggcagcaaagtagctggcgacattttcaaggacaacgtggttctcagtaacccggtggccgggctggtcatcggtgtgctggtgactgcactagttcagagttctagtacctcttccagcattgttgtctccatggtggccgccaaactgttgaccgtgagagtctcggtccccatcattatgggagtgaacgtgggtacctccattacgtccacgctcgtctccatggcccagagtggggaccgcgatgagtttcagcgagcattctcaggctctgccgtgcacggcatatttaactggttgactgtgctcgtgctgcttccgcttgaatcagcaaccgcactcctggagagactgagtgaactggcgctcggagcagcctccctaactccgcgagctcaggcccccgatatccttaaagtgctgactaagcccctgacccatttgatcgtacaattggacagtgatatgatcatgtccagcgccactgggaacgcaaccaattcatctctcatcaaacactggtgcggaacgacaggacagcctactcaagagaacagtagctgtggcgcatttgggccttgcaccgagaaaaacagcactgcccctgcagaccgtcttccctgcaggcacctctttgctggcactgaacttacagacttggcagtgggttgcattctcttggccggtagcctcctggtgttgtgtggctgcctggtgctcattgtcaaactgctgaatagtgtgctgcggggcagagtggctcaggtggtccgaactgtgataaacgctgacttccccttccctctagggtggcttggggggtacctggctgtgctggccggcgctggcttgacctttgctttacagtcttcttccgttttcaccgctgccgtcgtgcctctcatgggggtcggggtcatttctctcgacagagcctaccccctgttactggggtcaaacattggaactacaacgaccgcgctactcgcagctctcgcctctcctgcagatcgtatgttaagtgcactccaggtcgccctgattcatttcttcttcaatttggcgggcattctcttatggtacctggtgccggcactccggttgcctattcccttggctagacactttggcgtagttactgctcgatatcgctgggtggctggcgtttatctgctcctagggttcctgctgctgcccctggccgccttcgggttgtccctcgcagggggtatggagctggccgcggtcggaggcccactggtgggcctggtgctactggtcattttagtgacggtcctccagagaagacgccctgcctggctcccggtgagattgaggtcttgggcttggttgcctgtttggttgcacagcctggagccctgggacaggctcgtcacacgctgttgcccctgtaacgtgtgttctccgcccaaggctaccactaaagaggcgtattgctacgaaaaccccgaaatcctggcgagtcagcagctttag

SEQ ID NO: 135256 - DNA, 570 bp, synthetic construct
  misc_feature 1..570: note = Description of Artificial Sequence: Synthetic coding sequence
  source 1..570: mol_type = other DNA
atgaccctcatggctgcggtgtacactatcgccctgagatacacgcgcacaagtgacaaggagctgtatttctcgactacagctgtgtgcataacagaggtgatcaagcttctcctgtccgtcggaattctggccaaggagactggctccctgggccgcttcaaggctagtcttcgcgaaaatgtgctgggatcacctaaagaactgctgaaactgagcgtgccatcactcgtgtatgccgttcagaacaatatggccttcctggctctctccaatctcgatgccgcagtctaccaggtcacctatcagctcaaaattccatgtacagccctgtgtaccgtgctgatgcttaacagaactctttctaaactacagtgggtgtcagtattcatgctctgtgccggagtgactttggtgcagtggaaacctgctcaggccactaaggttgttgaatatatcctcaagaagtttaaagagttccggtatttttccctcggcgaaaagcattctaacgtctcaatcagggactattgtgacatcagctggaggcttcttgtgagatggtcctag

SEQ ID NO: 135257 - DNA, 1014 bp, synthetic construct
  misc_feature 1..1014: note = Description of Artificial Sequence: Synthetic coding sequence
  source 1..1014: mol_type = other DNA
atggccgctcccagggacaacgtgactctcctgtttaaactgtattgcctggcggtgatgactctgatggcagccgtgtacactatcgctctgagatacacccggacttcagacaaagagctgtacttcagcactacggccgtgtgcattactgaagtgatcaaactcctgctgtcagtgggcattctggcaaaggagactgggtcccttgggcggtttaaagctagcctccgcgagaacgtgctcggctcccccaaagaactgttgaaactgtccgttccaagcctggtttatgccgtccagaataatatggcatttttggccctcagtaacctcgacgctgccgtgtaccaggtgacttaccaactaaagataccctgtactgccctgtgcaccgtgctcatgctgaatagaacactttctaagctgcagtgggtgagcgtgttcatgctctgcgctggcgttaccctggtccagtggaagcccgcccaggccacaaaagtagtggtggagcagaaccctctgctgggctttggtgctatagcaatcgccgtcctctgctccggcttcgccggggtgtattttgaaaaagtcctaaaatcttcagacaccagtctgtgggtccgcaacattcagatgtatttgtcaggcataatcgtcacgctggccggtgtctacctgtctgacggagccgagattaaggaaaagggttttttttacgggtacacttattacgtatggtttgttattttcctcgcttctgtgggtgggctgtataccagcgttgtcgtgaagtataccgacaatataatgaagggtttctcggccgcagctgctattgtgctgtccactatcgcgagcgtgatgctcttcggactgcagatcacgctgacctttgcattgggaacgcttctggtgtgtgtttctatttacctctacggcctcccccgccaggacacgacgtcaattcagcagggcgagacagcctccaaggagcgtgtgatcggcgtatag

SEQ ID NO: 135258 - DNA, 837 bp, synthetic construct
  misc_feature 1..837: note = Description of Artificial Sequence: Synthetic coding sequence
  source 1..837: mol_type = other DNA
atggccgccccacgggacaacgtgacgttgctctttaaactctattgccttgctgtgatgactctcatggcagccgtgtatactattgccttgaggtacactcgcacatcagataaagagctgtatttctccaccacagcggtgtgcatcactgaggtcataaagctcctgttgtcggtaggaatcctcgctaaagagacaggctcacttgggagattcaaggcttccctgagggaaaacgtgttggggtcgcctaaagaacttcttaagctgtctgtccccagcctggtctacgccgtgcagaacaatatggcattcttggctctctctaaccttgacgccgcggtctaccaggtgacttaccagctgaagattccgtgtactgccctgtgcaccgtgctgatgctgaacagaacactgagcaagcttcagtgggtgagtgttttcatgctgtgtgccggagtgacactggtgcagtggaaacccgctcaagccacaaaggtggtggtggaacagaaccccctgctgggttttggcgcaatagccatcgcagtgctgtgtagcggattcgcagtgctagccagtgtcggtggcctttacacgagtgttgtggtcaaatacacggacaatataatgaaaggtttttcagcggctgctgcaattgtgctgtctactattgcaagcgtgatgctgtttggtctccagataacacttacttttgcgcttggcaccttgctggtgtgtgtgtccatatatctatatgggttacccagacaagacacaacctccatccagcagggagaaaccgcaagcaaggagagggttatcggcgtttag

SEQ ID NO: 135259 - DNA, 570 bp, synthetic construct
  misc_feature 1..570: note = Description of Artificial Sequence: Synthetic coding sequence
  source 1..570: mol_type = other DNA
atggccgcgcctagagataatgtcacactgctgttcaagctgtattgcctggccgtgatgaccctaatggcggctgtctacaccatcgcccttagatatactaggacatctgataaagagctgtacttctccactactgctgtttgtataacagaggtcataaaactcttgctttctgtagggattctcgcgaaagagaccggttctctcgggcgatttaaggctagtctacgagaaaatgtgttggggtcccctaaagagttgcttaaacttagcgttccatcactggtgtacgccgtacaaaacaacatggccttcctggcattgagcaaccttgacgccgccgtctaccaagttacctaccaacttaaaattccctgtaccgcactgtgtaccgtgctcatgctgaaccgcactctgtctaagttacagtgggtctcagttttcatgttatgtgccggcgtaacacttgttcaatggaagcctgcacaagccacaaaggtcgtctttctgcaggttttagtggccagcaccctgcttctttggctgtctacccagactacttcttag

SEQ ID NO: 135260 - DNA, 537 bp, synthetic construct
  misc_feature 1..537: note = Description of Artificial Sequence: Synthetic coding sequence
  source 1..537: mol_type = other DNA
atggctgcccctagagacaacgtcacactgctgttcaagctgtactgtttggcggtgatgacccttatggccgccgtgtatacaatcgcgcttcgctacaccaggacctctgacaaagagctgtacttctcgaccaccgccgtgtgtattaccgaggtgattaagctgctgctgtctgtgggcatcctggcaaaggagacagggagcctcggtcgattcaaggcctccctgagggagaacgtgttggggtctccaaaagaattgctgaagctttccgtcccttctctagtgtatgcagtgcagaacaacatggcctttttggccctctccaatcttgacgccgcagtctaccaggtgacctatcagcttaagattccctgcactgccttgtgtaccgttctgatgctgaaccggactctgagcaaactccagaagaaagatttctcaatggttactcacataatgtctggactctctagcgttagcattcaggagctcaaggtcctgtctagatcctttattttcttcctgtcatag

SEQ ID NO: 135261 - DNA, 612 bp, synthetic construct
  misc_feature 1..612: note = Description of Artificial Sequence: Synthetic coding sequence
  source 1..612: mol_type = other DNA
atgttgaatcggacactgtccaagctgcagtgggtttcagttttcatgttgtgtgctggagtgaccttagtgcagtggaaacctgcccaggccacaaaggtggttgtcgagcagaacccactgcttggcttcggagccatagcaatcgctgtcctgtgctccgggtttgccggcgtgtacttcgagaaggtgcttaaaagtagtgacacaagtttatgggtacgcaacatacagatgtatctgagcgggataatcgtcacattggccggtgtgtacctgtccgacggcgctgagattaaggagaaaggatttttctacgggtatacttactacgtgtggtttgtgatattcctggcgagtgtcggaggcctttacacttctgtcgtagttaaatacaccgataatattatgaaaggattcagcgcagcagcagcaattgtcttgtccacgatcgctagtgtcatgctgtttggcttgcagattacccttacattcgcgctgggtactctcctcgtgtgcgttagtatctatctgtatggcttgccccggcaggacaccacctccatccaacagggtgagacggccagcaaagagagagttataggtgtttag

SEQ ID NO: 135262 - DNA, 1191 bp, synthetic construct
  misc_feature 1..1191: note = Description of Artificial Sequence: Synthetic coding sequence
  source 1..1191: mol_type = other DNA
atggctgcggtgggggccgggggatcaacagcggccccaggtcccggggcggtttctgcgggcgcacttgaacccgggaccgcatccgctgcccaccggcggttgaaatatatctcactggctgtcctggtagttcagaatgcctctctcatcctgtcaatccgttatgcccgtactttacctggggaccggttctttgcaactacggcagtggtgatggcagaggtactgaaggggctgacttgtctcctgctgctgtttgctcagaagagaggtaacgtcaagcatctggtgctattcttgcatgaggccgtgctggtgcagtacgtcgacacactgaagctcgccgtgcctagtctgatttacacccttcagaacaacctgcagtacgtggctatctcaaaccttcccgctgccacgtttcaggtcacttaccaactcaagatactgacaacggcattattctccgtgcttatgctgaacagatccttgagtcgtttacagtgggcctccctccttttgcttttcacgggcgtggctatagtgcaggctcaacaggccggtggggggggtcctagacccctcgaccagaatccgggggcaggacttgctgccgttgtggccagttgtctctcatcaggattcgccggagtttacttcgaaaagatcctaaaaggctcctcggggagtgtatggttgcgaaatttgcagttgggactcttcgggaccgcactcggcctggtcgggctatggtgggcagagggtaccgcagtggccacacgaggattttttttcgggtatacacccgctgtgtggggagttgttctgaatcaagcctttggcggcctgttggtagccgtcgtagtaaagtatgccgataatattctaaagggcttcgctactagcctgagcattgttttaagcaccgtggcttccatccggctgtttgggttccatgtagacccgctctttgccctcggggccggcttagtaattggggctgtttatctatactccttgcctagaggagcagcaaaggctattgctagcgcgagcgcaagcgctagtggaccttgtgtacaccagcagcctccggggcagcccccccccccccaactcagcagtcatcgcggcgacttgatcaccgaaccatttctgccaaagcttctcaccaaagtcaagggctcgtag

SEQ ID NO: 135263 - DNA, 492 bp, synthetic construct
  misc_feature 1..492: note = Description of Artificial Sequence: Synthetic coding sequence
  source 1..492: mol_type = other DNA
atggcagctgtaggggccgggggaagtactgccgccccaggcccgggcgccgtctctgcaggtgccttagaaccaggcactgcctccgccgcccacagacggttgaaatacatttcactcgccgtgttggtggtccagaatgcctccctaatcctgagtataagatatgcccgcacccttccgggggaccggttttttgctacaacagcagtagtgatggcagaggtcctcaaggggttgacatgcctcctgctgctcttcgcccagaagaggggcaacgtaaagcatcttgtgctgttcctgcatgaggccgtgctcgtgcagtacgtggacacccttaagctggccgtaccttccctgatttacacgctccagaataacctacagtacgttgccatcagtaacctcccagcagcaacattccaggtgagccctaagccttccatggccccagaggaactgaccggactaggaaccggtgtttgggagtag

SEQ ID NO: 135264 - DNA, 657 bp, synthetic construct
  misc_feature 1..657: note = Description of Artificial Sequence: Synthetic coding sequence
  source 1..657: mol_type = other DNA
atgaagctgtgccgcgacgcccatagacgactgaagtacatttccctggccgtgttggtcgtgcagaatgcttcccttatcctttcaattagatacgccagaactctgcccggcgatcggtttttcgcaacaacagctgtggtgatggccgaggtgctgaaaggcttgacatgcctgttgttactttttgcacaaaagcgggggaacgtgaaacatttggtcctgttcctgcacgaggcagttttggttcaatatgttgataccctgaagctggcggtgccttcactgatatacaccctgcagaataacctgcagtatgtggccatttctaacctccccgccgcaacttttcagccttctcctagatgcagccagagtcattctctctgcctctgtttacgactcagggccctgaggagccccgccgcatctcgggccgcaactacaaccgctgctgtcttccctccatggaggccacaccatggtgcgctaagtgcaaaagtcagcgcaggcgaggtccgcgcagggtccaatgggggaacacagggccgcggcacaggggtcgagggggtggggcacttgcaggacccgagtcgtcacccaccaggacctggaagttccgggttcggacggtggagcttcctgccaggccactag

SEQ ID NO: 135265 - DNA, 1182 bp, synthetic construct
  misc_feature 1..1182: note = Description of Artificial Sequence: Synthetic coding sequence
  source 1..1182: mol_type = other DNA
atggcagccgtgggcgccggtggctccaccgcagcacccggtccaggcgcagtaagcgcaggagccctggaacctggaaccgcgtcagcggctcaccgtagattgaagtatatctccctcgccgtgctggtcgtccagaacgcctcgttaatattatccatccgatacgcacgcaccctgcccggagacaggttcttcgccacaacagccgtggtgatggctgaagtacttaaggggctcacgtgcttgcttttgctcttcgcccagaagaggggcaacgtcaaacatttagttctctttcttcacgaggcagtccttgttcagtatgtggatacattgaagctggccgttccttctcttatctacaccttgcaaaataatcttcaatatgtggcaatttccaacctgcccgctgcaacgtttcaggtgacctatcaattgaagattctgacaacggcactgttttcagtcctcatgctgaatcgctccttgagtcgtcttcaatgggcttccctacttttgctttttacaggagtcgcgatcgtccaagcccaacaggctgggggcggcgggccacggcccctggaccaaaaccctggagccggactcgctgccgtcgtcgccagctgccttagcagcggctttgccggcgtgtacttcgaaaaaattctgaaaggctcttccggatcagtctggctgcggaacctgcaactcggactgtttggaaccgcgctaggattggtgggattgtggtgggccgaaggaacagccgttgccacgcggggattcttcttcggctatacaccagcagtctggggcgtggtcctgaaccaggccttcggtggacttctggtggcagtcgtagtcaagtacgccgacaacattcttaaaggcttcgccacttccctatctatagtactgagcacagtcgcctccattcggttgttcgggtttcatgttgaccccctgtttgcattaggcgccggcctcgtgataggcgcagtatacctttactccctgcctcggggtgctgccaaggctatcgcgtcagcttcagctagcgctagcggcccctgtgttcatcaacaacccccaggtcagccaccgcccccgcagctgtcctcccacaggggggacctgatcactgaaccattcctccctaagagtgtgctggtaaagtag

SEQ ID NO: 135266 - DNA, 675 bp, synthetic construct
  misc_feature 1..675: note = Description of Artificial Sequence: Synthetic coding sequence
  source 1..675: mol_type = other DNA
atggccgcggtcggcgctggggggagcaccgctgccccggggccaggagcagtgagtgctggagccctggagcctgggacagcgtcggccgcccatcgacggcttaagtatatcagcctggctgtgttagtagttcagaacgcttccctcattctgtctatccgctatgcaaggaccttgcccggcgaccggttcttcgccacaacagcagtcgtcatggcggaagtgctgaagggcttgacatgcctgttgctgctattcgcccagaagcgcggcaatgtgaaacacctggtcctgttcctccatgaagcagtgctggtgcagtacgtagatacactcaagctcgcagttccctcgctcatttatactctccagaataatctccagtacgtggcgatctccaatctgcccgccgctaccttccagccctctccaaggtgcagccagtcccactcgttgtgcctttgtcttcggctccgggcactgcggtctccagcagcctcccgggcggccactacgacagccgccgtgtttccaccttggcgcccccatcacggagccttatccgctaaagtcgctcatcagggtgagggatttctggctgccggaatcgaggacattggactcgccagtttctccctcctggcacttggtccagccggcacgaagttgtag

SEQ ID NO: 135267 - DNA, 999 bp, synthetic construct
  misc_feature 1..999: note = Description of Artificial Sequence: Synthetic coding sequence
  source 1..999: mol_type = other DNA
atggctgccgtaggtgctggcggcagcacagcagcgccagggccaggtgccgtctcagctggcgccttggaacctggcaccgctagcgctggaaacgtgaagcacctggtgctgtttctccacgaggcagtcctggtgcagtacgtcgacacactgaaattggctgtaccaagtctcatttatacgctgcagaataatctgcagtacgtggctatttctaatctgcccgccgccactttccaggtgacctaccaactgaaaatcctgactactgcactgttctccgtattgatgttgaacaggtcactgtcacggctgcagtgggcttcgctcctgcttttgttcacaggcgtggcaattgtacaggcgcagcaggccgggggaggcggcccgcgccccctagaccagaaccccggtgccgggctggccgcggtagtggccagttgtctgtccagcggctttgcaggtgtatacttcgaaaaaatcctaaaaggatccagcggcagtgtgtggctgcggaacctacagttagggctgtttggcaccgcacttggccttgtgggcttgtggtgggcagaaggcacagccgtcgctactcgcggattcttcttcggatatacacctgctgtgtggggggtggtcctgaaccaagctttcgggggacttctcgtggcagtcgtagttaagtatgctgacaatatactgaaaggcttcgcaacaagtcttagtatcgtgctttcaactgtggcttctataagacttttcggcttccacgtggacccgctgtttgcacttggcgcaggactcgtgattggtgcggtttatctgtatagcctgcctaggggcgcagccaaagccatcgcatctgcctccgcatccgcatcggggccatgcgtacatcagcagcctcctggtcagccaccccccccccagcttagctcacatcggggagacttaatcacagagccttttctgcccaaatctgtgttagtgaaatag

SEQ ID NO: 135268 - DNA, 729 bp, synthetic construct
  misc_feature 1..729: note = Description of Artificial Sequence: Synthetic coding sequence
  source 1..729: mol_type = other DNA
atggctgccgtcggagcaggcggcagtactgccgctcctggtcctggcgcggtgtccgctggagctctggaaccaggcaccgcctcagccgcacatcggcggttgaagtatatctcccttgccgtccttgttgtgcagaatgccagtcttatactctccattaggtatgcccggaccctccccggtgacagattctttgcaacaacagccgttgttatggcagaggttcttaaggggctcacttgtctgttgctgttatttgcccaaaaacgcgggaacgtaaaacacctggttctatttctgcatgaggccgtcctggtgcaatacgtggacactctgaaacttgccgtgccatctctgatatacaccttacagaataatctccagtatgtggccatttccaaccttcccgccgccactttccaaccctctcctagatgctcccagagtcattctctctgcctctgcctcagacttagggcgctcagatcccctgcagcctctcgggctgctacaacaacggccgccgtgtttccgccgtggcgcccccatcatggcgcattgagcgccaaagtcagcgcaggggaggttcgcgccgggagcaacggcggcacccagggtcgtggaactggcgtggaaggggtgggccatctgcaggatccttctcgccacccacccggtccagggtcctctggcttcgggagatggtcttttctacctggacactag

SEQ ID NO: 135269 - DNA, 531 bp, synthetic construct
  misc_feature 1..531: note = Description of Artificial Sequence: Synthetic coding sequence
  source 1..531: mol_type = other DNA
atggcggaggtgctcaaggggctgacctgcctgcttctgctgttcgcccagaaaagagggaacgtgaaacatctcgttctctttctgcatgaagccgtgttggtgcagtatgttgacacacttaagctggcagtcccgtcactgatctacacattacagaacaatttgcagtatgtggcaatttccaatctacccgcagccacctttcaggttacataccagctgaaaattcttacaaccgcactgttctccgttctgatgctcaatcggagcctctccagactgcagtgggctagtcttcttttgctgtttactggggtagctatcgtccaggcccaacaagccggaggtgggggccctcggcccctggatcaaaaccctggggccggtctggcagcagtggttgcctcctgcttgtcgagcggcttcgccggcgtttacttcgagaagatactgaaagggtcttccggttcagtgtggctgcggaatctgcagctaggcctatttgggaccgcacttggcctcgtgtag

SEQ ID NO: 135270 - DNA, 1266 bp, synthetic construct
  misc_feature 1..1266: note = Description of Artificial Sequence: Synthetic coding sequence
  source 1..1266: mol_type = other DNA
atggctgctgtgggcgcggggggcagcaccgccgcgccagggcctggcgcagtgagcgctggggcgcttgagcctggcaccgcttctgccgagttgttactgacgtgggaagaagcggaggcaaggggccagggccttccgcaacctctgccagatacttccgtccggatccctgcgcaccggcgcttgaaatatatctcccttgcggttttagtggtacagaacgcatcgctcatcctgagcattcggtacgctcgaacactgcctggggaccgcttctttgcaactaccgccgttgttatggccgaagtgctgaaagggctgacttgtctgcttctcctgtttgcgcagaagcgtgggaacgtcaagcatctggtgctgtttttgcacgaagctgtccttgtccagtacgtggacaccctgaaactagctgtaccttccctcatttacaccctgcaaaataacctccaatacgtggccatttcaaatttacctgcggccacatttcaggtgacatatcaactgaagattctaacgacagcgttattcagcgtgctcatgctgaaccggtcactgtcccgactgcaatgggcatccctcctgctcttgttcacaggggttgctattgtacaggcccagcaagcgggcggaggggggccaaggcctctagaccagaacccgggagcagggctcgccgccgtcgtggcgtcttgcctttcttcaggctttgcgggagtgtattttgagaagatcctgaaaggcagctccggatctgtctggcttaggaatctccagctggggttgttcggcacagctttgggacttgtggggctgtggtgggcggaaggcaccgccgtagctactcggggcttcttctttggctatacgcccgctgtgtggggtgtggtactcaatcaggcgtttggtggcctgctggttgctgtggttgtcaaatacgcagacaatattctgaaaggcttcgcaactagcctcagcatcgtgctttccactgtagcgtccatcagattattcggcttccacgtggatcccctgtttgctcttggtgcagggttagtgatcggggcagtctacttgtattccctgcccaggggcgctgcgaaagccatagcctctgccagcgcctcggcgtccggcccatgcgttcaccagcagccccctggccagccacccccacctcagttgtccagtcacagaggtgatttgattactgaaccgttccttcctaagtccgtgttggtaaagtag

SEQ ID NO: 135271 - DNA, 1068 bp, synthetic construct
  misc_feature 1..1068: note = Description of Artificial Sequence: Synthetic coding sequence
  source 1..1068: mol_type = other DNA
atggccgaagtccaccggcgtcagcatgcccgcgtaaaaggagaagcgcctgccaagtcttctacattgcgtgacgaagaggagctcgggatggcttcagccgaaactttgaccgttttcctcaagctgctcgcagccggcttttacggcgtctcttcctttctaatcgttgttgtgaataagtccgtgctgacgaactaccgctttcccagttcattgtgcgttgggctcggacagatggtggcaacagtggccgtgctgtgggtggggaaggcgttacgagtagtgaaattccccgacctcgaccggaacgtgcctagaaagacgttcccgctcccgctgttatacttcggcaatcagatcactgggctttttagtacaaagaaattgaatctgccaatgtttactgtcctcaggcggttcagcattctgttcactatgttcgcagaaggcgtcctgctcaagaaaacattcagctggggaattaagatgaccgtctttgcaatgattataggcgcttttgtggccgcctcttctgatctggccttcgacttagaggggtacgcgtttattctgattaatgacgttctgacagcagctaacggcgcctatgtcaagcagaaactggattcgaaggaactgggtaaatatggacttttgtattacaatgcactgtttatgatactccctaccctggccatcgcctactttaccggggatgcccaaaaggccgtcgagttcgagggatgggccgacaccttgtttctgctgcagttcacacttagttgcgtgatgggattcatccttatgtatgccactgtgctctgtacacagtataattctgcacttacaactactattgtcggatgcatcaagaacattctcataacttatattggaatggttttcgggggagactatatctttacatggactaatttcattggcctcaacatcagcattgcgggctccctcgtgtattcttatattacatttacagaagagcaactctctaagcagtccgaggctaataacaaactggacataaagggcaagggagctgtctag

SEQ ID NO: 135272 - DNA, 783 bp, synthetic construct
  misc_feature 1..783: note = Description of Artificial Sequence: Synthetic coding sequence
  source 1..783: mol_type = other DNA
atggttgcgactgtggcagtcctatgggtggggaaggcgctgagggtggtgaaattcccagacctcgatcgaaacgtcccccggaaaacgtttccattgccattgctgtatttcggcaaccagatcaccggactgttcagtactaagaagctaaatctgcccatgttcacagtactgcgacgattttcgattctgttcactatgttcgctgagggggtcctcttgaagaagacattctcttggggtattaaaatgacagtgttcgcaatgattataggtgccttcgtcgcagctagctccgatttggctttcgatctcgagggttacgcattcatcctcattaatgatgtactcaccgctgctaatggagcttatgttaaacaaaaactagacagcaaggaactgggcaaatacgggctgctctactataacgctctgttcatgatcctgccaactctcgccattgcttattttacaggggatgcacagaaagccgttgagtttgaagggtgggcggatactttgttcctgctacagttcaccctgagctgtgtgatgggtttcatactgatgtatgctacagtactgtgcacgcagtacaacagcgcccttaccacaaccattgtgggttgcattaagaacatcctgatcacctacattggtatggtctttggaggcgactatatatttacttggactaactttattggactgaatatcagctgtatttgccacagaggtctctgtgaactcagggttggtagcgcaacactggggggttag

SEQ ID NO: 135273 - DNA, 1104 bp, synthetic construct
  misc_feature 1..1104: note = Description of Artificial Sequence: Synthetic coding sequence
  source 1..1104: mol_type = other DNA
atgtcttccaggtccgtcttgtcaccagtggttgggaccgatgcacccgaccaacatctggaactgaagaagcctcaagaacttaaggaaatggaaagactgcctctagccaatgaagacaagaccatgttcgctaatctgaagtatgtgtcactcgggatcctcgtgttccagacgacctcgctcgtcctcactatgagatacagcagaacgctcaaagaagagggcccacgatacctgtcttctacagcagtggttgtggccgaactcctgaagatcatggcatgcatcctgctggtctacaaagatagcaaatgctcccttagggccctgaatcgggtcctgcatgacgagattctgaacaaaccaatggaaacccttaaactggccatcccctctggtatctacacgctccagaacaatttactgtatgtggccctcagcaacctcgacgctgctacctaccaagtgacataccagctcaaaatactgacaaccgcactcttttcagtgtctatgctgtctaaaaaactgggcgtgtatcagtggctgtctcttgttatccttatgaccggcgtagcgtttgttcaatggcccagcgactcccaattggattcaaaagagctctcagcaggctctcaatttgtgggcctgatggcagtcctaacagcatgcttctcctcaggttttgcaggcgtgtatttcgaaaagatactgaaagagacgaagcaatcagtttggatcaggaacatacagctcgggttttttggatcaatctttggtctgatgggcgtgtacatatacgacggagaattggtttcaaaaaatggctttttccagggttacaacagattgacctggatcgtagtggtgctgcaagcactgggtgggctggtgattgctgccgtgatcaaatacgctgacaacatactaaaaggttttgctacctctctgtcgattatcctctcaaccttgattagttacttctggctacaggacttcgtgcccactagcgttttttttttgggcgccatcctggtcatcactgccactttcctgtacggctatgaccccaagcccgctggtaaccccacgaaagcctag

SEQ ID NO: 135274 - DNA, 978 bp, synthetic construct
  misc_feature 1..978: note = Description of Artificial Sequence: Synthetic coding sequence
  source 1..978: mol_type = other DNA
atgttcgcgaacctcaaatatgtctcattagggatcctggtgttccagactacgtctctggttctcacgatgcgatactctcggactttaaaggaagaagggccccgttacttgtcgtccaccgccgtcgtggtggccgagcttcttaagatcatggcttgcattctgcttgtgtataaggatagtaaatgctctttacgcgcgctcaatcgggtgctgcatgacgaaattctgaataaacccatggaaacactgaaactggcaatccccagcgggatctacaccctgcagaataaccttctgtatgtggcactgtccaacctcgacgctgccacctaccaggttacctatcaactcaaaatactgaccaccgctttgtttagcgtttccatgcttagcaagaaactgggcgtgtaccagtggctgagcctggttatactgatgacgggagtggcgtttgtccaatggccaagcgattcccagctcgatagcaaagagctgtcagctgggtctcagtttgtgggacttatggcagttcttacagcatgcttttcttcaggtttcgccggagtttacttcgagaagatcctgaaagaaaccaagcaatctgtatggattaggaacatccaattggggtttttcggttcaatcttcggactgatgggtgtatacatttacgatggagagttagtgtcaaaaaacggtttcttccagggatacaataggctaacttggattgttgtggtgcttcaagcccttggtggcctggttattgccgctgttataaaatacgccgacaatatactgaagggctttgcgaccagtctgtctatcattctgtccactctcattagttacttctggctccaggactttgtccctacctcagtgttctttttgggcgctatactcgtgatcacagcaacattcctgtacgggtacgacccgaaaccagcaggtaacccgacgaaggcctag

SEQ ID NO: 135275 - DNA, 675 bp, synthetic construct
  misc_feature 1..675: note = Description of Artificial Sequence: Synthetic coding sequence
  source 1..675: mol_type = other DNA
atgtttgccaatctgaaatacgttagcctgggtatactggttttccagacaacgtcgctggtcttaaccatgagatactccagaactctgaaggaggaggggccaagatacctgagtagcaccgctgtcgttgtggctgagctgctcaagattatggcctgtatattgttagtctataaggattcaaagtgtagcttgcgagcactgaacagagtgctccatgacgaaattctgaataagccaatggagaccctgaagctggcgatcccctcaggaatctacaccctgcaaaataatctcctctatgtggccttgtccaatctggatgccgcaacttatcaggttacctatcagttaaaaattctgacaacagctctgttttccgtcagcatgctctctaagaagcttggggtttaccagtggttatccctcgtcatacttatgactggtgttgcttttgtccagtggcccagtgacagccagctggacagcaaagaattgtctgcaggctcacaattcgtcgggctgatggccgtgctcacggcatgcttctcatctgggttcgcgggtgtgtatttcgaaaagatcctgaaagaaaccaaacagagcgtctggattagaaatatccagctcggattctttggatcaatattcggcctgatgggcgtgtactag

SEQ ID NO: 135276 - DNA, 978 bp, synthetic construct
  misc_feature 1..978: note = Description of Artificial Sequence: Synthetic coding sequence
  source 1..978: mol_type = other DNA
atgtttgctaatctgaaatacgtgtcgctggggattcttgtcttccagactacatcactagtgcttacgatgagatactccaggactctgaaagaagaaggcccaagatatcttagcagcaccgccgtggttgtggctgagctcttgaaaattatggcctgcattctactcgtttacaaggattccaagtgctctctcagggccctgaaccgcgtgctccacgatgaaattttaaacaaacccatggagaccctgaagctcgctatccccagcggcatctatactctgcaaaacaacctactctatgtggctctgtcaaaccttgacgccgccacttaccaggttacctaccagttgaaaatcctgaccactgcgctcttctctgtgtccatgctgtctaaaaaacttggcgtgtaccagtggctgagccttgtcatcctgatgacaggagtggcgtttgttcagtggcctagtgacagccagcttgattctaaagaacttagcgccggctctcagtttgtcggcttgatggcagtccttaccgcttgtttcagctctggctttgccggggtgtattttgagaaaattctcaaggagaccaaacaatccgtatggatcaggaatatccaattaggttttttcggcagtatattcggcctgatgggcgtgtacatatacgatggggaattggtctcaaagaacgggttctttcagggttataatcggttaacctggatcgtggtggtgctccaggcgctaggtggcctggtgatagccgcagtgatcaaatacgccgacaacatcctgaagggctttgcaacctcactgagtatcatcctgagtacattgatatcttatttctggctccaggattttgtgccaacctctgtgttcttcctgggggccatactggtgatcacggccactttcctgtacggctatgacccaaagccagccggcaatcccactaaggcatag

SEQ ID NO: 135277 - DNA, 663 bp, synthetic construct
  misc_feature 1..663: note = Description of Artificial Sequence: Synthetic coding sequence
  source 1..663: mol_type = other DNA
atgttcgccaacctcaagtacgtctctctcggcatcttggtgttccagactacctctctcgttctgaccatgagatattcccgtacccttaaggaagaggggccaagatatctgtcaagtactgctgttgtggtggccgaactgctgaaaattatggcctgcatcctcctagtctacaaagactcgaagtgctccctgagagctctgaacagggtgctgcatgacgaaatactgaacaagccaatggaaacgttaaagctcgccatcccgagcggaatttatacactccagaataacctcctttatgtggccctctcgaatctggacgctgcaacctaccaagtcacctaccaattaaagatcctcacaacagccctgttcagcgtatctatgttgtccaaaaagctgggagtgtaccaatggcttagtcttgttattctcatgacgggcgtggctttcgtccagtggccctccgattctcagctagattcgaaggaactctccgccggcagtcagtttgtgggcctgatggcagttttaaccgcttgcttttccagcgggtttgctggggtttacttcgagaaaatactgaaggaaacgaaacaatccgtatggattcgcaacatccagcttgtgtcctttagtttggagccgagcctgtag

SEQ ID NO: 135278 - DNA, 258 bp, synthetic construct
  misc_feature 1..258: note = Description of Artificial Sequence: Synthetic coding sequence
  source 1..258: mol_type = other DNA
atgttcgctaatctcaagtatgtctccctaggcatcctcgtattccaaactaccagccttgtgttgaccatgcgttacagccggaccttaaaggaagaggggccaaggtatctctcatccactgctgttgtggttgctgagcttcttaaaatcatggcctgcatattactggtttacaaagactccaaatgtagcctgcgtgcgttgaatagggtgctccacgacgaaatcctcaataagcctatggagacactgtag

SEQ ID NO: 135279 - DNA, 1104 bp, synthetic construct
  misc_feature 1..1104: note = Description of Artificial Sequence: Synthetic coding sequence
  source 1..1104: mol_type = other DNA
atgagctctaggtcggtactctctcctgttgttgggactgatgcccccgaccagcacctggaactgaagaaaccgcaggaactgaaagagatggagagactccctttggcaaacgaagataaaacaatgtttgccaatcttaagtatgtctccctcgggatactggtattccagaccacttcattagtgcttaccatgcgctacagtaggactctgaaggaggaaggccctcgctacttgagctcgacagcggttgtggtggcagagctgctcaagattatggcctgcatcttgctcgtgtacaaggatagtaagtgttccttacgggcactgaatagagtactccacgatgaaatcttaaacaaaccaatggagactctgaagctggctattcccagtggaatctatacactgcaaaataacctgttgtacgtcgcgctaagcaacctcgatgcagcgacctatcaggtgacctaccagctgaagattctcaccaccgccttgttttcagtgagtatgctttcaaagaaacttggcgtttaccagtggctgtctttagttatcctgatgacaggtgtggcatttgttcagtggccaagtgactcccagctggattccaaggagctgtccgctggatcccagttcgtggggttgatggcagtattaacagcatgtttcagttccggctttgccggcgtatacttcgaaaaaattctcaaagagacgaagcagtcggtctggattcggaatatacagcttggcttttttggtagtatcttcggccttatgggggtgtatatctatgacggtgaactagttagcaaaaacggattttttcagggatacaatcgcctgacgtggatcgtcgtcgttctgcaggccttaggcggtctcgtcattgccgctgttattaagtacgctgacaatattctgaagggatttgccacctcactgagcattattctctctactctaatttcttacttttggctccaggattttgtgcccacctctgtgttcttcctgggggccattctggtgatcaccgcgacattcctgtatggctatgaccccaagcctgcggggaatccgacaaaagcctag

SEQ ID NO: 135280 - DNA, 969 bp, synthetic construct
  misc_feature 1..969: note = Description of Artificial Sequence: Synthetic coding sequence
  source 1..969: mol_type = other DNA
atggcttccagcagctcacttgtgccagataggctccggctgcctctctgtttcctgggggtgttcgtttgctacttctactacggtattctgcaggagaaaattacaaggggcaaatatggcgagggggctaagcaggaaactttcacatttgccctgacactggtttttatccagtgcgtgatcaatgccgtcttcgctaaaatcttaatccagtttttcgacacggctcgggtggataggacccggtcatggttgtatgctgcttgttctataagctacctcggagccatggttagctccaatagtgcactgcaatttgtgaactatcctacacaggtgctggggaaatcctgcaaaccaattccagtgatgctgctgggtgtcacactcctaaagaagaagtaccccctcgccaagtacctgtgcgttttgctcattgttgcaggcgtcgcgttattcatgtacaaacctaagaaggtggtcgggatagaggaacacactgtaggttatggagagctgctcctgcttttgtctctgacattggatggactcaccggcgtgagccaggaccacatgcgtgcccactaccagactggtagtaatcatatgatgttaaacatcaacctctggagtactctcctcctaggaatgggtatcctgttcactggggaactatgggagtttctgtcctttgccgagagatatccagccattatctacaatatcttactgttcgggttgaccagcgccttgggccagtctttcatttttatgaccgttgtgtatttcggtccactcacctgtagcataataacaacaacaaggaagttttttacgattctggcatctgtgatcctttttgcgaaccccattagcccaatgcagtgggtggggacagtgctggtcttcctggggctgggactcgacgccaaattcggtaagggcgcaaagaagactagtcactag

SEQ ID NO: 135281 - DNA, 450 bp, synthetic construct
  misc_feature 1..450: note = Description of Artificial Sequence: Synthetic coding sequence
  source 1..450: mol_type = other DNA
ccacagtcctgcctcattggaaagatctctcgcgcaagggaccagagtcgaggctgtcggtttccatggccaagtggcatggaaccaaggacacgggttggccctctgcttgtcttgccagacgcgtgcaaacagcctatcagaccgcgcccatggtgccattcccgtaatacagtgagctcatgtttgggcactaggggcaaatacggtgagggggcaaagcaggagaccttcactttcgccctcacacttgtctttattcagtgcgtgattaatgccgtgttcgctaaaatctggtggatcgtccctggggctgggtcaatgctgcccgtgctttcgcctatatgggtcccttggagtccagctattcagcattattcactctcgacaacgcaactgcgctctcttgtgaatccagccagccaatcacagtcctgctcactcgggtag

SEQ ID NO: 135282 - DNA, 1080 bp, synthetic construct
  misc_feature 1..1080: note = Description of Artificial Sequence: Synthetic coding sequence
  source 1..1080: mol_type = other DNA
atgaggcccttgccgcccgtgggcgacgttcgcctggagttgagtcccccgcctcccctgctcccggttcccgtggtcagcggctcacccgtgggctcatcagggcgcttaatggcgtctagcagttctcttgttcctgatcggcttaggcttccactgtgcttcctgggcgtgtttgtctgttacttctattatggcattctacaggagaagatcacccgcgggaagtacggggagggcgctaaacaagagacgtttacttttgcactcacattggttttcattcagtgcgtgataaacgctgtgtttgccaaaattctcatccaattcttcgacaccgcgcgcgtggataggacccgctcatggctatacgcggcgtgctccatctcttacctcggagccatggtgagcagtaactccgccctccagttcgtaaactaccccacacaggttctaggaaaaagttgcaagccgatacccgtcatgttgcttggggttaccttgctgaagaagaaataccctctcgcgaaatacctgtgcgtactgttaatcgtggcaggagtcgccctattcatgtacaaacccaagaaggtagtcggcattgaagagcacacagttggatatggcgaattgctgcttctcctttcgttaaccctggacggactgacgggtgttagccaggatcacatgcgcgctcactatcagaccgggtcgaaccatatgatgcttaacattaatctttggtctaccctgttgctcggcatgggaatcctgtttactggcgaactgtgggagtttctgtcttttgcggaacggtatcctgcgatcatctacaatatcctgctgttcggactcaccagtgccctcggacagagctttattttcatgactgtcgtatatttcggcccccttacatgctccataatcaccacaacaagaaagtttttcacaattcttgcgtcagtcatactcttcgctaatcctatttctcccatgcagtgggtagggaccgtcctggtgtttttggggctggggctggacgctaaatttgggaaaggagccaaaaagactagccattag

SEQ ID NO: 135283 - DNA, 720 bp, synthetic construct
  misc_feature 1..720: note = Description of Artificial Sequence: Synthetic coding sequence
  source 1..720: mol_type = other DNA
atggccagttcttctagtctggtgcctgacaggctgcggctgccattgtgcttcctcggcgttttcgtgtgctatttctattatgggattctgcaggagaagataacccgtggaaaatacggagagggcgctaagcaggagacttttactttcgccttgacactcgtcttcattcagtgcgtgattaatgcggttttcgccaaaatccttatccagttctttgataccgcaagagttgatcggacacgctcttggctgtatgctgcctgtagtatatcttatctaggagccatggtgagctccaactccgccttgcagtttgtgaattacccgacacaggttttgggcaaatcatgcaagccaattccagtgatgctacttggagttaccctgttgaaaaagaaataccccttggcaaaatacctgtgtgtgctcctgattgttgctggagtcgctctgttcatgtacaagccaaagaaggtagttgggattgaagagcatactgttggctatggggaactgctgcttctgcttagcctgaccctggacgggctaaccggggtcagccaggatcacatgcgagcccactatcagacaggtagcaaccatatgatgctgaacattaacctctggagtaccctcctgctgggaatgggagagtctcagttctgttgcagtagccacgtgagccccgaagggagattgccaagttccttctag

SEQ ID NO: 135284 - DNA, 597 bp, synthetic construct
  misc_feature 1..597: note = Description of Artificial Sequence: Synthetic coding sequence
  source 1..597: mol_type = other DNA
atgctgctgggcgtcaccctgctgaagaaaaagtatccgttggccaagtacctgtgcgtgctattaattgtcgctggggttgcactgttcatgtacaagcctaagaaagtcgttggaatcgaggaacataccgttggatacggagagctgttgctcctgttatccttgacgttagatggtctcacaggagtttctcaggatcatatgagggcacattaccagacagggtccaatcacatgatgctgaacatcaatctgtggagtaccttacttctggggatgggtatactgttcaccggcgaactgtgggaatttctttccttcgccgagagataccctgctattatttataacatcctgctgtttggtctgacttccgccctggggcaaagtttcatattcatgacagttgtgtacttcggcccactaacgtgctccatcattactacgacgagaaagttctttaccattctcgcctccgtcatcctgtttgcaaacccaatatcccccatgcaatgggtgggcacagttttggttttcctgggactggggctggatgccaaatttggcaagggcgccaagaaaaccagccactag

SEQ ID NO: 135285 - DNA, 570 bp, synthetic construct
  misc_feature 1..570: note = Description of Artificial Sequence: Synthetic coding sequence
  source 1..570: mol_type = other DNA
atgctgctcggtgtgactctgctcaagaagaagtatccactggctaaatacttatgtgtcctgctgatcgtggcgggagtggctctgttcatgtacaagcctaagaaggtggtagggattgaggagcacaccgtcgggtacggtgaactgttgctgttgctgtctcttacgctagatggactgaccggagtatcgcaagaccacatgagagcccactatcagaccggctccaatcatatgatgctgaacattaacctgtggagtacactcttgctgggtatggggatattgttcactggagaactgtgggagttcctcagcttcgctgaacggtatccagccatcatctacaacattcttctcttcggcctcacttccgcactgggccagagttttattttcatgaccgtggtgtatttcggcccactgacatgctccattattactaccaccaggaagtttttcaccatactggccagtgttattctttttgccaatcccatttcccctatgcagtgggtgggaacagtgctagtgttccttgccatgggatcttgctgtgtagcctag

SEQ ID NO: 135286 - DNA, 1179 bp, synthetic construct
  misc_feature 1..1179: note = Description of Artificial Sequence: Synthetic coding sequence
  source 1..1179: mol_type = other DNA
atggatgccagatggtgggccgtggtggtgttggcggcattcccctcacttggcgcaggaggcgaaactccggaggctcctcctgaatcctggactcaactgtggttctttagattcgtcgtaaatgccgcaggatacgcatcgtttatggtgccgggttacctgttagtccagtattttaggcgtaagaactacctggaaactggacgcggcttgtgttttccattagtcaaggcctgcgtgttcggcaacgagcctaaggcctctgacgaggtgccattggcaccaaggacggaggctgccgagacaactcccatgtggcaagccctcaagctcctcttttgtgccaccgggttacaagtctcatatcttacctggggggtcctgcaggagagggtgatgaccaggtcatatggtgccaccgctacatctccaggcgagagatttacggactctcagtttctggtgctgatgaacagagtgctggccctgattgtcgccggattgtcatgtgtgctgtgtaaacagcctagacacggtgctcctatgtaccggtatagtttcgcatcactttccaatgtgttgagtagctggtgtcaatatgaggcccttaaattcgtgtctttccctacacaagtcttagcgaaagcttccaaagtaattcctgtgatgcttatgggaaaactagtgtccaggcgctcctacgagcactgggagtatctgacagccactctgatctcaatcggtgtgtctatgttcctgttatcgagtggtcccgagccccggtccagcccggccactaccctatccggactgttcactgtggggtcgttgctagaacagggggctctgctagaaggaacacgcttcatggggagacactctgagtttgcagcacatgctttattgttatctatttgttcggcatgcgggcaactgttcattttctataccataggacagtttggcgcggccgttttcactataatcatgacattgagacaagccttcgcgattctgttgagttgtctgttatatggacacacagtgacggtggtggggggcctgggagtcgccgttgtgtttgccgcactcctacttagagtgtatgccagaggacgactcaaacagaggggaaagaaggcggtgccggtcgagtctccagtgcaaaaggtgtag

SEQ ID NO: 135287 - DNA, 1299 bp, synthetic construct
  misc_feature 1..1299: note = Description of Artificial Sequence: Synthetic coding sequence
  source 1..1299: mol_type = other DNA
atggacgcccgatggtgggccgtggttgtcctggccgccttcccaagcttgggtgccggcggggagacccctgaggcaccaccggagtcatggacacagttatggttctttcgtttcgtggtgaatgcagccggatatgcttctttcatggtgcccggttacctgctggtgcagtactttaggaggaagaattacctcgagactggacgggggctgtgctttcccttggtcaaggcctgtgtctttggcaacgagcctaaggcctccgacgaagtacccctagctcctcggaccgaggccgctgaaactacaccaatgtggcaggcactgaagttgctcttctgtgcaaccgggcttcaggtgagttacctgacttggggggttttgcaagaaagggtcatgacccgtagctacggtgctacagcaacttcaccaggcgagcgatttacggatagtcagttcctggtgctgatgaacagagtactagcattgatagttgccggcctgtcctgcgtgttgtgcaagcagcctagacacggcgcccctatgtataggtactcattcgcctccctgtctaacgtcctgtcttcttggtgccagtatgaagcattaaaatttgttagttttcccacacaggtgttagctaaggcttctaaggtgattcccgtgatgttaatgggtaaactggtgtcaaggcggtcgtacgaacactgggaatacctaaccgctaccttgatctcaattggggtgtccatgttcctcctttctagcggcccagagcctagatcgtctcccgctactaccttgtcaggcctgatcttgttggccgggtacattgcctttgacagcttcacatccaactggcaagatgccttgttcgcgtacaagatgagctcggtgcagatgatgttcggcgtgaactttttttcatgcctcttcaccgttgggtctctccttgaacaaggcgccctgctcgaaggcaccaggttcatggggaggcatagcgagtttgctgctcatgcactacttttgagcatatgtagtgcttgcggccagttgttcatcttttataccattggccagtttggagccgctgtctttactattattatgactctcaggcaagccttcgctattctgctcagctgcctcctctacggacacactgttacggtggtgggcggtctgggggtggcggtggtgtttgcagcactcctattgcgggtgtacgccagaggcaggttaaaacagagagggaagaaggctgtgccagtagagtctccagtccagaaggtgtag

SEQ ID NO: 135288 - DNA, 900 bp, synthetic construct
  misc_feature 1..900: note = Description of Artificial Sequence: Synthetic coding sequence
  source 1..900: mol_type = other DNA
atgactagaagctacggagccacagccactagccccggagagcggtttacggattcccagttcctcgtactcatgaacagggttctggcactaatcgtggccggtctgtcatgcgtcttgtgcaagcagcctcgccacggggcaccaatgtacaggtactcctttgctagtctgtccaatgtgctctcttcgtggtgtcagtatgaggccctgaagttcgtgtctttccccacacaggtactggctaaagcctccaaagtcattccagttatgctgatgggcaagcttgtgtctcggcgatcttatgaacattgggagtatctgaccgccaccctgatttctatcggcgtcagtatgtttcttttgagctcgggccctgaaccccgttccagcccagctacgacactgtccggcctgattttgctggcaggatacatcgccttcgattcatttaccagtaactggcaggatgccttgtttgcgtacaagatgagctcagttcaaatgatgtttggagtcaattttttttcttgtctgttcactgtcggtagcctcttggaacagggggccctgttggaaggcacccggttcatgggcagacatagtgagtttgccgcgcacgcattactgttaagcatctgttcagcctgtggccagctcttcatcttttataccattggtcaattcggcgccgccgtcttcactatcatcatgacactccggcaggcatttgctatcctgttgagttgtctgctgtacggccataccgtgaccgtggttggtggattgggcgtggcggtggttttcgccgcccttctgctcagagtctatgcgagaggaaggctcaagcagcgcggcaaaaaagcggtgcctgtggagagcccagtgcagaaagtgtag

SEQ ID NO: 135289 - DNA, 1020 bp, synthetic construct
  misc_feature 1..1020: note = Description of Artificial Sequence: Synthetic coding sequence
  source 1..1020: mol_type = other DNA
atgctgctggccatgcccgcattgtggtacctggctacttcctggtgcagcacatccggcgggaggaccacatggcgccccgtctcctatctgacttggggagtgttacaggaaagggtcatgacaagatcttatggggccacagcaaccagcccaggcgagcggtttaccgattcccagtttctcgtgctgatgaaccgcgtcctggcactgatcgtggctggcttgagctgtgtgctgtgtaagcagccccgtcacggggccccgatgtatcggtacagttttgcctcactgtctaatgtgctgtcttcttggtgtcagtatgaagcacttaagttcgtctcttttcctactcaggttctggcaaaagcctccaaggtaatcccagtaatgctcatggggaagctggtaagccgaaggtcctatgagcactgggaatacttgaccgctactctcattagtattggggtgtctatgttcttgttaagtagcggtcccgaacctcgaagctcaccagcgacaactctcagtggccttatactgttggccgggtatatagctttcgactccttcacttccaattggcaggatgcattattcgcatataagatgagtagcgtgcagatgatgtttggagtgaatttttttagctgtctcttcactgtcggctcactgctcgaacaaggcgccttgctggagggcaccaggtttatggggagacattccgagttcgctgcccacgctctgctccttagcatctgtagtgcttgcggccaattgtttattttctacacaatcggacaatttggagccgccgtcttcactattatcatgaccttgcgccaagcctttgccatcctgctttcctgtcttttatacgggcacaccgtgacggttgtgggggggctgggcgtcgcagtggtgttcgccgctctgctgctgcgggtatacgcgcgaggacgactcaaacaacgcggcaagaaggccgttcccgtggagtcgcccgtgcaaaaggtgtag

SEQ ID NO: 135290 - DNA, 852 bp, synthetic construct
  misc_feature 1..852: note = Description of Artificial Sequence: Synthetic coding sequence
  source 1..852: mol_type = other DNA
atggatctgacccaacaggcaaaagatatccagaacattaccgtccaggagacgaacaaaaacaatagcgagtctatcgagtgcagcaagataactatggacctgaaattcaataactctaggaagtacatatctatcacggttccatctaaaacccaaactatgtctccacatatcaaatccgtggacgatgttgtggtgctcggtatgaatctgagtaagttcaataagcttacacagttctttatctgtgtcgccggggtctttgttttttacctaatttacggttacctccaggagctgatcttttctgtcgagggctttaagagctgtggctggtatcttactctggtgcagttcgccttctactcaatcttcggcctcatcgaacttcagctgattcaggataagcgccggaggatcccagggaaaacatacatgattatcgccttcttgaccgtcggcactatgggcctgagcaatacctcattaggatacctcaactaccccactcaagtaatctttaagtgttgcaaactgattcctgtcatgctgggaggggtttttatccagggtaagagatacaacgtggccgacgtatccgcagccatctgcatgtccctgggattaatctggtttactttggctgactccaccaccgctcccaacttcaatctgacaggtgtagtgctcattagcctggctctctgcgctgacgctgtgattggaaatgtacaagagaaggctatgaagctgcacaatgcttcaaacagcgagatgaatattacaacgagtagctactccggggtctttatattccctaataaacttaagattcccttagttttatag

SEQ ID NO: 135291 - DNA, 1206 bp, synthetic construct
  misc_feature 1..1206: note = Description of Artificial Sequence: Synthetic coding sequence
  source 1..1206: mol_type = other DNA
atggaccttacccagcaagccaaagatatccagaacattaccgtgcaggaaacaaacaagaataactctgaaagcatcgagtgcagtaagattaccatggatctgaagttcaacaattctaggaagtacataagcatcacagtgccctcgaagacacagaccatgagtccgcacattaagagcgtcgacgacgtagtggtgctgggcatgaacctgtccaagtttaacaagctgactcagttttttatttgcgtcgccggcgtttttgttttttatctcatatacggctacctgcaggagcttattttcagtgtcgagggatttaagtcttgcggttggtatctaacactcgtgcaattcgccttttattcaatattcggcctgattgaattgcagctaatccaggacaaacgccgacgcattccgggcaagacctacatgatcattgccttcctgacagtgggtactatggggctcagtaacacaagccttggttatctgaattaccccacacaggtgattttcaagtgttgtaagctcatacctgtaatgctaggaggcgtattcatccaagggaagcggtacaatgtcgccgacgtgagcgctgctatttgcatgagtttgggactcatctggttcactctggcagacagtacgacggcccccaactttaatttgactggagttgtcctgatcagcctggccctttgtgccgacgccgtgatcgggaatgtgcaggagaaggccatgaaattgcacaacgcatctaactcagagatggtgctgtactcttatagtatagggttcgtgtatattctgttgggtttgacctgcacatctggccttgggcctgctgtgaccttttgcgcgaagaaccctgttagaacatacggatacgccttcctgttcagtctgacaggctactttgggatctcattcgttctggctctgatcaagatttttggtgcattgattgctgtgacagtgactaccggcaggaaggcaatgacaattgtcctatccttcatattcttcgccaagccatttacatttcaatacgtgtggtctggcctactggtggtgctggggatattcctcaatgtatatagcaaaaatatggataagatccgactgccctcactgtacgatctgattaataagagcgtggaagccagaaagtcgagaacattggcccagacagtctag

SEQ ID NO: 135292 - DNA, 657 bp, synthetic construct
  misc_feature 1..657: note = Description of Artificial Sequence: Synthetic coding sequence
  source 1..657: mol_type = other DNA
atgctgcgcctggcgcagacccctaggcggctaccttcccctttcagagtgacatatcgaccctggggcacaagggcattcggagcgttccccgttttcggaacacagataagctctccccctgagaaccttgataccgcccatctgcctcatcccgagggagctttcgaggaatggatgagaagtgggtggaagaaaagagatctaacccagcaggctaaggatatccagaacatcacagttcaagagacaaacaagaataattcagaatcaatcgagtgctcgaagattacgatggatctcaagttcaataacagcaggaaatacattagcattaccgtcccctccaaaacccaaaccatgtctccacacatcaagagtgtcgatgatgtggtggtcctgggcatgaacttgagcaagtttaacaagcttactcagtttttcatctgcgtcgcaggcgtgttcgttttctacctgatttacggatacctgcaggagctgattttcagtgtggaggggttcaagtcatgcggttggtatttgaccctagttcagttcgcattctactctatattcggcctcatcgagcttcagctgatacaggacaaacggcgccgctacgtggtgtgtttttatttcctgatcttcctgtactag

SEQ ID NO: 135293 - DNA, 996 bp, synthetic construct
  misc_feature 1..996: note = Description of Artificial Sequence: Synthetic coding sequence
  source 1..996: mol_type = other DNA
atgcgccccgcgctggcagtgggcctagtttttgctggctgctgttcaaatgtgatattcctggaactcttagctagaaaacatccaggatgcggaaacatagtcacctttgctcagttcttgtttatcgccgtggaggggttcctattcgaagctgacttgggtcggaagcctcccgcgatccctatcaggtactacgccattatggtcaccatgttcttcaccgtttcagttgtgaataactacgctctcaatctgaatatcgccatgcctctgcacatgatttttagaagcggaagtctcatcgccaatatgattctgggcattataattttaaaaaaaaggtattccatatttaagtacacaagcatcgctctggttagcgtgggcattttcatatgcacgtttatgtctgccaagcaggtcactagccaaagctccctgagcgagaatgatggcttccaggcattcgtgtggtggctgcttggtatcggcgcactgacttttgccctactgatgagcgcaagaatgggaattttccaagagacattgtataaacggttcgggaagcactctaaggaggccctgttctacaaccatgccctgcctctgccgggcttcgtgtttttggcctccgacatctatgaccacgccgtcttgtttaacaaaagtgagctctacgagattcctgtgattggagtcacactacctattatgtggttttaccttctcatgaatattatcactcaatacgtatgcatccgaggagtgttcatcctgacaactgagtgtgcctcacttacagtgaccttggttgtgactttgcgcaagttcgtgagcctgattttctcaattctttatttccaaaatccctttaccttatggcattggctgggcacactgttcgtgtttatcgggacgctgatgtacaccgaagtgtggaacaacctaggcaccactaaatcagagccacagaaagactcaaagaagaactag

SEQ ID NO: 135294 - DNA, 1095 bp, synthetic construct
  misc_feature 1..1095: note = Description of Artificial Sequence: Synthetic coding sequence
  source 1..1095: mol_type = other DNA
atgaatagagcacccctcaaacgatcccgcatccttcacatggctttaaccggcgcgtccgatccgtccgccgaagccgaagctaacggcgagaaaccttttctgctgagggccttgcagatcgccctggttgtgagcctgtactgggtcacaagtatctcaatggtattcctgaataagtacttgttagactctccttctctgcgactcgatacacctatatttgttaccttctatcagtgtttggtcactacactcctttgtaagggcttgtcagctctcgccgcatgctgccccggagccgttgacttccctagcctccgcctggatctgagagtggccaggagcgtacttcccctttcggttgtgttcatcggaatgatcactttcaataacctgtgtttaaagtatgtcggcgtagccttctacaatgtggggagaagccttacaaccgtgttcaatgtactcttatcctatttactgctgaaacagactacctcattttatgctttgctaacatgtggaatcataattgggggcttctggctgggggtcgatcaggaaggtgccgagggaactctcagttggctgggaactgtgttcggagtcttggctagcctctgcgtgagcttaaacgccatttacacgaccaaggtcctgccggccgtggatggctctatttggagactgacattttacaacaacgtgaatgcctgtatacttttcctaccactgctgttgttgctcggggaactacaagcgctccgtgacttcgctcaactcggaagcgctcacttttggggcatgatgaccctggggggcctgtttgggttcgccatcggttatgtaactgggctacagatcaagttcacaagccctctcacacataacgtgtccggtacagccaaggcctgcgctcagactgtgcttgccgttctgtattacgaggaaacaaagagcttcctgtggtggacctctaacatgatggtgctgggagggagcagtgcctatacttgggtcagagggtgggagatgaagaaaaccccagaagagccttcccccaaagatagtgaaaaatccgccatgggtgtgtag

SEQ ID NO: 135295 - DNA, 1056 bp, synthetic construct
  misc_feature 1..1056: note = Description of Artificial Sequence: Synthetic coding sequence
  source 1..1056: mol_type = other DNA
atggcactgacaggtgcctcagaccccagtgctgaggcagaggccaacggtgagaaaccttttctgctccgcgccctccagattgccctggtagtgtccctgtactgggttacatccatcagtatggtgttcttgaataagtatctgctggactctccttcactgcggctggacacgccgatcttcgtgaccttttaccagtgtctggtgaccaccctgctatgcaaagggctgagcgccctggctgcatgctgtccaggggccgtggattttccatccctcagacttgacctccgtgttgctagatcagtgctgccactgtcagttgtcttcatcggaatgatcacattcaataatctctgccttaagtacgtgggagtcgctttctacaatgtgggacgcagcctgacaaccgtgttcaacgttctgcttagttatctgttgctcaagcagactactagcttttatgccctgctgacttgcggaatcatcatcggtggcttctggctcggcgtggaccaggaaggcgccgaaggaaccctctcttggctgggcaccgtgttcggcgttctcgcttcactctgtgtgagcctgaacgctatctatacaaccaaagttctgcccgccgttgacgggtcaatttggcgcctgacattttataacaacgtgaatgcctgtatcttgttcctgcccttattgctcttgctcggtgaactgcaggcattaagagatttcgcccagctcggctcagctcatttctgggggatgatgacactggggggtttattcggctttgcgattggctacgttacaggacttcagattaagtttacatcaccccttactcataacgtgtctggcaccgcaaaggcatgtgcacagacggtgcttgcagtgctgtactacgaggagaccaaatcttttttatggtggactagtaatatgatggttcttggtgggagcagcgcgtacacttgggtgaggggctgggagatgaaaaagactccggaggagccatcacccaaggactccgagaagagtgccatgggtgtctag

SEQ ID NO: 135296 - DNA, 1056 bp, synthetic construct
  misc_feature 1..1056: note = Description of Artificial Sequence: Synthetic coding sequence
  source 1..1056: mol_type = other DNA
atggctctaacgggcgcttccgacccgtctgccgaggcagaagccaacggagagaaaccctttctccttcgggcactgcagattgcccttgtggtcagcctgtattgggtgacttcaatatcgatggtgttcctgaacaagtacctgctggattccccgtcattgagactggatactcccattttcgtgactttttaccagtgcctggtgaccacactgctgtgcaaggggttaagcgctctggcagcctgctgtccaggcgcagtggatttcccatctttgagactggatctcagggtggccagaagcgtcttgcctctttccgtggtgtttattggaatgattaccttcaacaacttgtgcctcaagtacgtgggggtcgcgttctataacgtgggacgctccctgactaccgtctttaacgtattgctttcctacttactcctcaaacagacgaccagtttttatgcactcctgacttgcgggatcatcattggcggattttggctgggcgtcgatcaggaaggagctgagggtactctgagctggctagggaccgtgtttggggtgcttgcctcactgtgcgtaagtctcaatgctatctatacaacaaaggtactccccgccgttgacggttctatttggagactcacgttctacaacaatgtgaatgcttgtattctctttctgcctctcctgttactgcttggggaactgcaggccctgagagatttcgcgcagctgggttccgcccacttctggggaatgatgactttgggaggcctgtttggttttgccatcggatatgtgacagggctccaaattaaattcaccagtcctctgacacataacgtgagtggcacagccaaggcttgtgcacaaactgtgctggcagtgctttattacgaggagactaaaagctttttgtggtggactagtaacatgatggttctgggagggtccagtgcctacacgtgggtgcgggggtgggagatgaagaagaccccagaggaaccttcccccaaagattctgagaagtcagccatgggtgtttag

SEQ ID NO: 135297 - DNA, 219 bp, synthetic construct
  misc_feature 1..219: note = Description of Artificial Sequence: Synthetic coding sequence
  source 1..219: mol_type = other DNA
atggccctgacaggagcctccgatccgtctgccgaggcggaagccaatggcgagaagcctttcttattgagggcactacaaatcgccctcgttgtaagtctgtactgggttacaagtatctctatggtgtttctgaacaaatatttactcgatagcccgagcttacgcttggacaccccaatctttgttaccttctatcaatgcttagtaacaacctag

SEQ ID NO: 135298 - DNA, 498 bp, synthetic construct
  misc_feature 1..498: note = Description of Artificial Sequence: Synthetic coding sequence
  source 1..498: mol_type = other DNA
atggccctaaccggcgcgtccgatccttctgcagaagcagaggctaacggcgagaaaccgtttctcctccgcgcactccagattgcactagtggtctctctgtattgggtgacctcaatttccatggtctttcttaacaaatacctcttggattccccctccctgcgtctggacaccccgatcttcgtgaccttctaccagtgtttggtgacaaccctactgtgcaagggtttgagcgccttggcggcctgttgcccaggagccgtcgacttcccctctctgaggctggaccttcgggtcgctcgctcagtcctacccttgagcgtagtgttcattggcatgattacgttcaacaatctatgtttaaaatacgtaggcgtagcattttacaacgtgggtagatcccttacaacggtgtttaatgttttgctgtcataccttctactgaagcaaactaccagtttttacgcactgctgacttgcggaattatcatatag

SEQ ID NO: 135299 - DNA, 741 bp, synthetic construct
  misc_feature 1..741: note = Description of Artificial Sequence: Synthetic coding sequence
  source 1..741: mol_type = other DNA
atgaaccgcgcccctcttaagcggagtaggatactgcatatggcattaacgggtgcgtcagatccctctgctgaggccgaggctaacggagagaagcccttcctgctgcgggccttgcaaatcgccctggtggtttcgctatattgggtcactagcattagtatggtatttttgaataaatacctgcttgattcgcccagtctgcggctcgacaccccaatctttgtcactttctaccagtgcctggtcactacactactttgcaagggcttatcggctctggcagcatgctgtccgggggccgttgactttccctccttacgcctggatttgagggtggcacgatcagtattgcctttgtccgtcgtttttattggaatgatcacctttaacaacctttgcctgaagtatgtgggagttgctttctacaatgtcggccgaagtctgaccactgtgttcaacgttctcctctcgtatctgctcctgaaacagaccaccagtttctatgcccttctcacttgtggaattattatcggggggttctggctcggagtggatcaggaaggtgcagaaggaactctgtcttggctgggtaccgtgtttggggtgctggcctccctgtgcgtaagtctgaacgctatatacactaccaaggtgttgcctgcggtggacggcagcatttggagactgacattttataacaacgtgaacgcttgcatcttgtttctccctcttctgtag

SEQ ID NO: 135300 - DNA, 1014 bp, synthetic construct
  misc_feature 1..1014: note = Description of Artificial Sequence: Synthetic coding sequence
  source 1..1014: mol_type = other DNA
atgaccgcaggcggacaggccgaggcagagggggcgggcggggagccaggtgctgcccggttgccctcccgggtggctcgcctgctgagcgccctgttctacggaacatgttcatttcttatcgtgttggtgaacaaggccttgttgactacctacggcttccccagtccgatcttccttgggattggccagatggctgctacaattatgatactgtatgtctctaaactgaataaaattattcatttccctgattttgacaaaaagatccccgtgaaattgttcccactgccattgctctacgtgggaaatcacatcagcggtctaagcagcacttcaaaactgtctctgcctatgttcacagtgctgcgcaagttcaccattcccctgaccctactcttggagaccatcattttggggaaacagtatagcctgaacattattcttagtgtgttcgccatcatccttggagcttttatagcagccggctcagacctcgcattcaatttagaaggctatattttcgtatttttgaatgatatcttcacagccgcaaacggggtgtacacaaagcaaaaaatggatcctaaagagctcgggaagtatggcgttctcttctataatgcctgctttatgatcattcccactttgattatttccgtttccaccggagacctacagcaggcaacagagtttaatcagtggaaaaatgtagtatttatactgcaatttttactctcatgtttcctgggtttcctactgatgtactctactgtgttatgttcctactataatagcgccctcacaacagccgtagtgggagctatcaagaatgtgtccgtggcatacataggaatccttatcgggggagactacatattttccctactcaatttcgtcggcttgaacatctgcatggccgggggtctacgatactccttccttaccctgagctcccagcttaaaccaaagcccgttggcgaggagaacatatgtttggacctcaagtcttag

SEQ ID NO: 135301 - DNA, 492 bp, synthetic construct
  misc_feature 1..492: note = Description of Artificial Sequence: Synthetic coding sequence
  source 1..492: mol_type = other DNA
atgacggcaggaggccaggcggaagctgaaggcgcaggcggcgagcccggggccgccagactgccttccagggtcgcaaggttactgagtgccctcttttacgggacatgtagctttctgattgtattggtgaataaagccctgctgacaacatatgggttcccgtcccccattttccttgggatcggccaaatggccgctacgattatgatcctgtatgtgtccaaactgaacaagatcatccacttcccggacttcgacaaaaaaattcccgtgaaacttttcccactccccttactgtacgtcggaaatcacatatccggcctctcctctacgtcaaagctcagtctcccaatgttcacagtgctacggaaatttacgattccactgacactcctgctggaaacaatcatactgggtaagcagtacagccttaacatcattctgagcgtttttgccatcattcttggagcgtttatcgccgccggctag

SEQ ID NO: 135302 - DNA, 750 bp, synthetic construct
  misc_feature 1..750: note = Description of Artificial Sequence: Synthetic coding sequence
  source 1..750: mol_type = other DNA
atgacagctggaggccaggcagaagctgaaggtgccggaggcgaacctggcgccgctagactacccagccgcgtggcaagactcttatcggctctgttttacgggacttgtagcttcctcattgtgttagtcaataaggctttgctaaccacctacggttttcctagcccaatttttctcgggattggtcagatggccgccactattatgattttgtatgtttccaagctcaacaagattatccacttcccggacttcgacaaaaagattcctgtgaaattattccccctcccactgttgtacgtgggtaaccacatttcgggtctaagctcaacctcaaagctgtctctgccgatgttcacggtcctccggaagtttaccattcccctcactttattgttagagaccatcattcttgggaaacaatattcactgaacatcattctttccgtattcgctattattctcggggcctttatcgccgctggttttctgctaatgtatagtacagtgctgtgtagctactacaatagtgcattaactaccgctgtcgtgggtgccatcaagaatgtttctgttgcttacataggtatcctcatcggtggcgattacatttttagtctgttaaacttcgttgggttaaacatttgcatggcaggagggctcagatatagtttcctgaccctcagctcccagctcaaacccaagcccgtcggggaggagaatatctgcctggaccttaagtcatag

SEQ ID NO: 135303 - DNA, 1251 bp, synthetic construct
  misc_feature 1..1251: note = Description of Artificial Sequence: Synthetic coding sequence
  source 1..1251: mol_type = other DNA
atgcgccagttgtgtagaggaagggttttagggatcagcgtggctattgcgcatggcgtgttcagcggcagtctgaacatcctgcttaagttccttattagccgttatcaattctcttttttgacactcgtgcagtgcctgacgtcctcaacagctgccctatctctcgagctgctgagacggttaggcttgatcgccgttccaccctttgggctaagcctggcccggtcattcgcgggggtcgcagtactgagcaccctgcagtccagcctgactttatggagtctgcgtggcctgtcactccccatgtacgttgtctttaagcgatgcctcccactcgttacaatgttgataggcgtccttgtacttaagaacggagctcctagtcccggcgtgctggccgcagtgctcataactacttgcggcgcagcactggccggtgcgggtgaccttacgggcgacccaatcgggtacgttaccggcgttttagcagtcctcgtccacgccgcataccttgttctgatccagaaagcatcggccgataccgagcatggaccattgaccgcgcagtacgtgatagcagtgtcagccactcccctcctggttatctgtagcttcgcaagcacggactcgatccatgcatggaccttcccggggtggaaggatccagccatggtctgcatatttgtggcctgcatactgattggctgtgcaatgaactttaccactctgcattgtacctacatcaattcagctgtgacaacatcattcgttggcgtggtcaagagcatcgccactatcacagtgggaatggtggccttttcagatgtcgagccaacaagcctcttcatcgccggcgtggtcgtaaacacactgggtagtataatctattgtgttgccaagtttatggagacacgaaagcagtctaattatgaagatctggaggctcaacctagaggcgaggaggcgcagctttctggcgatcaactccccttcgtgatggaggagttgccaggagagggtgggaacggccgctccgagggcggagaggctgccggagggccggcccaggaaagcagacaggaggtgagaggttccccgagaggcgtcccgctagtagcagggagcagcgaggagggatcaagaagatctctcaaagacgcgtatctggaagtgtggagactcgtgcggggcactaggtatatgaagaaagactacctgatcgagaacgaggaacttccttctccgtag

SEQ ID NO: 135304 - DNA, 1431 bp, synthetic construct
  misc_feature 1..1431: note = Description of Artificial Sequence: Synthetic coding sequence
  source 1..1431: mol_type = other DNA
atgagtactcagcggctgaggaatgaggactaccacgattactcttccaccgacgtctcccccgaggagagtccaagtgaaggtctcaataatctttcttcacccggttcgtatcagagattcggacaaagcaattcaacaacctggtttcagacgctgatccatcttcttaaaggcaatattggtactggcctgctgggcttgccactggccgtgaagaacgctggcatcgtaatgggacccatatccttgttgattatcggtattgtggccgtacattgcatgggtattctggttaaatgcgcccaccatttctgccgccgattgaacaagtcttttgtagattacggggacactgtgatgtacggtctggaaagcagcccgtgctcatggctccgcaaccatgctcactggggtagaagagtagtggatttctttctcatcgtcacacagttgggattctgttgcgtttatttcgtcttcctcgccgacaacttcaagcaggtaattgaagcagcgaacggaacaaccaataattgtcacaataatgagaccgtgattcttactccaacaatggacagtaggttgtacatgctttcattccttccattcctcgtgcttcttgtatttatcagaaacctgagggctctatcaatcttcagtcttcttgctaatattactatgcttgtgagtctggttatgatatatcagttcattgtgcaaaggatccccgacccatctcacctgcctctcgttgctccgtggaagacctaccctttgttcttcggcactgctatttttagctttgagggaattggtatggttcttcccctcgagaacaagatgaaggaccccagaaaattccccctcatcctgtacctaggcatggtaattgtgaccattctctacatctcattgggctgcctggggtatttgcaatttggtgccaacatacagggatccatcacattaaaccttcctaactgttggctgtaccaaagcgtcaaactgctatacagcatcggaattttcttcacttatgctctgcagttttacgtgccagctgagatcatcatcccattctttgtcagtcgcgctcccgagcactgcgagcttgtcgtggacttgtttgtgaggactgtgcttgtctgcttgacctgtattctggccattctgatacccagactggacttggttatctccttagtggggtccgtgtccagttccgctttggccctaatcattccacccttgctggaagttacaaccttctattctgaaggtatgtcacctcttacaattttcaaggatgccttaattagtattttggggtttgttggtttcgtggtcgggacctacgaggccttgtatgaactgattcagcccagtaacgccccaattttcatcaacagcacttgcgctttcatatag

SEQ ID NO: 135305 - DNA, 1161 bp, synthetic construct
  misc_feature 1..1161: note = Description of Artificial Sequence: Synthetic coding sequence
  source 1..1161: mol_type = other DNA
atgtccacccagcgacttaggaatgaagactaccatgactactcttccacagacgtgtcccctgaggaaagtcccagcgagggacttaataatctgagttcacctggctcttaccaacggtttgggcagtctaattcaactacctggttccagactcttatacacctgttaaagggtaatattggaaccgggctacttgggttaccactagccgttaagaatgccggaattgttatgggccccatctccctcctgataatcggcattgtggccgtgcattgcatggggatccttgtgaaatgcgcacaccatttctgtcggcgtctcaataagagctttgttgattacggagacactgtgatgtacggcctggagagttcaccctgttcgtggcttagaaaccacgcacactggggaaggcgagtagtggacttcttcctgatcgtgacacagcttggcttctgctgcgtgtattttgtttttctggctgacaacttcaagcaagtgattgaagcagctaatggcacgaccaacaattgtcacaataacgagaccgtcatcttaactccgacaatggattcgcgcttgtatatgcttagcttccttccctttctggtgttgctggtgtttatacgcaatctgagagccctaagcatattctccctcctcgcaaacattactatgctcgtgtcactcgtgatgatctatcagtttattgtacagcgtataccagatccaagccatctgcctttggtagcaccatggaagacataccccttgttcttcgggacagcaatcttctcatttgagggtatcggaatggtcctccccctggaaaataagatgaaggaccccagaaagttccctctgatcctttatctgggtatggttattgtgacgattctgtacatctcactgggctgcttaggttatctgcagtttggcgcaaacatccaaggctctatcactttgaatttaccaaactgctggctctaccagtctgttaagcttctgtatagcatcgggatattctttacttacgccctgcagttctatgtgcctgctgagatcatcattcccttctttgtcagccgcgcacctgagcactgcgaactggtcgtggatctgtttgtcaggactgtgctggtatgcctgacctag

SEQ ID NO: 135306 - DNA, 213 bp, synthetic construct
  misc_feature 1..213: note = Description of Artificial Sequence: Synthetic coding sequence
  source 1..213: mol_type = other DNA
atgagtacacagagacttcggaatgaggattaccatgattactcctccacagacgtgtctccggaagaatccccttccgagggattgaacaatctctcctccccaggctcctaccaacgcttcggtcagtcgaacagtaccacatggtttcagactctaattcatttgcttaagggaaatatcggaaccggattgttgggtctaccgctgtag

SEQ ID NO: 135307 - DNA, 219 bp, synthetic construct
  misc_feature 1..219: note = Description of Artificial Sequence: Synthetic coding sequence
  source 1..219: mol_type = other DNA
atgtcaactcaacgtttaagaaatgaagactatcacgactattcatctacggatgtgagtccagaagaatcaccgagcgaaggcctgaataacctaagctctcctggttcataccagcgcttcggacagtctaacagtacgacctggttccagaccctgatccatctgctgaaaggcaatataggcaccggcctcttaggtttgccgctggcggtatag

SEQ ID NO: 135308 - DNA, 1431 bp, synthetic construct
  misc_feature 1..1431: note = Description of Artificial Sequence: Synthetic coding sequence
  source 1..1431: mol_type = other DNA
atgtccacacagagattgcggaacgaagattaccacgactattcatccaccgacgtgtctcccgaggaatcaccgagcgagggtctgaataacctctcatctccaggctcttaccagcgatttgggcagtctaatagtactacgtggtttcagacactcattcacctgttaaaaggcaacattgggacaggactactgggactccccctggccgtaaagaacgcaggcatagtgatggggcctatcagtctgctgatcataggcatagtagctgtgcattgcatgggaattttagtgaaatgcgcacatcatttctgcagaagacttaataaaagctttgtggactacggggatacagtgatgtacggtctcgaatcgagcccatgttcctggctccggaaccacgctcattggggccgaagggtggtcgactttttcttgatcgtaacacaactgggtttttgctgcgtatattttgtatttcttgccgacaacttcaagcaagtcatagaggcagctaacggaactactaacaattgtcacaataacgagactgtgatcctcacaccaaccatggacagcagactgtatatgcttagctttctgcccttcttggttctcctcgtatttattcgcaacttgcgcgccttgagcatcttctccctcctggctaacattacaatgttggtcagcctcgtcatgatctatcagtttatagtgcagagaattcccgacccaagccatctcccactggtggcaccctggaaaacataccctctgttttttggaaccgcgatcttcagcttcgagggcattggcatggtgctgccactcgagaacaagatgaaggatccgagaaaattcccattaatcctgtatctgggcatggtcattgttacaattctgtatatttcactggggtgcctgggataccttcaatttggagctaatattcagggatcaatcacgcttaatttacctaactgctggctgtaccagtcagttaagctcctttatagcattggcatattttttacttatgccctgcaattttacgtacccgctgaaatcatcatccctttcttcgtgtcccgcgcccctgaacactgtgagttggtggtagacctgttcgtgagaacagtactggtctgccttacgtgcattctcgcaatcctaatccctcggctcgacctagtgataagcctagtgggcagcgtgagtagctcagccctggccttaattattccccctctgctggaagtcacgaccttctattccgaggggatgtctcccctgacaatttttaaggatgccctcatttctattctcgggtttgtcgggttcgtcgtagggacgtatgaggcactctacgagctgattcagccttctaatgcacctatctttatcaactcaacctgcgcattcatttag

SEQ ID NO: 135309 - DNA, 1167 bp, synthetic construct
  misc_feature 1..1167: note = Description of Artificial Sequence: Synthetic coding sequence
  source 1..1167: mol_type = other DNA
atgtcaacccagcgattgcgaaatgaagactatcatgattatagcagtacagacgtctcaccagaagagagccccagcgaaggccttaacaatctgtcctcaccaggatcatatcaacgctttggtcagtcaaactctaccacatggttccagacactaattcaccttcttaagggtaatattgggacggggctgctagggctcccgttggcagtgaaaaacgcagggatcgtgatggggcccatatcgctccttatcattgggattgtcgccgtccattgcatggggattttggtcaaatgtgctcaccatttttgtcgccggctcaataagagttttgtcgactatggggacaccgtgatgtacggtctggagtccagcccatgctcctggttgcggaaccatgctcactggggcaggcgagttgtagactttttcctgatcgtgacccagctcggcttttgctgcgtgtactttgtctttctggctgataacttcaaacaggtaattgaggcggctaacggcacgactaacaattgccacaataatgaaaccgttattctgaccccaacaatggactcccgcctgtacatgctgtcattcctgcccttcctggtgcttctggtgttcatccgaaacctcagagcactttctatattcagccttctggcgaacatcactatgctggtatcactggtaatgatttaccagtttatagtccagcgcattccagatccttctcatctgccccttgtggccccatggaagacctatcccctcttctttggcaccgcaattttcagctttgaagggataggcatggtgctgccgctggagaataagatgaaggacccacggaagttcccactgattctgtacttgggcatggtaatagtcaccattctgtacatttctctcggctgtcttggatatctccagtttggggccaacattcaaggcagcattacactgaacctaccaaattgctggctgtaccagagcgtcaagctgctatatagtatcggtattttctttacgtatgcgttgcaattttatgtgcccgctgaaattatcatacccttcttcgtctcccgcgcgccagaacactgcgagttggtcgtggacttgtttgtcaggacagttttagtctgtctgacgtgcgagtag

SEQ ID NO: 135310 - DNA, 1452 bp, synthetic construct
  misc_feature 1..1452: note = Description of Artificial Sequence: Synthetic coding sequence
  source 1..1452: mol_type = other DNA
atgtccgtcactaagtccacagagggccctcagggagctgtggctattaagctggacctgatgtctccccccgagtcagcaaaaaagttagagaataaggacagcaccttcttagatgagagcccttcagaatctgccggcctgaagaaaactaaaggcattacagtattccaagccctgatccatctggtgaaagggaacatggggacgggcattctcggactcccacttgccgtgaaaaacgcaggaatcctgatgggtccgctgtctttattggtgatggggtttattgcctgccattgtatgcacatcttggtgaagtgtgcacaaagattttgcaagcgcctgaataaaccattcatggattacggggatactgtgatgcacggtcttgaggctaacccaaacgcctggttacagaatcacgcacattgggggcggcatattgtgtcatttttcctgattattacccagcttgggttctgctgtgtatacatcgtgtttctggccgataacctgaaacaggtcgtggaggccgtgaattccaccacaaacaactgctattcaaatgagactgtgatattgacacctacaatggactcccggttgtatatgctctccttcctgccatttcttgtgttgctggtcctcatcagaaatcttagaatcctcacgatcttctcaatgctagcaaatatctccatgctcgtgtcactggtgattattatacagtatataacccaggagataccagatccttccaggttgccgctggttgcgtcatggaagacctatcccctctttttcgggaccgcaatcttttcatttgagtccatcggggtggtcctacccctcgagaataaaatgaagaatgcccggcattttcctgccattcttagtctcgggatgtcaattgtcacctctctgtacatcggaatggccgctttgggttaccttagatttggcgacgacatcaaagctagtatcagtctgaacctgcccaactgctggctctaccagtcagtaaagctgctgtacatagccggcatcctttgcacttatgctctacagttctacgtgcctgctgaaatcataattccttttgctattagcagagtgtcaacaaggtgggccctcccacttgacctgtctattagactggtcatggtgtgtctgacatgcttgctcgctatcctaataccacgactggatctggtaatctccctggtaggatctgtctccggcactgcgctagcgctgatcattcctcccctgcttgaagtcaccaccttctatagcgagggcatgtccccactcaccatctttaaagatgccctgatctcaattctgggatttgtagggttcgttgtgggcacttaccaggccttagacgagctgttgaaaagcgaggattcccacccattctcaaattccacaacttttgttagatag

SEQ ID NO: 135311 - DNA, 624 bp, synthetic construct
  misc_feature 1..624: note = Description of Artificial Sequence: Synthetic coding sequence
  source 1..624: mol_type = other DNA
atgaacgatacggcagtattgccactcgaaaataaaatgaaaaatgctaggcacttccccgcgatcctgagcctgggcatgtctatcgtgacgtctctctatatcggcatggccgcccttgggtacctcaggtttggagatgacataaaggcctccatctcactcaacctacccaattgctggctgtatcagagcgtgaagctgctgtatattgccgggatcctctgtacatatgcactgcagttttatgtgcccgctgaaataatcattccgttcgctatctcacgggtcagcactaggtgggcccttccattggatttaagcattaggctagtgatggtttgcctcacatgtctgctcgctatcctgatcccaagactcgacctggtaatctcactggtcggatccgtctccggcactgcccttgcactgattatcccaccactactggaagtcacaactttctattccgaagggatgtcacccctgacaattttcaaagatgctctgatctcaatactaggcttcgtgggatttgtggtgggtacgtaccaggctctcgatgagttactgaaaagcgaagactcacaccctttctccaacagtactaccttcgtgcgttag

SEQ ID NO: 135312 - DNA, 1413 bp, synthetic construct
  misc_feature 1..1413: note = Description of Artificial Sequence: Synthetic coding sequence
  source 1..1413: mol_type = other DNA
atgtctttgctgggcagggattacaactcagagttgaacagtctcgacaacggacctcaatcaccgagcgaatctagctcaagcattactagcgagaatgtgcatccagcaggtgaagctggcctgtcaatgatgcagactctgattcacctgctcaagtgcaatattgggacaggtcttctcggactacccttggctatcaagaatgccggtctgctcgttgggccagtgtctctactcgcaatcggcgtgctaactgttcattgtatggtaatcctgctcaactgtgcacagcatttatcacagcgcctccagaagacatttgttaactacggagaagccactatgtacgggctggaaacttgtcccaacacatggttgagagcccacgccgtctggggacgctataccgtgagtttcctgcttgtcatcacccaactggggttctgttccgtctactttatgtttatggctgacaacttgcagcagatggttgaaaaagcccatgttacctcgaacatctgccagcctagagaaatcctgacactaacccctatactggatattcgcttctatatgctgattatactcccatttttaatattattggtgtttattcaaaatctcaaggtgctctctgtgttctcaactctggcaaatatcacaacccttggctctatggctctcatctttgagtatataatggagggcattccatatccgagcaacctacctctcatggccaactggaagacatttctgttgttctttggaacagctatcttcaccttcgagggagtcgggatggtgctcccgctcaaaaaccagatgaaacatccccaacagttctcctttgtgttgtacctgggtatgtctatcgttattattttatacatcctgctggggaccctgggctacatgaagtttgggtccgacactcaggcatccattacactgaatttgccaaactgttggctctaccagtcggtgaagttaatgtattcgattgggatcttcttcacctacgccctacagtttcatgtgccagccgagatcattatcccgttcgcgatctcacaggtcagcgaaagctgggcgctctttgtggacctgtcagtgcggtctgcactcgtctgtctgacttgcgtctccgcaattctgattcccaggcttgatctggtaatctcgttagttgggtcagtctcttcaagcgctctggcgctgattatccctgctctgctggaaatcgtgatcttttactcagaagacatgagttgcgtaacgatagcaaaggatattatgatctccatcgtcggccttctgggatgcatcttcggaacataccaggccctctatgagttacctcagcccataagccattccatggctaattccacaggtgtgcatgcatag

SEQ ID NO: 135313 - DNA, 1536 bp, synthetic construct
  misc_feature 1..1536: note = Description of Artificial Sequence: Synthetic coding sequence
  source 1..1536: mol_type = other DNA
atgagcctgctgggacgcgactacaactctgagctaaattctcttgataacggaccgcagagcccatctgaatcctccagcagcatcactagtgaaaatgtacaccctgctggcgaagccggactttctatgatgcagaccctgatccacctactcaagtgcaacattgggaccgggttgttgggcctccccctggccataaagaacgccgggttattagtgggccccgtatcactgctcgctataggcgtgctcaccgtccactgcatggtgattttgctcaactgcgcacagcacctctctcagcgactgcagaaaacctttgtcaactacggtgaagccaccatgtatggtttagaaacctgtcctaacacctggctccgggcacacgccgtgtggggccgctggaacctcgctctttctccacgactagagtgcagcggtaaaataagtgctcattgtaatccccatctccaggggtcttctaactccccggcccaggcttccagagtggccggcatttatcggtacacagtctccttcctccttgttatcactcaactgggcttttgctccgtctactttatgttcatggccgacaacctgcagcagatggttgagaaggcccacgtcacctcaaatatttgtcagccacgagaaatactcacactgactcccatcctggacattagattttatatgcttatcattctcccgtttttaatactcctggtgttcatccagaatcttaaggtgttgtcagtctttagcacccttgctaatataactacactgggcagcatggccttgatcttcgaatacatcatggagggcatcccctatcccagcaacctgcccctgatggcgaattggaagactttccttctcttttttggaacagcaatattcacattcgagggcgttggtatggtgttgcccttaaaaaatcaaatgaaacatccccagcagttcagctttgtgctgtacctgggaatgagtatcgtgattatcctgtacattctcctgggaaccttgggctacatgaaatttggttctgatacacaggcctcaattacactcaatctgcctaactgttggttgtatcagagcgtcaaattgatgtactctattggaatcttctttacatatgccctccaattccacgtgccagccgagattattatacccttcgctatatctcaggtgtcagagtcctgggccttattcgtcgacctgtccgtgcggagcgctctggtgtgcctcacttgtgtgagcgctatcctaatccctaggctggatctagtcatctctctggtgggctcagtgtccagttctgccctggcactaattattccagctctgctcgaaattgtgatcttctatagcgaggacatgtcatgtgtgaccatcgctaaggacataatgatatccatcgtggggctcttaggatgcatcttcgggacttaccaggccttgtacgaactgccacagccaattagccactccatggccaatagtactggtgtgcatgcctag

SEQ ID NO: 135314 - DNA, 1515 bp, synthetic construct
  misc_feature 1..1515: note = Description of Artificial Sequence: Synthetic coding sequence
  source 1..1515: mol_type = other DNA
atggaagctgccgcaaccccggcggccgccggagcggcccgccgcgaggagcttgacatggacgtcatgcgccctctgattaacgagcagaattttgatggcacctcagatgaagaacacgaacaagagttactgcctgtccaaaagcattatcagctggacgaccaagaggggatctcatttgtgcagaccctgatgcacctgttaaaagggaatataggcactggacttttagggctgcccctggccatcaagaatgccgggatcgtgttaggacccatctctctggtctttatcggcatcatctcagtgcactgcatgcacatccttgtgaggtgttcacacttcctctgtctgagatttaaaaagtctaccttgggctacagcgacaccgtttccttcgccatggaggtgtccccctggtcatgccttcagaaacaggcagcctgggggcgaagtgtggtggatttctttttggttattacgcagctcgggttttgcagtgtttacatcgtctttcttgccgagaacgtgaaacaagtgcacgaaggcttcttagagtccaaggtattcatctccaactcaactaacagcagcaatccctgcgagcgccgctccgtcgacttacggatctacatgctttgctttctcccatttattatactgctcgtgttcatcagagagctgaagaatctgtttgtgctatcgtttcttgctaatgtgagcatggccgtaagcctggtgatcatctatcagtatgtagtgcgcaatatgccagacccgcataatttacccattgttgctggttggaagaagtacccgctatttttcggaaccgcagtcttcgcgttcgagggtatcggtgtggtactcccactggagaatcagatgaaggaatcaaagcgtttcccgcaggctctgaatattggcatgggcattgtgaccacgctgtatgtaacacttgcgacactgggttacatgtgcttccatgacgaaattaaagggtctattacacttaacttgccgcaggatgtgtggctttaccagtctgtgaagattctctattcattcggcatcttcgtaacatattccatccaattctacgttcccgctgagattatcatccctgggattacgtccaagttccatacaaagtggaagcagatatgcgaatttgggataaggagcttcctcgtttccattacatgcgctggggctatattaataccccgactggatattgttatctcttttgtcggtgccgtctcctcgagcactctcgccctgatcctccctcccctggtcgaaattctgacatttagcaaggaacactacaacatctggatggtcttgaagaacattagcatagcttttacaggtgttgtcggtttccttcttgggacctacatcaccgtggaagagatcatctaccctacgcctaaggtcgttgctgggacccctcagagcccatttctcaatctcaatagcacatgtctcacaagtggcctgaagtag

SEQ ID NO: 135315 - DNA, 1602 bp, synthetic construct
  misc_feature 1..1602: note = Description of Artificial Sequence: Synthetic coding sequence
  source 1..1602: mol_type = other DNA
atggcccgcctgcctgctggaatccggttcattatatcattttccagggaccagtggtatcgcgctttcatctttatattaacatttctgctgtatgcttcctttcatctgagtagaaagcccatttctatcgtgaagggggagctgcataagtactgtaccgcatgggacgaagcagatgttcgcttctcctcacaaaaccgaaaatccggcagcgcagctccgcatcaattgcctgataacgagaccgactgcggatgggcaccattcgacaaaaataactatcagcaattattgggcgcgttggattatagtttcctgtgcgcttacgctgttggaatgtacctgagtggaattattggggagaggctcccaattaggtattacctcacctttggcatgctggcttccggcgcctttacagccttgtttggactcggttatttttacaacattcattccttcggcttttatgttgtgacgcaggtgatcaatggcctagtacagaccacgggctggccaagcgtggtcacctgtctcggtaactggttcggtaaaggcagaagaggcctcatcatgggcgtgtggaacagtcatacctccgtgggcaacatactgggttccctcatagctgggtactgggtgtccacgtgttggggcctgtcctttgtcgtccccggcgccatcgtggcggcaatgggaattgtctgcttcctgttcctcattgagcatcccaacgatgtgagatgctccagcactttggtgacgcacagcaagggatacgaaaatggaactaaccggctgcgcctgcagaaacagattctaaagagtgaaaaaaataagccactggatccagagatgcagtgcctcctgctgtccgacggtaagggctctatacatccaaaccatgtggtgatcctgccgggggatggtggctcggggaccgcggccatcagctttacaggcgccctaaaaattcccggggtcatcgaattctctctgtgtctgctgttcgcgaagctggtgtcctatacttttctgttttggttaccactgtatatcacaaacgtcgaccacctcgatgcaaaaaaggcgggagagctgagcacactgtttgacgtgggaggcatcttcgggggcatactggccggggtgatttccgaccggctggagaaacgtgcgtccacatgtgggttaatgttactgcttgctgctccgacgctctacatcttctccacggtgagtaaaatgggattggaggctactattgcgatgctattgctgtcgggcgcactggtttcggggccatacaccctaatcaccacggcggtgtctgcggacctaggaacacataaaagtttgaagggaaacgctcatgcactatcaaccgtcacagcaattatcgacggaaccgggagtgtgggtgcggccttgggcccgctgctagcagggctgctctcaccaagcggttggagcaacgtattctatatgcttatgtttgcagatgcctgtgcactgctgttccttattcgccttatccataaggaactttcctgtccagggtccgcaactggcgatcaggtcccattcaaggagcagtag

SEQ ID NO: 135316 - DNA, 1602 bp, synthetic construct
  misc_feature 1..1602: note = Description of Artificial Sequence: Synthetic coding sequence
  source 1..1602: mol_type = other DNA
atggccagactgccggctggaatccgcttcatcatctctttttcgcgcgatcaatggtacagggccttcatctttattctgaccttcttactctatgctagtttccatttgtctaggaagcccatctctattgttaaaggcgagctgcacaaatattgtaccgcttgggatgaagccgacgtcaggttctctagccagaatagaaaaagcggatctgccgcaccacaccaactgcctgacaacgagacagactgtgggtgggcaccctttgacaagaataactatcagcaactgctgggcgccctggactacagctttctgtgtgcatatgctgttgggatgtacctgagcggaatcataggtgaacgcttgccaattcggtactaccttaccttcggaatgctggcatcgggcgccttcacagcgttgtttggattgggttacttctacaatatccactctttcgggttttacgtggttacacaggttatcaacgggctcgtgcagaccaccggatggccaagcgtcgtcacttgccttggcaactggttcggtaaaggcagacgggggctgatcatgggagtctggaactcacataccagtgtggggaatatactgggatctcttatcgccgggtactgggtgagcacctgctggggcctgagttttgtcgtcccaggggccatagtagctgcaatgggaatcgtgtgctttctgttcctgattgagcaccccaacgacgtgcggtgctccagtacattagtgacccacagtaaaggctacgaaaacgggactaacagattgagactccagaagcaaatactgaaaagcgagaaaaataagcctctggatccggaaatgcaatgcctcctcttgtcagacggcaagggatccatccatcccaatcatgttgtgatcctcccaggcgatggggggtccggcaccgctgcgattagttttacgggcgcacttaagatcccaggcgtaatagagttcagtctgtgtctcctgttcgcaaaactggtgtcttacaccttccttttctggcttcccctctatataacgaacgtggaccacctggatgccaaaaaagctggtgagctgtctactctcttcgacgtcggcggcatctttggcggaatcctcgcaggggtgatcagtgacaggctcgagaagcgcgctagtacttgcggcctgatgttgctcctggccgcacccaccctgtacattttttccactgtgtcaaaaatgggcttggaagccacgatcgctatgctgttactcagcggcgctctggtttcggggccttataccctaattacaaccgctgtcagcgcagacctgggcacgcacaaatccctcaagggcaatgctcatgccctgtcaacagtgacagctatcatcgacgggacaggcagcgttggcgcagccctgggcccactactggccggcctcctgtccccatcgggctggagtaatgtgttttatatgctcatgtttgccgatgcatgcgctctgctctttctcatccgcctcattcacaaggagttgagctgtcccggaagcgctactggcgaccaggtgcccttcaaggagcagtag

SEQ ID NO: 135317 - DNA, 57 bp, synthetic construct
  misc_feature 1..57: note = Description of Artificial Sequence: Synthetic coding sequence
  source 1..57: mol_type = other DNA
atggctaggctccccgccggcatcaggttcatcatctcctttagcagggaccaatag

SEQ ID NO: 135318 - DNA, 57 bp, synthetic construct
  misc_feature 1..57: note = Description of Artificial Sequence: Synthetic coding sequence
  source 1..57: mol_type = other DNA
atggcaagactgcccgctggcattaggtttattatctcattctcccgggatcaatag

SEQ ID NO: 135319 - DNA, 1464 bp, synthetic construct
  misc_feature 1..1464: note = Description of Artificial Sequence: Synthetic coding sequence
  source 1..1464: mol_type = other DNA
atgatgcactttaaaagcggtttagagctgaccgagctccagaacatgacggtgcccgaggacgacaacattagcaatgactctaacgacttcactgaggtagagaatggccagatcaacagcaagtttattagcgatagggaatcacggcggtccctcactaatagccacctggagaagaagaagtgcgacgaatacatccccgggaccacttcgctcggaatgtccgtcttcaacttgtccaacgccatcatgggctctgggatcctcgggctggcatttgcgctggccaacaccggcattctactgtttttggtgcttttgactagcgtgacattgctgagtatatattctattaacctgctcctgatttgctctaaagaaactgggtgtatggtctatgagaagctcggggagcaggtcttcggtacgaccggtaagtttgtgatctttggagctacctcactgcagaataccggcgccatgctgagttacctgtttatcgtgaagaacgagttaccaagtgccattaagtttttgatgggtaaagaagagaccttttcagcttggtacgtggatggaagggtgctggttgtcattgtgacattcggcatcattctgccattgtgcctactcaagaacctgggttatctggggtatacgagcgggttctcattgagctgcatggtgttttttctgatcgttgtgatttataagaagtttcagatcccctgcatcgtgcccgagttaaactccaccatttccgctaattccacgaatgccgacacttgtactcctaaatacgtgacatttaactccaagacagtatatgctcttccaacaatcgcctttgcatttgtgtgtcacccgtcagtgctgcccatttatagtgagctaaaagataggagtcagaagaaaatgcaaatggtgtcaaatattagcttttttgctatgttcgtgatgtatttcctgacggcaatttttgggtacttgaccttttatgacaacgttcagtccgatcttctccacaagtaccagtctaaggatgatattctgatcttgactgtcagattggccgtgattgtggccgtaattctcactgttcccgtgctattttttaccgtgcgctcgtcacttttcgagctggcgaaaaagactaagttcaatctttgtcggcatactgtcgttacatgcattctgctagtagtgattaacctgctggtcattttcattcccagcatgaaggacattttcggcgtcgtcggggtcacaagtgctaatatgctgatctttattctgccaagctccttatacttgaaaatcaccgaccaggacggggataagggcacacagcggatctgggctgcccttttcctaggcctcggcgtactgttttccctagtgtcaatcccacttgtgatctatgattgggcatgctcatctagctccgatgagggacattag

SEQ ID NO: 135320 - DNA, 1464 bp, synthetic construct
  misc_feature 1..1464: note = Description of Artificial Sequence: Synthetic coding sequence
  source 1..1464: mol_type = other DNA
atgatgcattttaagagcggcttagagttgacagagctgcaaaacatgactgtgcctgaagacgataatatcagcaatgacagcaacgatttcacagaagtcgagaatggccaaatcaattctaaatttatcagtgacagagagagtcgacgttccctgacaaactctcacctggagaaaaagaagtgcgatgagtacattccagggacaacttccttgggaatgtcagtctttaacctcagcaacgccattatgggttcagggattctgggcctggcttttgccctggccaataccggcatcctgctattcctagtcctcttgaccagcgtaaccttgctcagtatctactcaattaacctccttcttatatgctctaaagaaacaggttgcatggtctatgagaagctcggggagcaggtgttcggcacaactgggaagttcgttatttttggggcgacatccctccaaaacacaggcgcaatgttatcttacctgttcatcgtgaaaaacgagctgcctagtgccattaaatttctgatggggaaggaggagaccttctcagcctggtacgtcgatggaagggtgctggttgtgatagtcactttcggcatcatccttcccctgtgcctattgaaaaacctcggatacctcggatacacctctggcttcagcttgtcctgcatggtgttctttctcatcgtggtaatttacaagaagtttcagataccttgcattgtccctgaactcaacagcaccatttctgcaaactctacaaatgctgacacctgtacccccaagtatgtgacattcaatagcaaaacggtttacgccctgcccacaatcgcgtttgctttcgtctgtcatccgtctgttttgccaatctactcagagcttaaggataggtctcagaagaaaatgcagatggtctccaatattagctttttcgccatgtttgtgatgtattttctcactgctatctttggctacctgactttctatgacaatgttcagtctgacctcctgcataagtaccagagcaaagacgacatcttgatcctgactgtcagactcgctgttattgtggctgtcattttaacggtccctgtgctgttcttcacagtgcgctcctcactgttcgagttagctaagaagactaaattcaatctgtgtaggcacacagtggtgacttgcatcctgctcgtagtgatcaatctacttgtcatctttatcccgtccatgaaagacatttttggggtcgttggggtaacaagcgcgaatatgttgattttcatattaccttcatctttgtacctgaagatcacggatcaggacggcgataagggtacacagcggatctgggctgctctgttcttgggtttgggagtgctcttttcccttgtgagtatcccactggtgatatacgactgggcttgtagctcttcatcagatgaaggacactag

SEQ ID NO: 135321 - DNA, 1464 bp, synthetic construct
  misc_feature 1..1464: note = Description of Artificial Sequence: Synthetic coding sequence
  source 1..1464: mol_type = other DNA
atgatgcatttcaagagtgggcttgaacttactgagctccagaacatgactgttcctgaagacgataatatcagtaacgattctaacgattttaccgaagtggagaatggccagatcaacagcaagtttatctccgatcgagagtcccgcaggtcactgacgaactcacatttagagaaaaagaaatgcgatgagtatattccgggaacaacatctttggggatgtctgttttcaacctgagcaacgcaataatggggagcggaatcctcggcttggcctttgctctggccaacacaggtattttgctgttcctggtgttactgacctcggtgaccctcctgtccatctattctataaatctccttctcatctgctccaaagagaccggctgtatggtctacgaaaaactgggcgaacaggtgttcggtactaccggaaaatttgtgatctttggtgctacatccctccaaaacaccggggctatgctttcataccttttcatcgtgaaaaatgaactacccagtgcaatcaagtttctgatggggaaagaggaaacgttttccgcctggtatgtggacgggagagtactggtggttatcgtaacatttggtataatccttccgctttgtctactcaagaacctgggttacttggggtatacatccggatttagtctttcgtgcatggtgtttttcctgatcgtcgtgatctacaagaaatttcagatcccttgtatcgtacctgagctcaacagcactatctccgccaatagcactaacgctgatacttgcacacctaagtatgtaacgttcaatagtaaaacggtttatgccttgccaaccatcgctttcgcctttgtatgtcaccccagtgtgctgccgatctattctgaactgaaagataggagccagaagaagatgcaaatggtgtccaatatatcctttttcgctatgtttgtgatgtacttcttgacagccattttcggctacctgacattctatgacaacgtccaaagcgatctgcttcacaaatatcagtctaaggacgacatcctaatattaacggtgcgcttagcggttatcgtcgccgtcattctgaccgtgccagtacttttcttcaccgttaggtcatcgttgtttgaactcgctaagaagaccaagtttaatctctgcaggcatacggtggtcacttgtatcctcctagtggttattaatctgctggtcatttttatcccctcaatgaaagacatcttcggtgtcgtgggcgttactagcgccaatatgctgatcttcatacttccgtctagcctgtacctcaagattactgatcaggatggtgacaaaggcacccagcgcatctgggcagcattgtttctcggccttggcgtgctttttagtcttgtgtctattccactggtaatttacgactgggcatgttcttcctcctccgatgaagggcactag

SEQ ID NO: 135322 - DNA, 1464 bp, synthetic construct
  misc_feature 1..1464: note = Description of Artificial Sequence: Synthetic coding sequence
  source 1..1464: mol_type = other DNA
atgatgcatttcaagagtggcttggaactaaccgaattacagaacatgaccgttcctgaagatgacaatatatctaacgatagcaatgacttcacggaggtcgagaatggccaaattaactccaagtttattagcgaccgcgaaagtagaagaagtctgacaaacagtcacctcgagaaaaagaagtgcgacgaatacatccccggtaccacttccttgggaatgagcgttttcaatctgagtaacgcaatcatgggttccggtattctcggacttgcatttgccctagctaatacagggatcctgctgtttttggtattgctgacctctgtgacgctgctgtcaatttattctatcaacttactcctaatctgcagcaaagaaacaggatgcatggtgtatgagaagcttggtgagcaggtctttggaacgacaggcaaattcgtgattttcggagccacatctctccagaacaccggggcaatgctcagctatcttttcatcgtgaagaatgaacttccaagcgcgatcaaattcctgatggggaaggaggaaactttctccgcatggtacgttgatggtcgcgtgttagtggttatcgtcacgtttggtatcattctgcctttatgcttactgaagaatctcggatatctgggttatacaagcggattctcccttagctgcatggttttcttcctaatcgtggtgatctacaaaaaatttcagataccctgtattgttccagagttgaattcaacaataagtgccaatagtacaaacgctgatacgtgtacccctaagtatgtgaccttcaacagtaaaaccgtatacgccctaccaacaattgcttttgccttcgtttgccatcccagcgtccttcctatttactcggagttgaaggaccggtctcagaagaagatgcaaatggtaagcaacatctcttttttcgccatgttcgtgatgtattttcttaccgccatcttcggatatctgacgttttacgataacgtacaatcagatctgctgcacaaatatcagtccaaggatgatatcctgatcttgacagtcaggcttgctgtcatagtcgccgtcatcctcaccgtccccgtgctcttcttcactgtgcggagcagcttgttcgaactagcaaaaaaaaccaagttcaatctgtgccggcacacagtggtgacttgtatacttttagtggttatcaatctgttagtcatcttcataccgtctatgaaagacatctttggcgtagttggcgtaacctctgctaacatgctgattttcattctgccgtcttctctatatctgaaaattaccgatcaggacggagacaagggcacacaacggatatgggcagccctatttctaggcctgggagtgctattctcccttgtcagtattccgctagtcatatacgattgggcctgttcatcatcatcagacgaggggcattag

SEQ ID NO: 135323 - DNA, 1521 bp, synthetic construct
  misc_feature 1..1521: note = Description of Artificial Sequence: Synthetic coding sequence
  source 1..1521: mol_type = other DNA
atgaaaaaagctgagatgggaagattcagcatatcacctgacgaggattcctcgtcatattcaagcaattcagattttaattatagctatcctaccaagcaagctgcacttaagagccactatgcagacgtggatcctgagaatcagaacttcctgttggaaagtaacctgggcaaaaaaaagtacgagacagaatttcacccaggcaccacttcctttggtatgagtgtcttcaatctcagcaacgccatcgtcgggagcggcatactcgggttgtcttatgccatggccaatacaggcatcgctttatttattattttactgacctttgtttctattttttcattgtatagtgtgcatttgctcctaaaaacggccaatgaaggagggtctcttctgtatgaacagttgggatacaaagcctttgggctggtcggtaagctcgccgcctcgggctctattactatgcaaaacatcggcgccatgtcgagctatttgtttatcgtgaaatacgagttaccccttgttatccaggcgctcaccaacatcgaggataaaacagggctgtggtatctgaacgggaactatcttgttctcctggtgtctctggtcgttatactgcctctctctctgtttcgcaacttgggatacttgggttatacctccgggctgtccctcctgtgtatggtgttcttcctgatcgtggtgatctgtaagaagttccaggtgccctgtcctgtggaagcagcactgatcattaacgagaccatcaataccacccttacccagccgaccgccctggtccccgcactgagccacaacgtgactgagaatgacagttgccgaccgcactatttcatctttaactcacagaccgtgtatgctgtgccaatcctcatattttcctttgtatgtcatcctgcagtcctgcctatttacgaggaactcaaggaccgcagtaggaggaggatgatgaatgtctctaagatctccttcttcgcgatgttcctaatgtatttattggctgctctgtttggctacctgaccttctacgagcatgtggagagcgagttgctccatacgtacagctccatcctgggcactgacatactgctgcttatcgtcaggctagccgtgctgatggccgtgactctgactgtcccagtcgtgatctttcctatccggagttccgtcactcatttactgtgcgccagtaaggactttagttggtggaggcactcactgattactgtatccatccttgcgtttacaaatcttctggtcatcttcgtgcccaccatccgggacatttttggattcattggggcctctgctgcaagcatgttaatttttatcctgccctccgctttttatatcaagctggtcaagaaggagccaatgaaatccgtccagaaaatcggtgccctcttctttctcctctctggggttctggtgatgaccggctctatggccttgatcgtcctggattgggtccataacgcaccaggcgggggccattag

SEQ ID NO: 135324 - DNA, 1644 bp, synthetic construct
  misc_feature 1..1644: note = Description of Artificial Sequence: Synthetic coding sequence
  source 1..1644: mol_type = other DNA
atggatcccatggaactcagaaatgttaacatcgagcctgacgatgagagttctagcggggaaagcgccccagattcttacatcggcatagggaactctgagaaggccgcgatgtccagccagtttgcaaatgaggataccgagagtcagaagttcctgaccaatgggttccttggtaaaaagaagctggctgattacgcagacgagcatcaccccggcacaacctcatttggtatgagttcattcaatctaagcaacgccatcatggggtcgggaattctgggactgagctatgctatggctaacaccggtatcatcctcttcataatcatgctcctggccgttgccatactgtccctgtactccgtacatctgctgctgaaaaccgctaaggagggtgggagtctgatctacgaaaagctcggtgagaaggctttcggctggcctgggaagattggggcgtttgtgtctattacaatgcaaaacataggcgctatgtcaagctacttgttcataattaagtacgaactgcctgaggtgatacgggcgtttatggggctggaggaaaacacgggggagtggtatcttaacggaaactacctgatcattttcgtctctgtgggaattatcctgccactgtccctgctcaagaacctgggttacctgggctatactagcgggttttctctgacctgtatggtgtttttcgtgtctgtcgtcatttataaaaagttccaaattccctgtcctctgcctgtccttgatcactctgtgggaaatctttcctttaataacaccctcccaatgcacgtggtcatgttgccaaacaattccgaatcatccgatgtgaacttcatgatggactatacacatagaaacccggctggccttgatgagaaccaggctaaaggtagcctgcacgattcaggtgtggagtatgaggcacactctgatgataagtgcgagcctaagtacttcgtgttcaattctaggacagcatatgccataccaatactcgtgtttgccttcgtctgtcaccccgaagtcctgcctatctattctgaactcaaagacaggtcaaggcggaagatgcaaactgtgtcaaatattagcattaccggcatgctcgtcatgtatctgctggccgcattgtttggttatctcacgttctatggcgaagtggaagatgagctgcttcatgcctattccaaggtgtataccctggatatcccactcctgatggtgaggctggcagtgctggtggcagtaaccttgaccgtgcccattgtactcttcccaattagaacgtctgtgatcactctgcttttccctaagagaccattctcttggatccggcacttcctgattgccgctgtgctcatcgccctgaacaatgtcctggtgatactggttccaactatcaaatatatcttcggattcattggcgcctcatctgctaccatgctgatttttattctgcccgcagtgttttatctgaagttggtcaaaaaggagacctttagatctccccagaaagtgggagctcttatatttcttgtcgtgggtattttctttatgattggcagcatggccttgattatcatagattggatatacgacccgcctaatagtaagcatcactag

SEQ ID NO: 135325 - DNA, 780 bp, synthetic construct
  misc_feature 1..780: note = Description of Artificial Sequence: Synthetic coding sequence
  source 1..780: mol_type = other DNA
atggatcctatggagctgaggaacgtgaatattgagcctgacgacgagtctagctccggggaaagcgcacctgactcttatatcggaattggaaactccgaaaaagctgcaatgagctcccagttcgctaatgaggataccgaatcccagaaatttcttacaaacggattcttaggaaaaaagaagttggcagactacgctgacgagcaccaccctggtacaacctctttcgggatgagcagtttcaacctcagcaacgccattatggggtcgggtatcctcggcctctcttatgccatggcgaacacaggtatcatcctgttcatcattatgttgctcgccgtcgcaatcctgagtctctactcggtgcacctgctccttaaaacagcaaaagagggagggtctctgatttacgagaagcttggtgagaaagcctttggctggccagggaagatcggtgcttttgtgtccattacaatgcagaatatcggggctatgtccagctacctgtttattataaaatacgagctccccgaggtcattagagccttcatgggcctggaggagaacaccggggaatggtacctgaatggaaactacctcatcattttcgttagtgtagggattatcttaccactcagcctcttgaaaaacctgggttatcttggatatacatccggattcagtttaacgtgtatggtgttttttgtcagtgtaatgatatataagaagatcagtttctttcttcaaatctttatcattctcaagctgtttttctag

SEQ ID NO: 135326 - DNA, 1644 bp, synthetic construct
  misc_feature 1..1644: note = Description of Artificial Sequence: Synthetic coding sequence
  source 1..1644: mol_type = other DNA
atggatcctatggagctgagaaacgtcaacatcgagcccgatgacgagagcagctcaggagagtctgcccccgacagctatataggtataggtaactcagagaaggccgccatgagtagccaattcgccaacgaagacacagagtcccaaaaatttttaacaaatggcttcttgggaaaaaaaaagctggccgactacgcggatgaacaccaccctggcacgaccagttttggtatgagcagctttaatctcagtaacgccattatgggaagcggaattttgggcctgagttacgcaatggccaacaccggcatcattttgttcattatcatgttgctggccgtggccattctgtccctgtactccgtacacttgttgttaaagactgctaaagagggcggatccctcatctatgagaagttgggagagaaggctttcggttggccgggaaagatcggcgcattcgtttcaattactatgcagaacatcggggctatgtcctcttacctgttcatcattaagtatgaacttcccgaggtcatccgggcttttatggggctggaagagaatacgggagagtggtatctgaacggcaattaccttattatttttgtgtctgtcgggatcattctgcctcttagcctccttaagaacttagggtacttaggatacactagcggcttctcgctcacctgcatggtgttttttgtcagcgtcgtgatttataaaaagttccagattccttgccctcttcctgtgctggaccactctgtcggaaatttgtcttttaataacaccttgccaatgcatgtggtgatgctgcccaacaactcggagtcaagcgacgtgaattttatgatggattacactcaccgcaaccccgctggcctggacgaaaaccaggcaaaagggtctcttcacgattccggagtcgaatacgaggcacactccgacgacaaatgtgaacctaagtatttcgtattcaacagtcgcactgcttacgcaatccctattctggtgtttgcttttgtgtgccaccccgaggtactcccgatctattcagagttgaaggatagaagccgacggaaaatgcagacagtcagtaacatctcgataactggaatgctggtaatgtatctactggcagccctgttcggctacctcacattctatggcgaggtagaagacgaattgctgcacgcctactctaaagtgtacacgttggatattcccctgctcatggtaagattggctgtccttgtggcagttacgctcactgtccccatcgttctcttccccattagaacctctgtgataaccctcctgttccccaagaggccttttagctggattagacacttcttgattgccgccgtgctgatagcgcttaacaacgtcttagtaatactcgtgcctactattaagtacatctttggtttcatcggagcatctagcgcaactatgctgatctttattctgcctgctgtgttctatcttaaactcgttaaaaaggagaccttccgatctccacagaaggtgggtgccctaattttcttggttgtagggatcttcttcatgataggcagtatggccctgataatcatagactggatatatgacccacccaatagcaaacaccactag

SEQ ID NO: 135327 - DNA, 579 bp, synthetic construct
  misc_feature 1..579: note = Description of Artificial Sequence: Synthetic coding sequence
  source 1..579: mol_type = other DNA
atggacccaatggagctccggaacgtaaacatcgagcccgatgatgaaagcagcagcggagagtcagcgccagacagctacataggtatcggcaattcagagaaggctgccatgtcttcacagttcgctaacgaggatacagaaagtcagaaattcctgaccaacggattcctcggcaaaaagaagttagctgactatgcagatgagcaccaccctggaactacttcgtttggcatgagctcctttaatttatctaatgctatcatgggatccggaatactgggtctaagttacgccatggccaatactgggattatcctgttcatcattatgctgctcgccgtcgctattctgtccttgtactcagttcatttactgctgaaaacggctaaggagggaggttcgctaatttacgaaaaattgggcgaaaaggcctttggctggcctggaaaaatcggcgcatttgtctcgattacgatgcaaaacattggagctatgagctcctatctgtttattattaaatacgagttgcctgaggtgattagagcttttatgggattggaagaaaatacaggttag

SEQ ID NO: 135328 - DNA, 660 bp, synthetic construct
  misc_feature 1..660: note = Description of Artificial Sequence: Synthetic coding sequence
  source 1..660: mol_type = other DNA
atggatccgatggagctgcggaatgtgaacatcgagcctgacgacgagtcctccagtggcgaatcggcacccgactcatacatcgggatcgggaattctgagaaagccgcgatgtcttcccaattcgctaatgaagacactgaatctcagaaattcctcaccaatgggtttctgggcaagaagaagctcgccgattacgcggacgagcaccatccaggtaccactagcttcggcatgtcttcttttaatctgtcgaatgccattatggggagtggaattttgggcctcagttatgcaatggctaataccggcattatcctcttcatcatcatgctgctggccgtggcaatcctcagcctatacagtgtgcacctgctactcaaaaccgctaaggagggtggctccttgatttatgaaaaactgggcgagaaggcgttcggttggcctggaaaaatcggagctttcgtgagcatcacaatgcagaatattggcgccatgtcttcctatttgttcatcattaaatacgaattacccgaagtaattagggcattcatgggccttgaagaaaacaccggtgagtggtacctgaacggaaattacctcattatctttgtgagcgttggcattattctcccactttctctgttaaaaaacctctag

SEQ ID NO: 135329 - DNA, 1419 bp, synthetic construct
  misc_feature 1..1419: note = Description of Artificial Sequence: Synthetic coding sequence
  source 1..1419: mol_type = other DNA
atggagttgcaggaccctaagatgaatggagctcttcctagcgatgccgtgggttaccgccaggagagggagggattcctgcctagccgcggtccagcccccgggagcaaacccgttcaattcatggactttgaaggtaaaacttcttttggtatgtcagtgtttaaccttagtaatgctatcatggggagcggtattctcggactggcatatgctatggcccacactggggtgatttttttcctggctcttctcctgtgcatagctctcctaagcagctactcaatccatttgctgttgacgtgcgcggggatcgccggcattcgggcttacgagcagttaggccagagagccttcggacctgcggggaaggttgtagtggccacagtcatctgcctgcataacgtcggggccatgtcttcctacctgtttatcataaagtccgagctacctctggtaattggcaccttcctctacatggacccggaaggagactggtttctgaagggaaacctgctgattattatcgtcagcgttctaatcattctgcctctggcgttaatgaagcacctgggatacctcggttacacatcagggctttccctcacctgcatgttattcttcctcgtgagcgttatatacaagaaatttcagctcggttgcgccataggccataacgagacggccatggagtcggaggctctggtgggactcccatctcagggccttaacagctcttgtgaggcacagatgttcactgttgactctcagatgtcatacaccgtgcctatcatggccttcgcttttgtgtgccaccctgaggtcctccccatatacacagaactgtgccgcccttccaagcggcggatgcaggctgtggctaatgtttccattggagctatgttttgtatgtatggactcacagcgaccttcgggtatctgacattttactcttccgtcaaagcggaaatgttacatatgtattcacagaaggatcccctgatactctgcgtgaggctcgcagttcttttggcggtgaccctgactgttcccgttgtgctttttcccatccgccgggcgctgcagcagttgctgtttcctggaaaagcgttcagctggccgcgccacgtcgcgatcgccctcatactgctcgttctggtcaacgtgctggtaatttgtgtaccaactattcgtgatatctttggggtcatcgggtcaacttccgctccatccttgattttcattttgccatccattttctacctgcgcatagtgccgtctgaggtggagcctttcctgtcttggccaaaaattcaggccctgtgctttggggtcctgggagttctattcatggctgttagtcttggatttatgttcgcaaactgggctaccggccagagccgcatgagcggccactag

SEQ ID NO: 135330 - DNA, 1266 bp, synthetic construct
  misc_feature 1..1266: note = Description of Artificial Sequence: Synthetic coding sequence
  source 1..1266: mol_type = other DNA
atgtccgtgtttaatctgtcgaacgcaataatgggtagcggaatattaggcctggcctatgccatggcccacactggggtcatattttttctcgcccttcttctctgcatcgccttactgtcctcttactctatccacctgcttctgacctgcgcgggtattgccggcatccgcgcttatgagcagctaggccaaagagcctttggccctgccgggaaggtagtggtcgccactgtcatctgtctacacaatgtaggagccatgtcttcttacctattcattatcaaatccgagcttcccctcgtgatcggaactttcctgtacatggaccctgagggggattggtttctgaagggaaacctcctgattatcatcgtgagtgtccttatcattctgcctctcgccttgatgaagcatctgggatatctcggctacacttcaggcctgtccctaacgtgcatgctcttttttctggtgtctgtcatctataagaaattccagctgggctgcgccatcggtcataatgagaccgctatggagtccgaggccttagtgggtctcccgagccagggactcaacagctcctgtgaagcacagatgttcacagtggactcccagatgtcgtatacagtcccgatcatggcgttcgcattcgtgtgccatccggaagttctgcctatatatactgagttgtgccgtccttcgaaacgacgaatgcaggctgtcgccaatgtgagcatcggggcaatgttttgtatgtacggtcttacagctactttcggctacttaactttctactcctccgtgaaagcagagatgctgcacatgtattcccagaaagatccactgatactctgcgtacgtctggccgtcttgctcgccgtgactttgaccgtgccagtggtgctgttccctataaggcgagctctgcaacagctccttttcccgggcaaggcattttcttggcctaggcacgtggccatagcgctgatccttctggtgttggttaatgtactggtgatttgcgtgcctacaattagagacatcttcggcgtcataggatccaccagtgccccatctctcatcttcattctgcctagtatcttctacttacgaatagtgccttcagaggtggagccatttttaagttggcccaagatccaagctctctgctttggcgtgcttggggtgctgttcatggccgtttcattaggctttatgttcgcgaactgggccaccggacagtctcggatgagtggacattag

SEQ ID NO: 135331 - DNA, 1419 bp, synthetic construct
  misc_feature 1..1419: note = Description of Artificial Sequence: Synthetic coding sequence
  source 1..1419: mol_type = other DNA
atggagctgcaggatccaaagatgaacggggcactgccctcggacgccgtggggtatcgccaggaaagagaaggctttctcccctctcgaggacccgcgccaggatcgaagcctgtccagtttatggattttgaaggaaagactagttttgggatgtcggtcttcaatttatctaatgcaattatgggctcgggtattttgggtctcgcctatgctatggcacacactggagtgatctttttcctcgctctactcctctgtatcgcgttgctgtcatcctatagcatccatctcttactgacatgtgctggaatcgcaggaattagggcctacgaacagctgggacagagggcctttggacctgcgggaaaggtggtcgtagctactgtgatctgcctccataacgttggggccatgagttcctacctgttcattatcaagtccgagctccctcttgtgatcggtacattcttgtacatggatccggaaggagattggttccttaaagggaatcttctcattatcattgtgtctgtgctgatcattctccctcttgccttaatgaagcacctgggttacctggggtatacaagcggcctctcattgacctgcatgctgttttttttggtcagcgtgatctataaaaagtttcaactggggtgtgctatagggcataatgagactgccatggagagtgaagcccttgtgggtcttccatctcaaggactgaatagttcttgcgaggctcaaatgtttaccgtggatagtcagatgtcctatactgttcccataatggcattcgcatttgtatgtcatccagaggttttaccaatctacaccgagctatgtagaccatcgaaacggcggatgcaggccgtggccaacgtcagcatcggtgccatgttttgcatgtacggcttgacagccacctttggttatctgacattttattcaagtgtgaaagccgagatgctccatatgtactctcagaaagatcctttaatactctgtgtccgcctggccgtcctactagcagtcacactcacggtgcccgtcgttctttttccaatcagacgggctctccaacagcttctgtttcccggcaaggcgttctcgtggccccgtcacgtggctattgccttgatactgttggtccttgtgaacgtgctggtcatttgtgttcctaccatcagagatatttttggtgtcatcggaagcacatccgcaccgtccctgatcttcattctgccctcgatattttatctcaggattgtaccatcggaggtcgagcctttcctgtcttggcccaaaattcaggctttgtgcttcggcgtgctaggcgtcctgttcatggccgtgtccttaggctttatgttcgcaaactgggccactggtcagtcaagaatgagtggacattag

SEQ ID NO: 135332 - DNA, 660 bp, synthetic construct
  misc_feature 1..660: note = Description of Artificial Sequence: Synthetic coding sequence
  source 1..660: mol_type = other DNA
atggagctccaggatcccaagatgaatggcgccctgccttcagatgcagtgggctatagacaagaacgtgagggcttcctcccttctaggggtccagcaccgggctcaaagcccgtgcaatttatggatttcgagggcaaaacatccttcggcatgagcgtattcaacctgagcaacgccatcatgggtagcgggatcttgggactggcttacgctatggctcataccggtgttatcttctttctggcgctcctgctctgcatcgccctgctctcttcttactcgatccatctgctgctgacatgtgccggcatagccggtattagggcttacgagcagctggggcagagggcttttggaccagccgggaaagtcgtggttgccactgtcatctgtctccacaacgttggcgcaatgagcagttacctgttcattatcaagtctgagctgcccctggtcatcggaacctttctttacatggacccagaaggggactggttcctgaagggcaacttgctcattataatcgttagcgtgctgatcatcttaccattggctcttatgaaacatttaggttatctgggatatacctctggtcttagtctgacctgtatgctcttcttcttagttagcgtcatttacaaaaagttccagctgtag

SEQ ID NO: 135333 - DNA, 576 bp, synthetic construct
  misc_feature 1..576: note = Description of Artificial Sequence: Synthetic coding sequence
  source 1..576: mol_type = other DNA
atggaacttcaagacccaaaaatgaacggggctttaccgtccgacgccgtggggtaccgccaagaaagggaaggctttctcccgtcaagggggcctgctccaggatctaaaccagtgcaattcatggatttcgagggtaaaacctctttcggcatgtcagtttttaacctgagcaatgcgatcatgggatctggcatcctcgggttggcctatgccatggcccataccggcgtgatctttttccttgccctgctcctctgtattgcgcttctgagttcctattctatccacttgctgttgacatgtgcaggaatcgccggcatcagggcttacgaacaactgggtcagagagccttcgggccagccggtaaagtggttgttgcaactgtcatctgtctgcacaatgtgggggcgatgtccagctatttattcattataaagtcagaactgccgctcgtcatcgggactttcctgtacatggatccagagggggactggttcctcaaaggcaaccttctcataataatcgtatccgtcctgattatcctacctctagcccttatgaagcatctctag

SEQ ID NO: 135334 - DNA, 495 bp, synthetic construct
  misc_feature 1..495: note = Description of Artificial Sequence: Synthetic coding sequence
  source 1..495: mol_type = other DNA
atggagctgcaagatccaaagatgaatggcgccctgccttcggatgccgtcggctatagacaggagcgagagggattcctaccctctcgagggcccgctccaggttctaagcctgtgcagtttatggattttgaaggcaaaacaagcttcggcatgtctgtgttcaacctaagcaacgctatcatgggcagcggcattcttgggctcgcttacgccatggcccacaccggggtaatattctttctcgccctgctcctctgcatagccctcctgtccagttattcaatccacctcttactgacatgtgccggaattgccggtatcagggcctacgaacagctggggcaaagggcgttcggccctgccggcaaagtggtagtggctaccgtgatttgccttcacaatgtcggagccatgagctcgtatctatttattatcaagagtgagttgcctctagtgattggaactttcctgtatatggaccccgaagggtag

SEQ ID NO: 135335 - DNA, 840 bp, synthetic construct
  misc_feature 1..840: note = Description of Artificial Sequence: Synthetic coding sequence
  source 1..840: mol_type = other DNA
atggagttgcaagacccaaaaatgaatggcgcactgccatccgatgccgttggatataggcaagagagggagggattcctgccaagtcggggacccgctcccggcagcaaacctgttcagtttatggatttcgaaggcaagacctccttcggcatgtcagtgtttaatctgtccaatgcgatcatgggctccggaatactgggcttagcatatgcgatggcccacacaggcgtaattttcttcctggcccttttgctatgtattgcactccttagctcatactccatccatctgctcctgacatgtgctggaatcgccgggatcagagcgtatgagcagctcgggcaaagggcttttggacccgcaggcaaggtggtggtggccacagtgatctgcttgcacaacgtgggggctatgtcttcttatcttttcatcattaagtctgagctacctctggtcataggaacttttttgtacatggaccccgagggcgactggtttctcaagggcaaccttctgataatcattgtgtccgttctgattatcctcccattggcactcatgaaacacctggggtatctgggctacacaagtgggctaagcctcacttgtatgcttttctttctggtgagtgtaatctacaagaaatttcagttgggctgtgcaattggacacaatgagacggctatggagtcggaggctctggttggcctgccttcacaaggtctcaattcaagctgcgaagcacagatgttcactgtagatagtcaaatgtcttacactgtcccaatcatggcattcgcattcgtctgccatccagaagtccttccaatttattag

SEQ ID NO: 135336 - DNA, 819 bp, synthetic construct
  misc_feature 1..819: note = Description of Artificial Sequence: Synthetic coding sequence
  source 1..819: mol_type = other DNA
atggaactgcaagatcctaagatgaatggcgcactgccctctgatgcggtaggctacaggcaagagcgggaggggtttcttcccagtcgcggccccgctcctggctccaaacccgtgcagtttatggatttcgagggcaaaacctcttttggtatgtcagtttttaatctgtcaaacgccattatgggctccggaatacttgggctggcatatgcaatggcacatacaggcgtgatattcttcctcgccctcctattatgtattgcgctcctcagctcctactcaatccatctgttgctcacttgtgcaggtattgctggaatacgagcctatgagcaactggggcaaagagcatttggccctgccgggaaggttgtggtggcaactgtaatctgtttacataatgtaggtgctatgtcttcttatctgttcatcataaaatcggagctgcctctggtcattgggaccttcctctacatggaccccgaaggagattggtttttgaagggcaacctgctaattattatcgtgtctgttctgattatcctaccactagctctcatgaaacacttggggtaccttggatatacgagtggactgtcactaacatgtatgttattcttcctcgtgtccgtgatctacaagaaattccaactggggtgtgctataggacataacgaaacagccatggagagtgaagctctggtgggcctcccaagccaggggcttaacagcagctgtgaggcccagatgttcaccgtcgacagccagatgtcttatacagtaccgataatggccttcgcatttgtttgccactag

SEQ ID NO: 135337 - DNA, 1422 bp, synthetic construct
  misc_feature 1..1422: note = Description of Artificial Sequence: Synthetic coding sequence
  source 1..1422: mol_type = other DNA
atggcaacccaagccaaacgacctcgcgtggctggaccagttgacggcggagacctcgatcccgtcgcctgttttctctcctggtgccggagagtcggcctcgaactgtccccaaaagtaagcgagcgcgcgggggggagacgcacaaggggcggcgcccgagccgccctgacctctccaccagcccaggtcgctgtcagtcgtcagggaacagttgccggatatggcatggtcgcacgtgagtctgtgcaagccggggagcttctctttgtagttcctcgggctgcactactttctcagcatacttgcagcatcggcggtttgctggagcgtgaacgagtggcgttgcaaagccagagcggatgggtgccattgcttctcgctctccttcacgagctgcaagctcccgcgtcccggtggaggccgtactttgcgttgtggcccgaactcgggcgtttggagcatcccatgttctggccagaggaggaaaggagatgtttgctccaggggaccggagtgcccgaggctgtagaaaaggacctggccaatattcggagtgagtaccaaagcatcgtgctccccttcatggaagcacatcctgacctgttctcgttaagagtgcgctccctggaactctaccatcagctcgttgccttggtcatggcttattccttccaggaacccttagaggaagaggaagatgaaaaggagccaaattcccccgtgatggtgccagctgccgacatcctgaaccatctcgcaaaccacaacgcaaatctagaatatagcgcaaattgtcttcgcatggtcgcgacacagcctattccaaaaggccatgaaatctttaacacctacggccagatggcaaattggcagctcattcatatgtacggttttgtcgagccctacccagataacaccgatgacactgccgatatccaaatggtcacagtgagggaagcggccttgcagggaacaaaaacagaagccgagcggcatctggtgtacgagcgctgggatttcctgtgcaagcttgaaatggtcggagaggagggagcattcgtcataggacgcgaagaagtattgaccgaggaagaactgactacaaccttgaaggttctctgtatgcccgcagaggaatttcgcgagctgaaagatcaggacggtgggggtgatgacaaacgtgaagagggatcattgaccatcactaatattcccaagctgaaagccagctggagacagttactgcaaaactcagtgctgcttacccttcagacatacgccacggacctgaagacggatcagggtttgctgtctaataaagaagtgtacgcaaagctaagctggcgagaacagcaggctctgcaagtacgctacggacaaaagatgatcctgcatcaactgctggagcttactagctag

SEQ ID NO: 135338 - DNA, 975 bp, synthetic construct
  misc_feature 1..975: note = Description of Artificial Sequence: Synthetic coding sequence
  source 1..975: mol_type = other DNA
atgggcccctggggcgagcctgaacttctggtgtggagacctgaggcggtagcatctgagcctccagtccccgtggggctggaagtcaagcttggcgctctggtgctactgctcgtgctgaccctgctgtgcagtctggtgcccatttgcgtcctccgacggccaggagctaaccacgaagggagcgcatccaggcagaaagctctctctctcgtctcttgttttgctgggggggtctttctggctacctgcttgctggatctcctccctgactatctggccgccattgacgaggctttggccgccctgcatgtgaccttgcaatttccacttcaggagtttatcctggcgatgggtttttttttggtgcttgttatggagcaaattactttggcttataaggagcagagtggaccatccccgcttgaggagacaagggccttactgggcactgttaatggtggcccgcagcattggcatgacgggccaggtgttccccaagcgtccggtgcccctgccacccctagcgccttgcgggcctgcgtgctggtgtttagcctcgcactgcattctgttttcgaaggcctcgccgtcgggttacagcgggatcgggcacgtgctatggaactttgcctagcccttctgctacacaaggggatcctcgcggtgtccttgtcgctacggttgctccaatcccacctgagggcacaggtcgtcgccggatgcggaatattgttttcgtgtatgacaccactgggtatcggtctaggtgccgcactcgcggagtcagctggccccctccaccaacttgcgcagtcagtgctggagggtatggccgctgggacatttctatacattacctttctggagatcctgcctcaagaattggccagttcggagcaacgaatcctgaaggtgatccttctgctcgcaggtttcgcgcttctgactggccttctgttcatccagatttag

SEQ ID NO: 135339 - DNA, 975 bp, synthetic construct
  misc_feature 1..975: note = Description of Artificial Sequence: Synthetic coding sequence
  source 1..975: mol_type = other DNA
atggggccatggggcgagccagaactactggtgtggcgaccagaagccgtggcctctgaacctcccgtgcctgtcgggctcgaggtgaagctgggagccttagtcctgctcctagtcttgactctactgtgttcactagttcccatctgcgtgcttagaaggcctggagcaaaccatgagggatccgcctccagacaaaaagccctcagcctggtctcttgctttgccggtggcgtgtttctggccacatgtctgcttgatctgcttcccgactacctcgctgccattgacgaggcattagcagccctgcacgtgacccttcagtttcctctccaggagtttattctggcaatggggttcttcctagtgctggtgatggagcagatcacactggcctataaggagcagagtggcccatccccactggaggaaacacgtgccttgctgggcactgtgaacggagggccccagcactggcacgatggccctggggttccacaagcgtcaggcgcgccagcaacccccagcgcactgcgcgcctgcgtgctcgtcttctccctggccctccactcagtgtttgagggcctggccgtgggtctgcagcgggacagagcccgggcaatggagttatgtctcgcattgctcttgcataaaggtattttggcagttagtctctccttgcggctcctgcagtcccatctcagggcgcaggtggtagcaggctgcggtattctgttctcttgcatgacccctctgggaattggtctgggcgccgcccttgcagaatccgccggcccactccaccaactggctcagagcgtcctggaggggatggcagccggaaccttcctctacatcaccttcctggagattctgcctcaggagctcgccagctccgaacagcggatacttaaggtcatcctcctgcttgccgggtttgccctgctcaccgggctcttattcattcaaatctag

SEQ ID NO: 135340 - DNA, 975 bp, synthetic construct
  misc_feature 1..975: note = Description of Artificial Sequence: Synthetic coding sequence
  source 1..975: mol_type = other DNA
atgggaccctggggcgaaccagagctgctcgtctggcggcccgaggcggtggcgagcgagcctcccgttccagtcggcctggaggtcaaattgggcgctctggtcctattgctggtgcttaccttactgtgctcactggtcccaatctgcgtgctgcgaaggcctggcgccaatcacgagggaagtgctagcaggcaaaaagcactcagcctggtgtcctgttttgctggaggagtgttcctggctacatgccttcttgacctgctgcccgactacctcgcagcaatcgacgaggctttagcggccttgcacgtgactttacagttccccctccaggagttcattctcgccatgggcttctttttagtgcttgtgatggaacagatcaccctagcctataaagaacagagtggcccttcaccgctggaggaaacgcgcgctttgctgggtactgtcaacggcggcccacagcattggcatgatggcccaggagtcccccaggcatcaggcgcccctgctaccccaagtgcattgcgggcttgcgtgctggttttcagccttgcactgcactcggtgtttgagggattggccgtgggcctccagcgcgatagggcccgcgcgatggagctttgcctggctctgctcctacataagggcatcctcgcagtcagtttatccctgaggctgctgcagtctcatttgcgggctcaggtagtggccggatgtggcatcctgttctcttgcatgacccccctaggaataggcctgggcgcagctctggcagagtccgcaggtcctttgcatcagctggcacaatccgtactggagggcatggccgccgggacctttttatacatcaccttcctggagattctaccacaggagttggcatcctctgagcagcgcattctcaaggtcattctcctgcttgccggatttgctcttctgaccggactgttgtttatccagatttag

SEQ ID NO: 135341 - DNA, 975 bp, synthetic construct
  misc_feature 1..975: note = Description of Artificial Sequence: Synthetic coding sequence
  source 1..975: mol_type = other DNA
atgggaccctggggagaaccagagctgctagtttggcgcccggaagcggtagctagtgagccccccgtgccagtcgggctcgaggtaaagctgggagccctagtactgcttcttgtgttgacgttattatgttctctggtaccgatatgcgtcctacggcggccaggggctaaccatgagggctcagctagtcgccagaaggccctgtcactcgtgtcctgctttgcagggggcgtctttctggccacctgtttactggatttgctgcctgattacctcgcagcaatcgatgaagctctggcagcgcttcacgtgacacttcagttccctcttcaggagtttatcttggccatggggtttttcctggttctggtcatggaacagatcacactcgcgtataaggagcaatccggacccagtcctcttgaggagacgcgcgccctgctagggacagtaaacggtggcccccagcattggcatgacggccccggcgtgcctcaggcaagtggagcgcccgcaactccctcagccctcagggcatgcgtgttggtttttagccttgcattgcactcagtttttgagggactggcagtcgggctgcaacgggaccgcgccagggcaatggaactgtgcctcgctctcctgctacataaaggcattctggctgtgtccctgtccttaaggttactgcagtcacacctaagagcccaggtagtggccggctgcggcatactgttttcttgcatgactcccttaggaatcgggctgggagccgctttggcagagtctgccggacccctgcatcagctcgcacagagcgtgctggaaggaatggccgcaggaactttcctctacatcactttcttggaaattttgccacaggaactggcctcttcagaacagcggattctcaaggtaatcctcctgctcgccggattcgcactgctgacaggcctgctcttcatccagatttag

SEQ ID NO: 135342 - DNA, 723 bp, synthetic construct
  misc_feature 1..723: note = Description of Artificial Sequence: Synthetic coding sequence
  source 1..723: mol_type = other DNA
atggggccctggggggagccagagctcctcgtctggcgtccagaggcagttgccagcgaacctcccgttcctgtagggcttgaggtgaagttaggagcgctggtgttgcttctagtgctcacattgctctgctctttagtacctatttgtgtactccgcaggccaggtgcaaaccacgaaggtagcgccagccgccagaaggcactttccttagtgagttgcttcgctggaggcgtctttctggccacctgcctgcttgacctgctaccagattacctggccgcaattgacgaagccttggcagcgctgcacgtgacccttcagtttcctctgcaggagttcattcttgccatgggattcttcctggtgctggttatggagcagatcacccttgcctacaaggaacagtccgggccttcgcctcttgaggagaccagggcgctcttaggcaccgtgaatggaggcccgcagcactggcatgatgggccaggcgtgccccaggcctctggggctccagccactccgagcgccctgcgtgcctgcgtgctggtcttttctcttgccctacactccgtcttcgaaggtctcgcagtggggctgcagcgcgatagagcacgcgctatggagctgtgtctcgcgcttctgttgcacaaaggcattctcgctgtctctctctcccttagactgctgcagagccacctacgcgcccaggttgtcgcatag

SEQ ID NO: 135343 - DNA, 621 bp, synthetic construct
  misc_feature 1..621: note = Description of Artificial Sequence: Synthetic coding sequence
  source 1..621: mol_type = other DNA
atggggccatggggggaacccgagttgctggtctggcggccagaagcagttgctagcgaacctcccgtcccagtgggactggaggtaaaactcggagcactcgtgctcctcctcgttcttactctcctgtgctctttggtgcctatttgtgtgcttaggcggcccggcgcaaatcatgaggggagcgcttcgcggcagaaggcgctgtcacttgtgtcctgctttgccggaggggtttttttggccacatgtctattggacctgctgccagactacttagcagccatcgatgaagcactcgccgccctgcacgtcactttacagtttcctctgcaggagtttattcttgccatggggttctttctggtgctggtaatggagcagattacactcgcgtacaaggaacaaagtggcccaagtcccttggaggaaacgcgagctctcctggggacagtcaatggtgggccacagcactggcatgacggaccaggggtcccccaggcatccggagcaccagctactccctcagccctgcgcgcctgtgtgctcgtcttctcccttgctctgcacagcgtgttcgaaggactggctgtgggcctgcagcgtgaccgggcccggtag

SEQ ID NO: 135344 - DNA, 966 bp, synthetic construct
  misc_feature 1..966: note = Description of Artificial Sequence: Synthetic coding sequence
  source 1..966: mol_type = other DNA
atggggccctggggcgagccagagcttttagtgtggaggccagaggcggttgctagcgaacctcctgttcctgtgggacttgaggtgaaattgggagccctcgtgctgctgctcgtcttgacactgctctgttctctggtgcccatttgcgtcctacgccgccccggcgctaaccatgagggctccgcgtcccggcagaaggccttgtcacttgtcagttgtttcgctggtggggtattcctggcaacgtgcctgctggatctcctgcccgattacttggctgcaatcgacgaggctctcgcagccctgcatgtcacactgcagtttccacttcaagagtttatcctcgcaatggggttcttcctcgtccttgttatggaacagatcacattggcgtataaagagcagagtggaccatctccattagaggagacacgggccctgctcggaacagtgaacggggggccccagcactggcacgacgggcccggggtcccccaagccagcggcgctcccgccacgccctctgccctgcgggcctgcgtgttggtcttcagcctagctctgcattccgtattcgaggggctcgcagttggcttgcagagggatagggcccgagctatggaactgtgcctcgccctcctgcttcacaaaggtatcctggccgtgtctttgagtttgcgcctgcttcaatcccaccttcgggctcaggtggtcgcggggtgcggtattctgttcagctgcatgactcccttagggattgggcttggcgccgcactcgcagagtctgctgggccattgcatcagctggcgcagagcgtactagagggtatggccgccggcaccttcctgtatatcacgttcctggagattcttccgcaggaactagcctcatctgagcaacgtattctcaaagtgatcctgctgctcgcaggtttcgctctgttgaccggcctgttgttttag

SEQ ID NO: 135345 - DNA, 669 bp, synthetic construct
  misc_feature 1..669: note = Description of Artificial Sequence: Synthetic coding sequence
  source 1..669: mol_type = other DNA
atgaaagcgcagctgcagtttcctctgcaggaattcattcttgccatgggtttctttcttgtgctcgttatggaacagatcaccctcgcatacaaggagcagagcggtccatcaccattggaggagacaagagctcttctgggcaccgttaatggtggcccacaacattggcacgatgggccaggggttccgcaagcctcgggggcaccggctactccgagtgcactgcgcgcttgcgttctggtgttctcgctggcactgcactccgtattcgagggactagctgtgggtctgcaacgggatcgcgctcgcgcaatggaactgtgtctggcactcctgctgcataaaggaattcttgccgtaagcctctccctccggttgctgcagtcacatctgagggcacaggtggtggctgggtgtgggatattgttttcctgcatgacccccctggggattggacttggtgccgccctggcggagagcgccgggcccctgcatcagctagcccagagcgtgttggaaggaatggcagcgggaacttttctgtatatcactttcctcgaaatcctccctcaggagctggcgagctcagaacaacgcattttaaaggtaatcttgctgttggccggctttgcactgctgacagggctccttttcattcagatttag

SEQ ID NO: 135346 - DNA, 942 bp, synthetic construct
  misc_feature 1..942: note = Description of Artificial Sequence: Synthetic coding sequence
  source 1..942: mol_type = other DNA
atgggcccctggggggagccagaattgctagtgtggaggccagaggcagtggccagcgagccaccagtgccagtgggactggtgctgaccttactgtgttctttggtgcctatttgtgttcttaggaggccaggagcaaatcacgaaggcagcgccagtcgccaaaaggcattgtctctggtcagttgcttcgccgggggagtcttcctagcaacatgtctgctggatctgctgccggattacttggcagccatcgacgaggccctggccgcgctccatgtcacgctacagttcccactccaagagttcattctggctatgggcttctttctggtactggttatggaacagattacccttgcctataaggaacagtccgggccttctcccttggaggaaactcgggcgcttctgggcaccgtgaatggcgggccccaacactggcatgacggaccaggggttcctcaagcatccggagctcctgcaaccccgtctgccctcagagcatgtgtgttagtgttcagcctggcactccactccgtgtttgaagggttggctgtgggtctccagagggatcgcgcacgggcaatggaattgtgtctggctctcctgctacataagggcatcctggcggtcagccttagcctccgtctgctccaatctcacctacgggcgcaggtcgttgcgggctgtggcatcctcttctcctgcatgacccctctcgggatcggtctaggtgcggcactcgctgaatctgcaggccctctccaccagctggcccagagcgtgctggaggggatggcggcagggacgtttctgtacattactttcctggaaatactgccacaggaacttgcctcatccgagcaaaggatactcaaggtaatccttctgctagctggattcgccctcctcacagggctcctttttatacaaatatag

SEQ ID NO: 135347 - DNA, 1095 bp, synthetic construct
  misc_feature 1..1095: note = Description of Artificial Sequence: Synthetic coding sequence
  source 1..1095: mol_type = other DNA
atgccggggtgtccatgtccaggatgcggtatggccggcccaagattactcttccttactgcgctggccctagagctcctggaaagggccggcggcagccagccagccttacgcagcaggggcaccgcaaccgcgtgcagattggataataaggagtccgagagttggggggcccttctatcaggggaaaggcttgacacctggatctgcagcctgttgggctctctgatggttggactctcaggcgtcttccccctcttggtgattcccctggaaatgggaaccatgctgaggtctgaggcgggcgcttggcggctgaaacagctcctctctttcgctctgggcggtctgctgggaaacgtgttcctccatctgcttccagaagcatgggcctatacctgttctgccagtccaggcggcgaggggcagtctctccaacagcagcagcaattgggcttgtgggtcatcgctggtattttgacctttctggcccttgaaaaaatgtttctcgattccaaggaagaaggaacatcccaggctcctaataaagatccaacggcagctgctgcagccctcaacgggggtcactgcctcgcccagccagcagcggagcctggcctgggagctgtcgtacgcagcattaaagtctccggctatttaaatttattggccaatacaatagataactttacacacggcctggccgtggcagcttcctttctggtctcaaagaaaatcgggctgttgacgaccatggccattcttctccacgaaatacctcatgaagttggggactttgctattctgctaagggcagggttcgacagatggtccgctgcaaagctgcagctgtctacagccctgggcggcctgttaggggctgggttcgctatatgtacccagagtcccaagggcgtggaagagactgctgcttgggtgttgccgttcacttccggaggctttctctatatagcattagttaatgtgctcccagacctgctcgaagaagaggacccgtggagatcgctccagcagctgctccttttgtgcgcaggaattgttgtgatggtcctgttcagcctgtttgtggactag

SEQ ID NO: 135348 - DNA, 1116 bp, synthetic construct
  misc_feature 1..1116: note = Description of Artificial Sequence: Synthetic coding sequence
  source 1..1116: mol_type = other DNA
atgcccgggtgtccctgtccgggatgcgggatggcagggcctagactcctgtttttgaccgcgctggctctcgaacttctagagcgcgccggtggttcacagcccgcgcttaggtcacgggggacagccacagcctgccgactggacaacaaggagagtgagtcttggggcgcacttctgagtggtgagcggttagacacctggatttgctctctcttgggatctcttatggttggcctgagcggggtctttcctctgttggtcattcctcttgaaatgggaactatgctacggtcagaggctggagcctggcggttgaaacagcttctcagctttgccctaggcgggctcctgggaaacgtgtttttgcacttgctgcccgaagcttgggcttacacttgtagcgcatctccaggaggcgaggggcaatccctccagcagcagcagcagttgggcctctgggtcatagccgggatcttaacttttttagcacttgaaaagatgttcctggactctaaggaggaaggaacctctcaggctccaaacaaggaccctactgccgcagcggcggcattgaacggaggccactgccttgctcagccggccgccgaacctggacttggggctgtcgtgaggagcatcaaggttagcggctaccttaatttgctggccaacacaattgacaatttcacacatgggctggcagttgctgcaagcttcttagtatctaagaagattgggttattgactactatggccatcttgctgcatgagatcccccatgaagtgggtgactttgcgattctcttgagggcaggctttgaccgctggtcagccgctaaacttcagctgtctactgcgctcgggggactgctcggagccgggttcgcaatctgtacacagagcccaaaaggcgttgtcggctgctcgccagccgcggaagagacagctgcttgggtgctgcccttcacaagcggaggcttcctgtatattgctctagtaaatgtcctccctgatctcctcgaagaggaagacccttggaggtcccttcagcagctgcttctcctttgcgccggaatcgttgtcatggtgctgttttccctgttcgtggactag

SEQ ID NO: 135349 - DNA, 930 bp, synthetic construct
  misc_feature 1..930: note = Description of Artificial Sequence: Synthetic coding sequence
  source 1..930: mol_type = other DNA
atggagcagcttttgggaatcaagctgggatgcctgttcgcattactggcattgacactggggtgcggcctcacgccaatttgctttaagtggtttcagattgatgctgcccgaggacaccaccgcttggtgctgcgcctgcttggctgcatttccgctggcgtcttcctcggcgcaggatttatgcatatgaccgccgaggccttagaagagattgagagtcagattcagaaatttatggttcagaatagatccgcttccgagcgcaacagttccggggatgcagatagtgcccatatggaatatccctacggcgagttaattatttctctaggattctttttcgtgttcttcctggagtctctggccctgcagtgctgccccggcgccgctggtggctccactgtacaggacgaagaatggggcggcgcgcacatcttcgagctgcattcacacggacacctccccagcccatctaagggccctctgagagccctcgttctcctgctcagtttgagttttcattcagtgttcgagggcctagccgtaggtctacagcccaccgtggccgcgacggtacaactatgtctcgccgtactggcccacaagggcctcgttgtgtttggggttgggatgaggctggtccatctgggtacctcctctaggtgggccgtcttctccatccttctgctggctctgatgagcccactgggtcttgctgttggactcgcggtgaccggaggtgactctgaaggaggaagagggcttgcgcaggccgtgctcgagggagtggccgccgggacctttctgtacgtaactttccttgagattctcccccgcgagctggccagtccagaagcccctctggctaagtggtcttgtgtagctgcgggttttgcgtttatggcatttattgcgttgtgggcctag

SEQ ID NO: 135350 - DNA, 945 bp, synthetic construct
  misc_feature 1..945: note = Description of Artificial Sequence: Synthetic coding sequence
  source 1..945: mol_type = other DNA
atggtgaagctcttggtcgctaagatcttgtgtatggtgggggtcttctttttcatgctgctaggttcattactccccgttaaaataattgaaaccgactttgaaaaagcgcataggagtaaaaagatccttagcctgtgcaacactttcggaggtggggtgtttctggcaacttgtttcaacgctctgcttccagcagtgagagagaaactgcaaaaggtgctgtctctgggccacatctcaacagattaccctttggccgagacgattcttctccttggcttttttatgacagtcttcctcgagcaactgatattaacattccgcaaggagaaaccctccttcattgatctcgagaccttcaacgcgggaagcgatgtcgggagcgattccgagtatgagtccccattcatgggcggggcccgggggcacgcgctgtatgtggaaccccatggccacggacccagtctgtccgttcaaggattaagtcgcgctagccccgtacgcctgctgtccctagccttcgccctctctgcccatagcgtgttcgaaggtcttgctctggggctccaggaggaaggcgagaaggtcgtctccctattcgtaggagttgcagttcacgagactctggtggctgtggcgcttggaatatctatggcccgatctgccatgccacttcgggatgctgccaagctggctgtgaccgtgagtgctatgatccctctggggattggtctgggtttggggattgagtccgcccaaggggttcctggcagtgtggcgtcagtgttactgcagggactggccggagggacatttctgttcattactttcctggagattctggcaaaggagctagaggaaaagtccgaccgcctgttaaaagtcctctttctcgtgctcggctacaccgtgctggccggcatggtcttccttaaatggtag

SEQ ID NO: 135351 - DNA, 318 bp, synthetic construct
  misc_feature 1..318: note = Description of Artificial Sequence: Synthetic coding sequence
  source 1..318: mol_type = other DNA
atggtcaagctcttagtggcaaagattttgtgcatggtgggagtatttttcttcatgctcctagggtccctgttgccggtgaagattatcgagaccgacttcgaaaaggcccacagatcgaagaaaatcctaagtctgtgcaatacgtttggtggcggcgtcttcctagccacctgttttaacgcactgctgcctgccgttcgagagaaagtgagagctccctgggcgctcgccgctgcattgggaactctttggccgagggactcggacgcttttagcaccttaatgccatccagcgtaaaggccctaatgctgtag

SEQ ID NO: 135352 - DNA, 972 bp, synthetic construct
  misc_feature 1..972: note = Description of Artificial Sequence: Synthetic coding sequence
  source 1..972: mol_type = other DNA
atggtgaagctgttggtggcgaaaatcttatgtatggtgggggtgtttttttttatgcttctcggatctctcttgccggttaagataatagaaacagactttgagaaagcccacagatctaaaaagatactgagcctgtgcaacacattcgggggcggcgtgtttctagccacctgcttcaatgccctactgccagccgtccgggagaaattacagaaagtgctatccctggggcacatatccacagactaccccctggcagagaccatcctgttactaggtttctttatgacagtcttcttggagcagctgatccttacgttcagaaaggaaaagccttcttttattgatttagagacattcaatgccgggagtgatgtaggtagcgatagtgaatacgagagccccttcatggggggtgccagaggccatgctctgtacgtcgagcctcacggtcatggacccagcttatcggtgcagggactgagcagagcgagcccagtgcggctgctgtctttagcattcgctctgagcgcacacagcgtgtttgagggactggcgctgggactgcaggaggaaggggagaaggtggtgtctctctttgtgggagtagctgtacacgagaccctggttgccgtggccctaggcatcagcatggctcggtccgcaatgccccttagagatgcagccaaactggccgtgacggtcagtgctatgattcccctcggaatcgggttaggcttgggcatcgagtccgcgcagggcgtccctgggtccgtagcctctgtgcttctgcagggcctggcagggggtacctttctctttattacgttcctggagatattggccaaagagctggaagagaagtccgaccgactactgaaagttctcttcttggtccttggttatacggtcttagccgggatggtatttctgaaatggatctccccgccggaaccacgggtgtcatag

SEQ ID NO: 135353 - DNA, 1869 bp, synthetic construct
  misc_feature 1..1869: note = Description of Artificial Sequence: Synthetic coding sequence
  source 1..1869: mol_type = other DNA
atggtcgacgtagttggcctggagagagagaccgggcccagaggtagtccctggcctggactgcctctgcccagtctggtaggtccggcccctctcctcacctgtctctgtccccagtgcctatctgttgaagacgctttggggctgggagagccggagggaagcggtttaccaccaggacctgtgctcgaggctagatatgtcgctcgactgtccgcagccgccgtgttatatctctctaacccggaaggtacctgcgaagacgctagggccggattgtgggcgtctcacgccgatcatttgctggcactacttgagtcccctaaagctctaactcccggactctcctggttgctgcagcgaatgcaggcaagggcggcggggcagactccaaagaccgcatgcgtggacattccccaactgttggaagaagctgtgggtgcgggcgccccaggatccgcagggggcgttctggctgctctgctggaccatgttagatctgggtcctgttttcacgccctgcctagtccccagtatttcgtggactttgtattccaacaacattctagtgaagtcccaatgacattggccgagttgtcagcacttatgcaacgcctaggagtcggacgagaggcacactccgatcacagtcaccggcaccggggcgcttcttcctgggatccagttccccttatctccagttccaatagttccagtgtttgggacacggtgtgcttgagcgcaagggacgttatggccgcctacggccttagcgagcaagcgggtgtcacccccgaagcctgggcccaactctctccagctctgctgcaacagcagttgtctggtgcttgcaccagccagtctcgccctccagtgcaagaccagctctcccagtcggagcgatacctgtacggttctctggccaccctgctcatttgcctgtgcgcggtgttcgggctgcttctgctgacctgtacgggctgtcggggcgtcacacactacatactccagacattcctgtctctcgccgttggagcactgactggagatgctgtgctgcacctcactcctaaggtcctgggtctgcacacacatagcgaggaaggtttgagccctcagcccacctggcgattgctggccatgctggcaggcttatacgcattctttctgtttgagaacctgttcaacctgctcctgcccagggatccagaagacttagaggacggcccctgcgggcacagtagtcacagccacgggggccattcacacggagtgagcctgcaactcgcacctagtgaactgagacagcctaaaccccctcacgagggctcccgtgcagatctcgttgccgaagagagtcccgaactcctgaaccctgagcctaggagactctcacccgagctgaggctcttaccatacatgattacactgggagacgctgttcacaattttgcggacgggctggcagtcggggcagcctttgcctcctcatggaaaaccgggctagccacgagtttggctgtgttctgccacgagctgccacatgaactcggcgattttgccgccctcctgcatgcggggctctctgtgcggcaagcactcctcctgaacctcgcatcagccctgactgcttttgccggtctatatgtggcgctggccgtgggggtgtccgaggagtcagaggcctggattcttgccgtggccaccgggttgttcctgtatgtcgcactatgcgacatgctccccgctatgctgaaagtgagggaccctcggccatggctgctgttcctcctacataacgttggccttttagggggctggactgttcttctactgctgagcctctatgaagatgatatcacattttag

SEQ ID NO: 135354 - DNA, 1944 bp, synthetic construct
  misc_feature 1..1944: note = Description of Artificial Sequence: Synthetic coding sequence
  source 1..1944: mol_type = other DNA
atggcctcactcgtatctctggagctcggattgctgttggccgttctcgtcgttaccgcaacagctagtccccctgctgggcttctcagcttactaacctcaggacagggtgctctggatcaggaggctcttggaggactgctgaataccctcgcagatagagttcattgcgccaatggaccctgtgggaaatgtctgagtgtcgaggacgcccttggtctaggtgagccagagggcagcggactgccccccggcccagtgctggaagcccgttacgtcgcccgactgtccgccgcggctgtcctgtacctgtctaatcctgaagggacttgcgaggatgcacgtgcagggctctgggcttcccatgctgaccatttattagctttgctagagagccctaaagccctcacgcctggtctgtcctggctgctccagcggatgcaagcgcgcgccgccggccagacccccaaaaccgcctgtgtggacatcccccagctcctggaggaggccgttggagcaggagcccctgggtctgctggtggagttttggctgccttactggaccacgtcagaagtggtagttgcttccacgctctgccttcgccccaatattttgtggattttgtattccagcaacactcatccgaggtccccatgacactggccgaactgagcgccctcatgcagcggcttggggtggggagagaggctcactccgaccactcacataggcaccgtggagcaagctcttgggaccccgtgccactcatctcaagttccaactcgtctagtgtttgggacacagtctgcttatcagccagggatgttatggccgcatacggtttgtccgagcaggcaggcgtaacccctgaggcctgggcccagctcagcccagctctcttgcagcaacaacttagcggagcatgcacatcccagagccgtccacccgtgcaggatcagctaagccagtcagaacggtacctttatggatctctcgccaccttgctcatatgcctctgtgctgtatttgggctgctcttgctcacatgcacaggttgccgaggggtgactcactatatactccagacctttctaagtctggcggttggtgctctgacgggggatgcggtgctgcacttgacgccaaaagtactgggattgcacacacatagtgaggagggattgtcccctcagcccacttggaggctgctggctatgctggccggcctttatgcattctttctgtttgaaaacctgttcaacctgttgctgccacgagacccagaagatctggaggatggaccatgtgggcacagttcacactcccatggaggccatagccatggagtatccctccagctggctccttctgagctccgtcagcccaaaccccctcacgaggggtctagggcagatctggtggcggaggaatctcctgagctgttgaacccggagccccgtcggctctcacctgaactgcggctgttgccatatatgattacccttggcgatgctgtacacaatttcgcagacgggttggcagttggtgcagccttcgcctcaagttggaaaaccggactcgcaacgtccctggcagtcttttgccacgagttacctcatgagctgggtgatttcgccgccctcctgcacgctgggctgtccgtaaggcaggccctgctgctgaacctggctagtgccctgacagcttttgccgggctatacgtcgccttggcagtaggcgtctcggaagagtctgaagcctggatcctagccgtagccacgggactgtttctgtacgtcgctctctgcgacatgttgcccgctatgctgaaagtacgcgaccccaggccctggcttctgttccttctgcacaacgtgggcctccttggaggatggaccgtgctgctacttctcagcctctatgaagatgacattaccttctag

SEQ ID NO: 135355 - DNA, 1410 bp, synthetic construct
  misc_feature 1..1410: note = Description of Artificial Sequence: Synthetic coding sequence
  source 1..1410: mol_type = other DNA
atggccaggggactcggcgcacctcattgggtcgctgttgggctgctgacttgggcgactctgggactgctggtcgccggccttggaggacatgatgacctgcacgacgacttacaggaagatttccacgggcactctcacagacactctcatgaggatttccaccatggccactcccatgcccacgggcacgggcatactcatgagtcaatatggcacggtcatacccatgatcacgatcacggccactctcacgaagatctgcatcatggacattctcacggctactctcacgagtcattgtaccacagggggcatggtcatgatcacgagcactcccacggtggctacggcgagtcgggggccccgggaataaaacaagatctggatgccgtgaccctgtgggcctatgccttgggggccactgtgctgatttccgctgcccctttctttgtactcttcctcattccagtggaatccaattccccacggcaccgctcactgttgcagattctgctgtccttcgcatccggagggctgctcggagacgctttcctccacctcatcccccatgcgcttgaaccacattcacatcacacattggaacagcctggtcacggacactcccactctggccaaggccctatactgagcgtggggctgtgggtgctgtccggcatcgtagccttcctggtggtcgaaaagttcgttcgccatgtgaaaggtggacacggccattctcacggacatggccatgctcattcccacactcgtggttcgcacgggcatggtcgccaagaaaggagtaccaaggaaaagcagtcctccgaggaggaagaaaaggagacgcgcggcgtccagaagagacgtgggggtagtaccgtgccgaaagacggccccgtccgccctcaaaacgcagaggaggaaaagcggggccttgatctccgggtgtcggggtacttgaaccttgcagccgacctagcgcacaattttacggacggccttgcgattggcgcttccttccgggggggcagaggcctcggcatactgacaaccatgactgtcctgctgcatgaagtgccccatgaagtcggggactttgccattttggtccagtctggatgctctaaaaaacaggcaatgcggctgcagctgctcactgccgtgggggctctggccggcacagcatgtgcgctcctgactgaaggaggtgccgtggggtcagagattgctgggggggcaggccctggatgggttttgccttttaccgcaggtggtttcatttacgttgctaccgtgtccgtccttccagaactgctacgagaagcatcgcccctgcaatccctgctagaggtgctgggcctgctgggcggagtgattatgatggtgctcattgcccatctggagtag

SEQ ID NO: 135356 - DNA, 1410 bp, synthetic construct
  misc_feature 1..1410: note = Description of Artificial Sequence: Synthetic coding sequence
  source 1..1410: mol_type = other DNA
atggccagagggctgggcgccccccactgggtggctgtcggacttctcacctgggcgactctcggtctgctggtggcgggcctgggaggccacgacgatcttcacgatgatctccaggaggactttcatggccattcacatagacatagccacgaagacttccatcacggccatagccatgcgcatgggcatgggcacacccatgagtctatctggcacgggcatacccatgaccacgaccacggtcattcacacgaggacctgcatcatgggcactctcacggttatagccacgagtccctctaccatagggggcacggccacgatcacgagcacagccatggaggatacggtgagtcaggagccccaggtatcaagcaggatcttgacgctgtcacattgtgggcctatgccctaggagccactgtgctgatttctgccgcgccattttttgtgcttttcctcattccagtggaatccaatagccctagacatcgatccttgcttcagattcttttaagctttgcatcgggagggcttctgggggatgccttcctccatcttataccccacgcgttggagccacactcccaccataccctggaacagccagggcatggccatagtcattccggccaggggccgatcctaagcgtgggattgtgggtcctatccggtattgtcgcctttctggtggtggaaaagttcgtgcgccacgttaaagggggccacgggcactctcatggacatggccacgctcacagccacacacgagggagccatggacacggccgacaggaaagatccaccaaggaaaagcagtccagcgaagaggaagagaaagagacccgaggtgtccagaagagacgggggggtagtacggtacccaaagacggtcctgtccgcccccaaaatgccgaggaggagaagcggggactggacctgcgtgtgagcggctacctcaatctggcggcagaccttgctcacaatttcaccgatgggctggctataggggccagctttcgggggggtcggggactgggaattctcactactatgacagttctgttgcatgaagtgccacatgaggtgggggactttgccatcctggtgcagtctggctgctcaaagaaacaagcaatgagacttcagctcctgactgcagtgggggcgctggcaggaacggcctgtgcactgctcaccgagggcggggccgtcggatctgaaatcgccgggggagccggccctgggtgggttctgccctttacagccggcggatttatatacgtggccaccgtctccgtactacctgaactactacgggaggcatccccccttcaaagtcttctcgaggtgttgggactcctgggaggggtgatcatgatggtcctcatcgcacatttggagtag

SEQ ID NO: 135357 - DNA, 1410 bp, synthetic construct
  misc_feature 1..1410: note = Description of Artificial Sequence: Synthetic coding sequence
  source 1..1410: mol_type = other DNA
atggcacgagggctgggtgcgccccactgggttgctgtcgggctcttgacctgggctacgttgggcttgctggtggcaggcctgggcgggcatgatgatttgcacgatgacctacaggaggattttcacgggcattcccacagacactctcatgaggattttcaccacggccattctcatgcccacggccacggccacacacacgaaagcatttggcacggccatactcacgatcacgatcatggccatagccacgaagacctgcaccacggccactctcatggctatagtcacgagtccctctaccaccgaggccatggccacgaccacgagcactcacacgggggatacggagaatctggcgcccccgggattaagcaggatcttgacgccgtaacgttatgggcttacgcgctgggcgctaccgttctcatcagtgccgcaccttttttcgtgctgtttctcataccagttgaatccaatagccccaggcacagaagcctgttacagatcttactgtcctttgcgtctggggggctgctgggcgatgctttcttacatcttattccacatgccctagagccacacagccatcacacactggaacagcccgggcacggccactcgcacagcggacaggggcctattctcagtgtggggctgtgggtgttgtcaggcattgtggcatttctggtggttgaaaagttcgtgagacacgtcaagggaggacatggacactcgcatgggcatggacatgctcacagtcacacacgaggcagccacggtcatgggcggcaggagcggagtaccaaagaaaagcagagcagtgaggaagaagagaaagaaacgcgcggggtccagaaaaggagaggcggcagtacagtgcctaaagacggacccgtgcggccccagaatgccgaagaggagaagcggggcctcgacctgagggtttctggttatctcaacctggcggctgacctcgcccataacttcacagacgggctcgcaataggcgcctcattcagaggcggacggggtctgggcatactaacaaccatgaccgtattgctacacgaagttccgcacgaagtaggcgattttgccattctagtacagagtggatgctcgaagaaacaggctatgaggctgcagctgctgactgccgtgggtgccctggctggcacagcctgtgcactgttaacagaaggcggagccgtcgggtccgagatcgccggcggggccggccccgggtgggtgctgccattcaccgccggggggtttatctacgttgccaccgtgagcgttctgcccgagttactgcgcgaagcctctcctctgcagtctcttttggaagtgctcggattgctcggcggcgtgatcatgatggtgcttatcgcgcacttggaatag

SEQ ID NO: 135358 - DNA, 1410 bp, synthetic construct
  misc_feature 1..1410: note = Description of Artificial Sequence: Synthetic coding sequence
  source 1..1410: mol_type = other DNA
atggctcggggtctcggagctccccactgggtggccgtggggttgcttacatgggctaccctcgggctcctcgtagccggcctgggcgggcacgatgatctgcatgacgatttgcaggaagattttcatggacatagtcatagacactcccacgaggatttccaccatggccactcccatgcccatggacacgggcatactcacgagagtatctggcatggtcacacccacgaccacgatcatggccatagccatgaggaccttcatcacggccactcccatggatactcacatgagtcgctgtaccaccgcgggcatggtcatgaccacgaacacagtcacggcggatacggtgagtctggcgccccgggcattaagcaggacctggacgccgtgactctgtgggcatacgcactaggagccactgtcttgatttctgccgcacctttctttgtcctcttcctgattccagtggaatccaacagccctagacaccgctcgctcctccaaatccttctgagctttgcctcaggaggactgcttggtgacgcgttcttgcatttgatccctcacgccctggagccccattctcaccacactctggagcagcctggtcacggacactcacattccggacagggcccgattctttcagttggactgtgggttctgtcaggcatcgtggcctttctggttgtcgaaaagttcgttcgccatgtcaagggtggccacggccacagtcacggccatggccatgcccactctcatacccgcggctcacacggacatggaaggcaggagagatcgactaaggaaaaacagtcttctgaggaagaggagaaagagactcggggagtacagaaaaggcgcggaggttccacagtgccaaaagacggccctgtgagacctcaaaacgcggaggaagagaagaggggcctcgacctcagggtgtccgggtatctgaacctagccgccgacttagctcataactttactgacggtcttgctatcggggccagctttcgcgggggcagaggacttggtatactcacaaccatgaccgtcctcttgcatgaagtcccgcacgaggtgggagacttcgccatcctcgtgcagagtggctgctccaagaagcaggctatgcgtttgcaattgctgacagccgtgggagcgctcgccggtacagcctgcgcactgcttacagagggtggcgcagtcgggagcgagatcgccggaggtgccggtcccggctgggttttaccgttcacagccggtggattcatctacgtggctacagtcagcgtgctcccagagctgctgagagaggcatccccgctgcagtcactcctggaagtgctcggactgctgggtggggtaatcatgatggtgctgattgctcacctggaatag

SEQ ID NO: 135359 - DNA, 663 bp, synthetic construct
  misc_feature 1..663: note = Description of Artificial Sequence: Synthetic coding sequence
  source 1..663: mol_type = other DNA
atggacagctctttgcccgaatgtagacacattggcaagggcatcagggctaaagtggagcggaatttcttgttttcacgagacttaaaagctggccttcctcgaccgtcaaagcccggtaaggaaaggatccccgagcctgctctgggagccacagtcctcatctctgccgctcctttcttcgtactgttcttaatacctgttgaatcgaactctccacggcatagaagtctgctgcaaatcctgttgagctttgctagcggtgggctcctaggcgacgcctttctgcatctcatcccccatgcactggagcctcattctcatcataccctcgaacagccaggccacggccacagccattctggccagggccccatcctttctgtggggctatgggttttgagcggtatagtggcttttcttgtggttgagaagttcgttagacacgttaagggcggccatggacactctcacggacatgggcacgctcactctcatacgcgcggatcacacggacatggtagacaggagcgctctacaaaggagaagcagtcctccgaagaggaagagaaagagacgagaggcgtgcagaagcgccgcggggggtcaaccgtgccaaaagacggacctgtcaggccacagaacgccgaagaagaaaagtag

SEQ ID NO: 135360 - DNA, 663 bp, synthetic construct
  misc_feature 1..663: note = Description of Artificial Sequence: Synthetic coding sequence
  source 1..663: mol_type = other DNA
atggactcctctctgccagagtgtaggcacatcggcaaggggatacgcgccaaagtggagagaaacttcctattttcccgcgacctgaaagccgggctgcctaggccctctaaaccaggcaaagagcggattccggagcctgcccttggtgccaccgttctaatatcagcagcgccttttttcgttctattcctgattccagtggagtccaattctcctcgccacagatccctgctgcagatcttgctcagcttcgccagcgggggcttactgggggatgccttccttcacctcatcccacacgctctagaacctcacagccaccatacactcgagcagcccggacacggacacagtcattcaggccagggtccaatactgagtgtcggcctttgggtgctgtccggcattgtcgcatttttggtggtggagaagtttgtcaggcacgtgaaaggggggcacggtcacagtcacggccatggccatgcacactcgcataccaggggttctcacggtcacggtcgtcaggagagatcgacaaaagaaaagcagtcctcggaggaagaggaaaaggagacacggggggtccaaaagagacggggggggagcacagtgcccaaagatggacctgttagaccacagaacgcggaagaagaaaagtag

SEQ ID NO: 135361 - DNA, 1410 bp, synthetic construct
  misc_feature 1..1410: note = Description of Artificial Sequence: Synthetic coding sequence
  source 1..1410: mol_type = other DNA
atggcaagagggttaggcgccccacactgggttgcggtagggctgctcacatgggccactctgggactgctcgtggcggggctgggcggccatgacgatctccacgatgatctgcaggaggacttccacggacactctcatcgccactcccatgaagactttcaccacggccattctcacgcccatggccatggacacacacatgaatcaatctggcacggtcacacgcacgaccatgatcacggtcactcacatgaagatctccatcatgggcactcacatggttacagccacgagagcctgtatcatcgggggcacggacatgatcatgagcacagtcatggtggctacggagaatccggtgcacccgggatcaagcaggatctcgacgccgtaactttatgggcctatgcactgggggccactgttctgatatccgctgctccattcttcgtgctctttctgatccccgtagaatctaactcaccccgacaccgatctctgctccaaattttgctgtcttttgcctcaggtggcttactgggggatgcgtttctccacttgattccccacgctctcgagccacattcacaccatacacttgaacaaccaggtcacggtcattcccactctggacaggggcctatcctttctgtgggattgtgggtcttgagcggtatcgtcgcttttctggtcgttgagaaattcgtccgccacgtgaagggcggacacggtcatagccacgggcacggacatgctcattcgcatacgcgaggctctcacggacacgggagacaagagaggagcacaaaggaaaaacagtcctcagaggaagaggagaaagagaccagaggcgtgcagaagcgccggggaggctcgacagtacctaaagatggcccagtgcggccccagaatgcagaagaagagaagcggggtttggacctgcgcgtgagcggatatctcaacctggccgccgatctggctcacaattttaccgacgggctggcaattggagcaagctttcgggggggccgaggcctcggaatccttactaccatgacggtcttactgcacgaggtgccacacgaagtgggggattttgctattttagtgcaatctggctgttccaagaagcaggcgatgagactacagctcctgacggctgtgggcgcccttgcaggtactgcctgcgctttattgaccgaggggggggccgtggggtccgagatcgcaggaggtgccgggccagggtgggtgctgccattcaccgccggaggtttcatctacgtcgccacagtctcagtcctgcctgaactactgagggaagcatcccctctgcagtccctccttgaggtcctgggtcttctgggcggggtgataatgatggtgctgatcgcacatcttgaatag

SEQ ID NO: 135362 - DNA, 1410 bp, synthetic construct
  misc_feature 1..1410: note = Description of Artificial Sequence: Synthetic coding sequence
  source 1..1410: mol_type = other DNA
atggcccgggggctgggcgccccacactgggtggcggtgggtcttctgacctgggccaccctgggcctgctggtcgccgggcttggcgggcacgatgatctgcacgacgacctgcaagaagattttcatggccactcacaccggcactcacatgaagacttccaccacggtcacagtcacgcgcatggacacggtcacacacacgagtctatctggcatgggcatacccacgatcacgaccatgggcacagtcacgaagacctccaccacggtcacagccatggatactctcacgagtccctctatcatcggggccatggtcatgaccatgaacactcccatgggggctacggcgaatccggagcaccgggtatcaagcaggatctcgacgccgtgaccctgtgggcgtatgccctgggggcaacagtcttaatctccgccgcccccttcttcgtgctgtttctaatacccgttgaaagtaactcaccacgacaccgatctctgctgcagatcttgttaagctttgccagcggaggcctgctaggggacgccttcctccacttgatcccccacgctcttgagccacactcccaccacacattggagcaacctggccatgggcattcacattcagggcaaggaccgatcctctccgtgggtctgtgggtgctgtccggtatcgttgcctttctggtggtcgagaagtttgtccgacatgttaagggaggacacggccactctcacggccacggccacgcccattcacatacaaggggctctcatgggcacggacggcaggaacggtctaccaaggagaagcagagcagcgaggaggaggaaaaagagaccaggggagttcagaagaggagggggggctccacagtccctaaagacggtcccgtaagaccacaaaacgccgaggaagagaaacggggtctggatctgcgcgtaagtgggtaccttaacctggctgctgacttagctcataactttaccgacgggctggccattggcgcctccttccgcggtggccggggcctcgggattctgacaaccatgacagtacttctgcacgaggtgccccatgaggtgggtgacttcgccattctagttcagtctggatgttccaaaaagcaggcaatgcgactccaactgcttacggcagtgggtgccctagcagggacagcctgcgcgctcttaacggaaggaggcgctgttggctctgagatagcaggaggcgccgggcctgggtgggtactgcccttcacagccggcgggtttatatacgtggctaccgtgtccgtcttgccagagctgctgcgcgaggcctccccgctccaatccctgctggaggtgttgggcctcctggggggagtcatcatgatggtcctgatagctcatctggaatag

SEQ ID NO: 135363 - DNA, 1410 bp, synthetic construct
  misc_feature 1..1410: note = Description of Artificial Sequence: Synthetic coding sequence
  source 1..1410: mol_type = other DNA
atggcccgcgggctcggtgctccccattgggtcgccgtcggcctccttacctgggccactctcggcctcctcgtagccgggttgggagggcacgacgatttacatgacgatctgcaggaggacttccacggccacagccatcgccattcgcacgaggacttccaccacgggcacagccacgcacatggtcacggccatacccacgagtctatatggcatggccatacacacgatcatgaccacgggcactctcacgaggatcttcaccatggacacagccacggctattcacacgagtccttataccatagagggcatggccacgatcatgagcattcacacggagggtatggagaatctggagctcccggaatcaaacaggatctggatgccgtgactttgtgggcatacgcgttaggcgccacggtacttatctccgcggcaccgttttttgtgctgtttctcatcccagtcgaaagcaactcgccgcggcatcgttctctactgcagatcctactcagtttcgcgagtggagggctcttaggcgatgcattccttcacctgatcccccacgcactggagccacactctcaccataccttggaacagcccggtcatggacactctcactcagggcagggtcccatcctgtccgtgggcctatgggttttatcgggaatagtagctttcctggtggtggaaaagtttgttaggcatgtgaagggcgggcatggacactcacatggccacggccacgcccacagtcacacccgggggagccacggccatgggagacaggagagaagtaccaaagaaaaacagagtagcgaggaggaggagaaagaaacccggggggttcagaaacgcagggggggcagcaccgtgcctaaggatgggcccgttagacctcagaatgccgaagaagaaaagcgggggctggatttgagagtttcgggctaccttaatctggccgcagacctggcccataacttcactgacggccttgctattggcgcgagcttcagaggggggcgcggccttggcatcctgacgacaatgacagtcctacttcatgaggtcccgcatgaagtgggagacttcgcaattctggtgcagtccggctgttccaagaagcaggcaatgagactgcagttactgacggctgtaggggcgttagccggtacggcctgtgcactgctaacagaagggggggccgtgggatctgaaattgccggcggagctggacccggctgggtcctgcctttcactgcaggcggattcatatacgtagcaactgtatcagtattgccagagctgctgcgtgaagccagccctctgcagtccctgctagaggtcctgggattactcggcggagtgattatgatggtgctgatcgcccatctggaatag

SEQ ID NO: 135364 - DNA, 663 bp, synthetic construct
  misc_feature 1..663: note = Description of Artificial Sequence: Synthetic coding sequence
  source 1..663: mol_type = other DNA
atggactcctcccttcccgaatgtcgccacataggcaaaggtatccgggccaaagttgagcgaaacttcctcttttctcgagatctgaaggcgggcttgccaaggcccagcaagcctggcaaggaacgaatacccgagccggcactgggggctaccgtacttatcagcgctgcacctttcttcgtcctgttcctgattcccgtggaatcaaatagcccccgacaccgtagcttactgcagattctgctctcattcgcatcaggcggtctgctgggcgacgccttcctgcacttgattccacatgctctcgagccacactcccaccatacactcgagcagcccggacacggccacagtcattctgggcaagggccaatcctttccgtgggactctgggtcctgagtgggattgtagccttcttggtggtcgagaaatttgtgcgccatgtaaaaggcggtcacggacattcccacggacacggccatgctcactcccacactagggggtctcacggccacggaagacaggagagaagcaccaaagagaagcagtcttctgaggaagaagagaaggaaacaagaggcgtgcagaagcggcggggcggctctactgtgcccaaggatggacctgtgcgcccccagaacgctgaggaggaaaaatag

SEQ ID NO: 135365 - DNA, 663 bp, synthetic construct
  misc_feature 1..663: note = Description of Artificial Sequence: Synthetic coding sequence
  source 1..663: mol_type = other DNA
atggacagcagtctgccggagtgccggcatattggcaaaggcatacgagccaaggtcgagcgcaactttctgttctcccgggacctgaaggctggtcttcccaggccatctaagccgggtaaggaaagaataccggagcccgccctaggcgccactgtgcttatctctgcagcacccttcttcgttctgtttctcatccccgtggagtcaaattcgcccaggcataggtcgctgttgcagattcttctaagcttcgcttctggcggactgttgggcgacgcctttctgcacctaattccacacgcactagagccgcattctcatcacacactcgagcaaccaggacatgggcattcgcactcaggtcaaggccctatcctgagtgtaggcctctgggtgttgtcgggaatagtcgctttcctagtggtggaaaagttcgtcagacacgtgaaaggcggccacggccactcccacggtcacgggcacgctcattctcacacccgaggctcacatggccacggacggcaggaaaggtctaccaaagaaaagcagtctagcgaagaagaagagaaagaaaccagaggcgtgcagaagcgacgcgggggaagtaccgtgcctaaggatgggccagtcaggccgcagaatgctgaggaagaaaaatag

SEQ ID NO: 135366 - DNA, 1410 bp, synthetic construct
  misc_feature 1..1410: note = Description of Artificial Sequence: Synthetic coding sequence
  source 1..1410: mol_type = other DNA
atggcgcgtggactgggcgccccccattgggtcgccgtcggcctgctgacgtgggcgaccctcggactactggtagcagggctaggcgggcatgacgaccttcacgacgatctgcaggaggactttcacggccacagccatcgacactcccatgaagatttccaccacgggcatagccatgcacatgggcacgggcacactcacgagtccatttggcacggccacacccacgatcacgatcacgggcatagtcatgaggatctccatcacgggcactcacatggctactcccatgaatcactgtaccatcgtggccacggtcacgaccatgagcatagtcacggaggatatggagaatcaggagcccccggtatcaaacaggatttggatgcggtgactctgtgggcatacgcacttggcgcaacagtgcttatttctgccgccccattctttgttctgttcttgattccagtagagtcaaactcccctagacatcggagcttattgcagatactgctctccttcgctagcggcggactcctgggagatgcattcctacatctgattcctcacgccctggaaccacattcccatcacacgctagagcaaccagggcacggacactcacattcgggccaaggaccaatattgtctgtgggtctgtgggtgctctctggtattgtcgcgttcctggtggttgagaagtttgtgaggcacgtgaaaggaggtcatggccatagtcatgggcacggccatgcccactcccataccaggggctcacatggacacgggcggcaagagagaagcactaaagagaagcaaagcagcgaagaagaggagaaagaaacccgaggcgtgcaaaagcggaggggcggctcgactgtgcccaaggatgggccagttaggccgcaaaacgcagaggaggagaagagaggccttgacctccgagtgtcaggttatctcaatttggcagccgatcttgcgcataactttacagacgggctggcaattggcgcctcattccggggggggcgtgggttgggaatcctgacaactatgacggtgctcctgcatgaagtgcctcatgaagtgggcgatttcgcaatcctggtacaatccgggtgctctaagaaacaagcgatgcggctacagttactgacagccgtgggggctcttgcgggcaccgcctgcgctctgctgaccgagggtggggccgttgggtcggagatcgccggcggagctgggccagggtgggtgcttccttttaccgccgggggctttatctatgttgctacagtgagcgttctgccagagctgttaagggaagcctcacccctgcagtctcttttagaagtgttaggactgttgggtggggttataatgatggtgcttatagctcatctggaatag

SEQ ID NO: 135367 - DNA, 1410 bp, synthetic construct
  misc_feature 1..1410: note = Description of Artificial Sequence: Synthetic coding sequence
  source 1..1410: mol_type = other DNA
atggctcgcggcctgggagctccccattgggtcgccgtgggactgctcacctgggccactctgggtctactggttgcgggtctcggcggccacgatgacctccacgacgatctccaggaggacttccacgggcacagtcataggcactctcacgaggactttcatcacgggcattcacacgcccacggtcacgggcacactcatgaatccatctggcacggacacacgcacgatcatgatcacggccacagtcacgaagacttacaccacggacattcacatgggtacagtcacgaaagtctgtaccaccgcgggcacgggcacgaccatgaacatagtcatggagggtacggcgagtccggcgccccaggaattaagcaggacctagatgccgttaccctgtgggcctacgctcttggggcaacagtgctcatatccgccgccccattttttgtcctcttcctcatccctgtggagagcaattcaccccgacacagaagcttactacaaatcctactgtctttcgccagcggaggactgctgggagacgctttcttgcatctcatcccccacgcgttggaaccacacagtcaccacacccttgagcagcctggacacggccacagccactccgggcaaggccccatcctttcagtggggctgtgggttctgtcaggaatcgtcgctttccttgtggtcgagaagtttgtcagacatgtgaaaggagggcatggacacagccatggacatgggcacgcccactctcatacgaggggaagccacggccatggccgtcaggagcggtcgaccaaagaaaagcaatcaagcgaggaggaagagaaggaaactcgcggggtccagaagaggaggggaggtagtacggtgcccaaggatggaccagtgagacctcagaacgctgaggaagagaaaaggggcctggacctcagggtcagcggctacctgaatctggccgcggatttagcccataattttactgacggtctagccatcggggccagcttccgtggaggaaggggcttgggcatattaacaaccatgaccgtcctcttacacgaggtcccccacgaggtgggggacttcgctattctcgttcaatctggctgctctaagaagcaagccatgcgtttacagctcctcactgccgtaggcgcactggccggaactgcgtgtgccctccttactgagggaggcgccgtcggcagtgaaatcgcgggaggagccggccctggttgggtgcttcccttcaccgctggagggttcatctacgtggccactgtctccgtgttacctgagctactgcgcgaagcttcaccattacagtcattactcgaagttctgggtctgctgggaggggtcatcatgatggtgttaatcgctcatttggaatag

SEQ ID NO: 135368 - DNA, 1410 bp, synthetic construct
  misc_feature 1..1410: note = Description of Artificial Sequence: Synthetic coding sequence
  source 1..1410: mol_type = other DNA
atggcccgtgggctcggtgctccccactgggtggcagttgggctcctcacatgggccacactgggtcttctggtcgccggactgggtggccacgacgatctccatgacgacctgcaggaagatttccatgggcattctcatcggcacagccacgaggatttccatcacggacatagccacgctcacgggcacggccatacccacgagtccatttggcacggccacacacacgaccacgaccacggacattctcacgaggaccttcatcacggtcactctcatggatattcacacgagtccctgtatcaccgaggacacgggcatgatcacgaacatagtcatgggggctatggagagtctggagcaccaggcataaaacaggatttggatgcggttacgctgtgggcttacgcgttaggagccaccgtcttgataagtgccgctcccttctttgtgctgtttctcataccagtggaatctaactctccccggcaccgctccctgctgcagattctcttgtccttcgcctcaggaggcctgctgggtgacgcgttcctccacttaatcccacatgctctggagcctcacagccaccacacactggaacagcctgggcatggccactctcattccggacagggacctatcctgagtgtcgggctctgggtactatccggcattgtggcctttctggtggtcgagaaatttgtgcgccatgtgaagggcggccacgggcactcgcacgggcacggacacgcgcatagtcatactcgcggctcccacggacacggccgacaggagcgcagcactaaggagaaacaatcatctgaggaagaggagaaggaaactcggggagtgcagaagcggcgcgggggcagtaccgttccgaaagacggcccagtgcgcccccaaaacgcagaggaggagaaaagagggcttgatctaagggtgagcggctatctgaacctggccgccgatctcgctcataacttcactgacggattggccattggagctagcttccgcgggggccgcggcctaggcatactaacgactatgacagtgctgctccacgaagttccccatgaggtgggcgactttgctatattagtgcagagtggctgctcaaagaaacaggctatgaggctgcaattgctaacagctgttggggctttggcaggaaccgcatgcgccctgctgacggagggaggcgcagtggggagcgaaatcgccggaggggccggccccggttgggtcctgcccttcaccgccgggggattcatatatgtcgccacggtatctgtactgcccgagctgctgcgagaggcctcaccgctgcagtcgctgttggaggtattagggctgctgggcggcgtgatcatgatggtgctgattgcacacttggagtag

SEQ ID NO: 135369 - DNA, 1410 bp, synthetic construct
  misc_feature 1..1410: note = Description of Artificial Sequence: Synthetic coding sequence
  source 1..1410: mol_type = other DNA
atggcaagagggttgggtgcgccccactgggtcgccgtgggactgctgacctgggctactctaggtctgctggtcgctggattggggggacatgatgacttgcatgatgatctccaggaagatttccatgggcattcccataggcattcccatgaggattttcatcatggccattcccatgcgcatggtcacggccacacccatgaatccatatggcatggccatacgcacgaccacgatcacggtcacagccacgaagatttgcaccatggtcatagccatggttattctcacgaatccctctaccaccgaggccacggccatgaccacgagcattcccacgggggttacggagagtccggcgcccctggcatcaaacaggacctcgacgcagtgacattgtgggcctacgcacttggtgctacggttcttatctcagcagcgccttttttcgtgctattcctgattccggtcgaatcgaatagcccccgtcaccggtctctgctccaaattttgctgagcttcgcgtccggaggcctgttaggcgacgcttttctacatcttataccacatgcacttgagcctcactctcaccataccctcgagcagcctgggcacggccacagccattcaggccaaggacccattttgagcgttggcctgtgggtgctatcaggtatagtcgccttcttagtcgtggaaaaatttgtacggcacgttaagggagggcatggccattcgcatggacacggtcatgcccacagtcacacaaggggatctcatggtcacggaaggcaagagaggagcacgaaagaaaaacagtcatccgaagaagaggagaaagagacaagaggcgtgcagaaaaggcgaggaggcagcactgtcccgaaggatggacccgtgaggcctcagaacgccgaagaggagaagagggggctagatctccgagtcagcggttatttaaacctggcggcagaccttgcgcacaacttcacagacgggctggccattggcgcctccttccggggcggccgaggactggggatccttacaacgatgacagtgctgctccacgaggtcccgcatgaagtgggggactttgcgatcttggtgcaaagcggctgttcaaagaaacaggctatgaggctccagctactgacagctgttggtgctctggctggcaccgcatgcgccttgttgaccgagggcggcgcggtgggctctgagattgctggtggagccggtccgggctgggtgttgccgttcactgctgggggtttcatttatgttgctactgtatccgtactgcccgagctgcttagagaggccagcccactgcagtctctcctcgaggtcttgggccttctgggcggggtaatcatgatggtgctgattgctcacctggagtag

SEQ ID NO: 135370 - DNA, 663 bp, synthetic construct
  misc_feature 1..663: note = Description of Artificial Sequence: Synthetic coding sequence
  source 1..663: mol_type = other DNA
atggacagtagccttcccgagtgccgacacattgggaaaggcatccgtgctaaagttgaacgtaatttcctctttagccgcgacttaaaggcggggctcccacgccctagtaagcctggcaaggaacggatcccagagcctgctctgggggccactgtgctgattagcgcagccccatttttcgtgctgttccttattcctgtagaatccaattcacccaggcatagatcgttattacagatcctcttgtccttcgcctctggagggttgctgggggacgcattcctacacctgattccacacgctctggaaccccatagccaccacacgttggaacagcctggtcatggacatagccatagcggacagggaccaatcttgagcgtcgggctgtgggttcttagcggcatcgtggcgttcttagtcgtggagaaattcgtccggcacgtgaagggcggccacggccactcgcacggccacggccatgcccactcgcataccagaggcagccatggccacgggaggcaggagcgatctaccaaagaaaagcagagctcggaagaagaagaaaaggagacgagaggggtgcaaaaacggcgagggggctcgactgtgcccaaagacggacccgttagaccccaaaatgccgaagaggaaaaatag

SEQ ID NO: 135371 - DNA, 1125 bp, synthetic construct
  misc_feature 1..1125: note = Description of Artificial Sequence: Synthetic coding sequence
  source 1..1125: mol_type = other DNA
atggccaggggactcggtgcgccgcactgggtcgccgtcggcctgctgacttgggcaacgctcgggctgctcgttgccggattgggcgggcacgatgacctccatgacgatctgcaggaagattttcatggtcactcacacagtgccgacctgtcttcttctatattttgtcctctcccttacccacgaggagttgaactgagccctgcaagcctatccaccagcgatcttgcccagttctgcttcagatgggccccaggtcgctgttttctccatcttattccccatgccctggagcctcattcacaccataccctcgaacagcccggtcatgggcacagccactctggacagggccccattctgtccgtcgggctgtgggtgttgtccggcatcgtcgcatttctggtcgttgaaaagttcgtgcggcacgtcaaaggcggccacggtcacagtcacggacacggacatgcacattctcacacacgcggatcccacggacatggcagacaggaacgatcaacaaaagagaagcagagctcagaggaggaggagaaggaaacaagaggagtgcaaaagcgacgggggggctctaccgtgcccaaggacggacccgtgcgtccccagaacgctgaagaagaaaaaagagggctcgacttgcgcgtatccggatatctgaatctggcagccgacctggctcacaattttactgatggcctggcaattggggcatcttttcgtggagggcgtggtttggggatactgaccaccatgacggtcctgctccacgaggtgccacatgaggtaggagattttgcaatactcgtgcagtcaggctgcagtaagaaacaagcaatgagactacagttactaacagccgtcggtgcactagccggcaccgcttgcgctctgctgacagaaggtggagcagtgggttccgagattgccggtggtgcaggcccaggttgggtcctgcctttcacggctgggggtttcatctacgttgccactgtgagcgtcctccccgaacttcttcgggaggcctctccactgcaaagtctgctggaggtgttgggcctgctaggaggggtgatcatgatggtgctcattgctcacctagagtag

SEQ ID NO: 135372 - DNA, 1353 bp, synthetic construct
  misc_feature 1..1353: note = Description of Artificial Sequence: Synthetic coding sequence
  source 1..1353: mol_type = other DNA
atggctcggggcctgggggccccccactgggtggccgtcggccttctgacatgggccactttgggacttctggttgcgggattgggagggcacgatgatctgcacgacgatctccaagaggattttcatggccatggccacactcatgagagtatctggcatggccacactcacgatcacgatcacgggcacagtcacgaggacctgcatcacggccacagtcacgggtatagccatgagtccctctatcaccgaggccatggacatgaccatgagcactcccatggcggatatggggagagcggcgcaccgggcattaagcaggacctagatgccgttactctctgggcttacgcactgggtgctaccgtgctgatatctgctgctcctttctttgttctctttctgatcccagtggaatcaaattcaccccgacatcggagtttattacagatccttctctcattcgcaagtgggggcctcttgggcgacgctttcctccacctgatcccccatgctttagaaccgcattcgcaccatacccttgagcagccggggcatggccatagtcacagtggacagggcccaatacttagtgttggcctctgggtgctgtcaggtatagtggccttcctcgtagtggaaaagtttgtacgccatgtcaagggagggcacggacattctcatggccacggacatgctcattctcatactcggggctcacatgggcatggccgtcaggagcgctccaccaaggagaagcagtcgtctgaagaagaagaaaaggaaaccaggggtgttcagaagaggagggggggctctaccgtccctaaggatgggcctgtgcgtccccaaaacgcagaggaggaaaagcggggacttgatctgagggtgagtgggtatctcaacctggccgccgatttggcccataattttacagacggcctcgcgattggcgcctcttttcggggcggtcgaggccttgggattctcactactatgaccgtcctgctccatgaagtccctcacgaggtcggcgactttgctatcctcgtgcagtctgggtgttctaagaaacaggccatgaggctgcagctgctgacagccgtaggagcactggcaggcacagcgtgtgcactcctgaccgaaggaggcgcagttggatcagagatcgccggcggagcgggtccggggtgggtcctgccatttactgcaggtggctttatctatgttgccacagtgtcggttctgccagagctgctgcgcgaggcctccccactgcagtccctgttagaagtattgggattgctgggaggggtgattatgatggttttaatcgcccatcttgaatag

SEQ ID NO: 135373 - DNA, 663 bp, synthetic construct
  misc_feature 1..663: note = Description of Artificial Sequence: Synthetic coding sequence
  source 1..663: mol_type = other DNA
atggacagcagcctcccagaatgtcggcacatcgggaaaggcattagagccaaagtcgagaggaatttcctgttcagccgggacctgaaagccggcctgcctcgaccgtccaagcccgggaaagagagaataccagagccggccttgggagccacggtgctcatttccgcggccccgttctttgtgctctttctcataccagtggagagcaacagtccgcggcaccgcagcctgctgcagatcctgctttctttcgcatcaggaggcctgctcggggatgctttcctgcaccttatcccccacgccctcgagccacactctcatcatacccttgaacagcccggacacggccattcgcactcagggcagggtcctattctgagtgtgggtctgtgggtgctgagtggcatcgtagcctttctggtggtagagaaattcgtgcgacacgtcaagggggggcatggccattcccatggccatggccacgcccacagtcacacgcgaggaagtcacggccacggccgtcaagaacggtcaacaaaagagaaacagtcgtctgaagaggaagagaaagagacccgtggcgttcagaaacgtaggggcgggtctaccgtacctaaagacggccccgtaagaccgcaaaatgccgaggaggaaaaatag

SEQ ID NO: 135374 - DNA, 1410 bp, synthetic construct
  misc_feature 1..1410: note = Description of Artificial Sequence: Synthetic coding sequence
  source 1..1410: mol_type = other DNA
atggcccgaggcctgggcgcgcctcattgggtagcagttggattgctgacttgggcaacactcgggctgcttgtggcggggctgggtggccacgatgacctgcatgacgatctgcaggaggactttcacggccactctcaccggcacagccacgaggatttccaccacggacactctcacgcacatggtcacggccacacccacgagtccatttggcatggccacacacacgatcacgatcacggacactcgcacgaagatttgcaccatggacattcccacggttatagccacgagagtctgtatcataggggacatgggcacgaccatgagcacagccacggcgggtacggtgagtccggagccccaggtatcaagcaagatctggacgccgtcaccctgtgggcttatgccctcggggccacagtgctcatatcggctgccccattctttgtgctctttctcattcctgttgagtcgaactcccctcgacacaggagccttttgcagatacttctgtcattcgcgtcgggcgggctcttgggagacgctttcctgcatcttataccccatgctctagagccacacagccaccacaccctggaacagcccggccatggccacagtcattctggccagggccccatactcagtgtgggtctgtgggttttgtccgggatcgtggccttcctggtggtcgagaagttcgtgcgacacgttaaagggggccacggccattctcatggccacggccacgcgcatagtcacacacgaggcagccacggccacggtcgtcaggagaggtcaacaaaggaaaaacagtcctcagaagaggaggaaaaagaaacaaggggcgttcagaaacggagaggaggttctacagtcccgaaagatggacccgtgagaccacaaaatgccgaagaggagaagcgcggattagatctgagggtgagcggatacctgaatcttgcagcagatctggcccacaactttacggatggactggcaataggcgcatcttttcgtggtgggagaggcttggggattttaacaaccatgaccgttcttttacatgaggtgccgcatgaggtaggagattttgctattctggtccagagtggctgctctaagaaacaggcaatgcgcttgcaactgctcaccgcagttggtgcccttgcgggcacggcttgcgctctccttactgagggcggtgctgtcggtagcgaaattgcaggtggcgctggccctggctgggtgctgccattcaccgcaggtggtttcatatacgttgcaacagtttccgttctccccgagctactgagagaagccagccctctgcagtccctacttgaagttctgggtcttctcggtggcgtgattatgatggtgctgattgcccaccttgagtag

SEQ ID NO: 135375 - DNA, 1125 bp, synthetic construct
  misc_feature 1..1125: note = Description of Artificial Sequence: Synthetic coding sequence
  source 1..1125: mol_type = other DNA
atggcccggggtctaggcgcacctcattgggtggccgtggggctcctaacatgggccactctagggttactcgtcgcaggacttggtggccatgatgatcttcatgatgatcttcaggaggacttccatgggcactcacatagtgcagatctaagcagctctatcttttgcccactgccatatcctaggggcgtggaactctctcctgccagcctgtccacaagcgacttggcgcagttttgctttaggtgggctcccggtaggtgtttcctccacctgataccacacgccctggagccccattcccatcacacattggaacagccaggacacggccactcacactcgggtcaagggcccatcttgagcgtaggcctgtgggttctgtctggcatagtcgcatttctcgttgtggaaaaattcgtgaggcacgtgaagggaggccacgggcatagtcacggacatgggcatgctcactcacatacccggggttctcatggccatgggcgtcaggagaggtcaactaaagaaaaacagagcagcgaagaggaggaaaaggagacccgcggtgtgcagaagcgtcggggaggctccaccgtgccaaaggacggacctgttcggcctcagaacgccgaggaagaaaaaaggggactggacctacgagtgagtggctatcttaatctcgctgcggacttggctcataattttactgatggtttggctatcggcgcctcattcagagggggaagaggccttggaattttgacaactatgacagtgctcctgcacgaggtgccccatgaagtcggagacttcgcaattcttgtccagtccggatgctccaagaaacaagctatgcggctccagttgctgaccgctgttggagcactggctggcactgcttgcgccctgctgaccgaggggggtgccgttggctctgagatcgccggtggtgccggccctggttgggtcctgccgttcactgctggaggcttcatctacgtggctacagtgtccgtgttgcctgagcttctgcgagaggctagtcccctgcagtcccttcttgaggttctgggccttctcgggggagtgatcatgatggtactcattgcccaccttgaatag

SEQ ID NO: 135376 - DNA, 1353 bp, synthetic construct
  misc_feature 1..1353: note = Description of Artificial Sequence: Synthetic coding sequence
  source 1..1353: mol_type = other DNA
atggcccgcggactgggggctccacattgggtcgccgttggattgctgacttgggcaactctgggtttgcttgtggcgggactggggggccacgatgacttgcacgacgacctccaggaagattttcacggccacggccacacccacgagtccatctggcacggacacacccatgaccacgaccatggacattcccatgaagatcttcaccatggacattcacacgggtatagccacgaatccctttatcaccgtggccacggccacgaccacgaacacagccacgggggatacggggagtctggagctccaggaatcaagcaggatcttgatgccgtcactctctgggcatacgcgctgggggctactgttctgattagcgccgcaccgttctttgtgcttttcttaatccctgtggaaagcaactccccgaggcatcgctctctcttgcaaatccttctcagcttcgcctccggaggacttttaggcgatgcttttctccatctgatcccacatgcacttgaacctcatagccatcacaccctcgagcagccaggacacgggcattctcactctggtcaggggcctattctgtctgtggggctctgggttttatcgggcatagtggccttcttagtggtggagaaattcgtgcggcacgtgaaaggcggccacggacatagccatgggcacgggcatgcccattcccacactcgaggtagccacggacatgggcgccaggagcggtccaccaaagagaaacagtcatccgaagaggaagagaaagaaacccgtggagtgcaaaaacgcaggggagggtccactgttcccaaggatggccccgtgagaccacagaacgctgaggaggagaagaggggactcgaccttcgcgtgtcaggttatctgaacctcgccgccgatcttgcacacaactttacggacggcctggctattggcgcatccttcagaggcggacgaggcctgggtatattgaccaccatgacagtcctactgcatgaagtacctcacgaggtgggagatttcgctatattagtgcaatctggatgctcaaaaaagcaggccatgcgcctccagctgttgacggctgtgggagcattggccgggaccgcctgtgccctgctaaccgaaggtggcgctgtgggatccgaaattgcaggaggggcaggtcctgggtgggtcctcccattcacggctggcggatttatctacgtggcgacagtatctgtgctccctgagctgctgcgcgaggcctcacccctgcaatcccttctagaggtactgggactgcttggtggagtgattatgatggtgttaatcgctcacctggaatag

SEQ ID NO: 135377 - DNA, 1125 bp, synthetic construct
  misc_feature 1..1125: note = Description of Artificial Sequence: Synthetic coding sequence
  source 1..1125: mol_type = other DNA
atggcgaggggactgggtgccccccactgggtggccgtcggtctgctgacatgggctactctgggcctgctggtcgccggcctgggcggccatgatgacctacatgacgacctgcaagaagatttccacggccattcccacagtgcggacctgagctcatcaatcttttgccctcttccatatccgaggggagttgagctctctcctgcgagtctcagcacatccgatttggcgcaattttgctttagatgggcacccggccgatgttttctgcacctgatcccgcatgcgctcgagccacactcccaccacaccctggagcagcctggacacggacactcacattctggtcagggcccgatcttaagcgtgggactctgggtgctgagcggcattgtggcattcttggttgtcgagaagtttgtaaggcatgtaaaagggggccacggccactctcatgggcacgggcatgcccactcccacaccaggggaagccacggccacgggcgccaggaacggtctactaaagagaaacagagttccgaggaggaagaaaaagagacaagaggggtccaaaagcgccggggcggaagcaccgtgccaaaagacggtcctgtgcggccacagaatgcagaggaggagaagcgcggcctcgacttgcgtgtgtctggctatttgaacctggctgcagacctggcccataatttcactgatggcctcgcaatcggcgcaagcttccgcggtggacgagggctgggtatcttgacgactatgaccgtccttctgcacgaggttccccacgaggtgggtgatttcgccattctggtacaaagtggatgttccaaaaagcaggcaatgcgacttcagctgttgaccgctgtaggagctctcgccggcacagcctgtgctctgctcaccgaaggaggagcagtgggatctgaaattgctggcggagcaggtcctgggtgggtgctgccatttaccgcagggggctttatctacgtggccactgtgtccgtcctgcctgagctgctgcgcgaggcaagcccattgcagagtcttctggaagttctcgggctgctgggcggcgttattatgatggtgctaatcgcacatttggagtag

SEQ ID NO: 135378 - DNA, 1125 bp, synthetic construct
  misc_feature 1..1125: note = Description of Artificial Sequence: Synthetic coding sequence
  source 1..1125: mol_type = other DNA
atggcccgcggtcttggtgctccacattgggttgccgtggggctgcttacctgggcgactctcggtcttttggtggcaggccttggaggccacgacgatctgcatgatgacctccaggaagattttcatggccacagccattccgccgacctgtcgtcaagcattttctgccccctcccatatccgaggggggtagaactgtcacccgccagcctctccactagcgacttggcccagttctgctttcgctgggctccgggtcgatgtttccttcatctgattcctcatgcactggagccacattctcaccataccttagaacagcctggtcatggacactcccattctggacaaggaccaattctgtccgtcggactgtgggttttatccggaattgttgcctttctggtggttgagaagttcgtacggcacgtgaagggcgggcatgggcacagccacggccatgggcatgcacactcccatactcggggctctcacggtcatgggcgacaggagagatccacgaaggagaaacagagtagtgaggaggaagaaaaggagacacgcggcgtccagaagcgtagaggggggagcaccgtcccaaaagatggacctgttcggccacagaatgctgaagaggagaaacgcggtctggatctcagagtttcggggtacttaaatctggcagccgaccttgcgcataacttcaccgatggtctggccatcggagcctcctttcgcggaggccgagggttgggaatcctaactactatgacagtccttcttcatgaggttcctcacgaggtcggtgacttcgctatactcgtgcaaagcggctgctcaaagaaacaggccatgagactgcaactgttgacagcggttggtgctctagctggtaccgcctgcgcccttctcacagagggcggagcagtgggatcggaaatagccggaggcgcaggccccggatgggtgttgccttttacggccggaggttttatctacgttgcgactgtatccgttctgcccgaactcttgagagaagcatcgcctctccaaagcctcctggaggtgttgggactactgggcggcgtgattatgatggtgttaattgcacaccttgagtag

SEQ ID NO: 135379 - DNA, 1353 bp, synthetic construct
  misc_feature 1..1353: note = Description of Artificial Sequence: Synthetic coding sequence
  source 1..1353: mol_type = other DNA
atggccaggggactcggggcgccacactgggttgccgtcggactgctgacgtgggcgacactgggactcctggtggctggtctgggaggtcacgacgatcttcacgatgatttgcaggaggatttccatgggcatgggcatactcatgaatcaatatggcatggacacactcatgatcatgaccacgggcactcccacgaagacttgcaccatggccacagtcacgggtattcacacgaaagcttatatcatcggggccacgggcacgatcatgagcactcccatggaggatacggagaaagcggcgctcctggcataaaacaggatctcgacgcagtcaccctctgggcctacgctctgggagcaacggtgctgattagcgccgccccgttcttcgtgctgtttctgatccctgtcgaaagtaattctcccagacaccgctcattactgcagattctactgtccttcgccagcggcgggctgctgggagacgcatttctgcacctgatccctcatgccctcgagccacactcccaccacaccctggaacagccggggcacggccacagtcacagcggccaaggccccattttgtccgttggcctgtgggtactttcaggtatcgtcgcctttctggtggtggagaaatttgtcaggcatgttaagggcggccatggacattcgcatggccatgggcatgcccactcacatacaagggggtcccacggccacggtcgccaagaacgctctaccaaggagaaacaatctagcgaagaagaagaaaaggagacaagaggcgtccagaaacggcggggaggtagcaccgtaccaaaggatggtccggttagaccccaaaatgccgaggaggaaaagcgaggtctggacctgagagtgagcggctatctgaacctcgctgccgacctagcacataacttcaccgacgggctcgctataggtgcatcttttcgaggcggacgtgggctgggcatcctgaccaccatgacagtgcttctccacgaggtgccacacgaggttggcgatttcgccattctcgttcagtccggatgttccaaaaagcaggccatgcggctacagctgctgaccgctgtgggcgcactggccgggacagcctgcgccctcctgacagaaggaggcgctgtgggttctgagatcgcaggcggcgcaggacccgggtgggtgcttccctttaccgcaggaggcttcatttacgtggccactgtgagcgtcctccctgagctcctgagagaagcctcacccttgcagtctttgctcgaagtcctcggcctgctggggggggtcataatgatggttctgatcgctcatctggagtag

SEQ ID NO: 135380 - DNA, 1353 bp, synthetic construct
  misc_feature 1..1353: note = Description of Artificial Sequence: Synthetic coding sequence
  source 1..1353: mol_type = other DNA
atggctaggggcctcggggccccccattgggtggctgttggcctgctgacatgggccaccttagggctactcgtcgccggtttagggggacacgatgaccttcatgacgacttacaggaagattttcacggccacggccatacccacgagtcaatctggcatggtcacacacatgaccacgatcacggccattctcacgaggatctgcatcatggccattcacacggttattcacatgagtccctgtatcatagaggccatggccacgatcacgagcacagtcatggaggctacggcgaaagcggcgcccctggcatcaagcaggacctcgacgcagtgaccctatgggcttacgctctgggcgctactgtgctcatcagcgcagcccctttcttcgtgttgttcctgatcccggtcgagagtaactcccctcggcatcggtcgctgttacagatcctgttgagctttgcatccggtggactgcttggcgatgctttcctgcacctgataccgcacgccctggaacctcactcgcaccatactttggagcaaccgggacacggccattcccactccgggcagggcccaattctctctgtcggactatgggtgctgtccgggattgtggccttcctcgttgtggaaaagttcgtgaggcatgttaaaggtggccatggccattcgcacggccatggccacgcccattcacacacaagaggaagccacggtcatggccgccaggagagatccacaaaagaaaagcaaagcagcgaagaagaggagaaagagactcgaggggtgcaaaaaaggcgcgggggctctactgtcccaaaggacggccccgtgcgcccccagaatgcggaggaagaaaagcggggcctggacttgcgagttagcgggtatctcaacttagctgctgatcttgctcataacttcaccgatgggctcgccataggtgctagctttcgggggggccgcggtctgggcattttgaccacaatgacagtcttgctgcatgaagtgccgcatgaggtgggagactttgcgattttggtacaaagcgggtgcagtaagaaacaggcaatgcgcctgcaactcctcactgctgttggcgctctagccggaaccgcttgcgctctccttactgagggtggagccgtgggctctgagatcgcaggtggtgccggtccgggatgggtcctccccttcaccgcaggcggcttcatatacgtcgccaccgtttctgttttgcccgaactactgcgtgaggccagccccttacaaagtctactggaagtactgggcctcctgggcggtgttatcatgatggtgctgatcgctcacctcgagtag

SEQ ID NO: 135381 - DNA, 1125 bp, synthetic construct
  misc_feature 1..1125: note = Description of Artificial Sequence: Synthetic coding sequence
  source 1..1125: mol_type = other DNA
atggcccggggcctcggtgcgccgcattgggtggctgtgggtttacttacctgggcgacgttgggcctgctggtggccggccttggagggcacgatgacctgcacgacgatctgcaggaggatttccacggacatagccactctgctgacctgagctctagcattttctgccctctgccttaccccagaggagtggaactctcaccagcatcactatcaactagtgacctggcccagttctgcttccggtgggctcccggacgctgctttctgcatctaatcccccacgcccttgagccacacagccaccacacccttgaacagcccggacatgggcactcccattccggccagggcccaattctaagtgttggactgtgggtgttatcaggcatcgtggcgtttctcgtggtcgaaaaattcgtgcggcatgtgaagggcggtcatggccactctcacgggcatgggcatgcccattctcacactcgcggctcgcatgggcacggacggcaagagagatcaaccaaagagaagcagtctagcgaggaagaggaaaaagaaacaagaggcgtccaaaagcgccgcggcgggtcgacggtgccgaaggacggccccgttcggccacagaacgccgaagaagaaaagaggggactggacttgagggtgagcggataccttaatctggccgcagaccttgctcacaacttcactgatggtcttgctattggcgccagcttccgtggcggccgcgggttgggaatcctcactactatgacagtactccttcacgaggtgccccacgaagttggcgactttgctatcctcgtgcagagcgggtgcagtaagaaacaggccatgcggctgcagctgctgactgcggtaggggcactcgccggcaccgcctgcgctcttctgactgaaggtggcgccgtggggtccgaaatcgcaggcggggccggcccagggtgggttctgccttttacagctggaggttttatctacgttgccactgtgtctgtgctccccgagctgctccgtgaggcttctccactacagagcctgctcgaggtgctgggcctcctaggaggtgtgatcatgatggtactgatcgcccatctggagtag

SEQ ID NO: 135382 - DNA, 1353 bp, synthetic construct
  misc_feature 1..1353: note = Description of Artificial Sequence: Synthetic coding sequence
  source 1..1353: mol_type = other DNA
atggcccgcgggctgggtgccccccattgggtggcggtcggacttctcacctgggcaacactgggcctgctcgtggccggactgggaggacatgatgatctgcatgatgatttgcaagaggactttcatggacacggccatacccatgaatccatttggcacgggcacacacatgaccacgatcacggacactcgcacgaggacttgcatcacgggcacagccacgggtactcacacgaatccctatatcatcgtggccatggccacgaccacgagcattctcatggcgggtacggagaaagcggcgcacctggtattaaacaagacctcgatgccgtcactctctgggcctatgctctgggggctacggtgttgatttctgctgcccccttctttgtgctgtttctgatcccagtggagtccaatagcccacgccaccggtcactgctgcagatccttctcagttttgcttccgggggcctgcttggagacgctttcctgcacctgatcccacacgcgcttgagcctcacagccaccacacccttgagcagcccggtcacgggcactcacattcaggccaaggcccaatactgtcagtcggtctgtgggtactatctggcatagtcgctttccttgtagtcgagaagtttgtacgtcacgtgaaaggtggacatgggcattcacatggccatggtcacgcccattcacacacccgcggctcccacggacacggacgtcaggagaggagtactaaagagaaacaatcatctgaagaagaagagaaggagacccgcggagtgcaaaagaggagagggggttcaaccgtcccaaaggacgggcccgtgcggccacaaaatgcagaagaagagaaaagaggactagatctcagggtctctggctatttaaatctggccgctgacctggctcacaatttcactgacgggcttgccattggtgctagcttccgcggtggcagggggctcgggatactcacgaccatgaccgtgcttctgcacgaagttccgcatgaggttggggattttgcaatcctcgtgcagtcaggttgcagtaagaaacaggccatgagactgcagctgctgacagccgtgggagctctggctggcacagcctgcgccctgttgaccgagggtggcgccgtcggttcggaaatcgccggtggagccggccctggctgggtcctgcctttcacggccgggggctttatttacgtggcaaccgtgtctgtcctgcctgagctgctccgcgaggccagtcctcttcaaagcttgctggaggtcctcggattgctaggtggtgtaatcatgatggtgctgattgctcatctggagtag

SEQ ID NO: 135383 - DNA, 1353 bp, synthetic construct
  misc_feature 1..1353: note = Description of Artificial Sequence: Synthetic coding sequence
  source 1..1353: mol_type = other DNA
atggcacgaggcctgggcgctccacactgggtggccgtaggcctgctcacttgggccactctgggccttttggtcgctggtctagggggccacgatgatcttcacgatgatcttcaggaagattttcacgggcacggacacacgcacgagtccatttggcatggccacacacacgaccatgaccatggtcactcccacgaagacctccaccatggccactcacacggctacagtcatgagtccctgtaccatagaggtcatgggcacgatcatgaacacagtcacggcgggtacggagagtctggggcacctggaataaaacaggacctagacgccgtgaccctctgggcctacgctctgggcgccacagttctcatctctgccgccccattctttgttttattcctgattccagtcgaatccaattcaccacgccataggtcactgcttcagatattactcagctttgccagtggtggcttgctgggcgatgcctttctgcacctgatccctcacgctttagagccacatagtcatcacacgctcgaacaacccgggcatggccattctcattccggccaggggcctatcttgtctgtcggattgtgggtgctcagcggcattgttgccttcctcgttgtagaaaaatttgtaagacacgttaaaggtgggcacgggcacagccacggtcatgggcatgcccactcccatacaaggggtagtcatggccacggacgacaggagcgtagcacgaaagaaaaacagtctagcgaagaagaggaaaaggagactagaggcgtgcagaagcgacgtggagggagtactgtcccgaaggacggaccagtgcgcccacagaacgccgaggaggagaagcgaggactcgaccttcgcgtctctggttacctcaacttagccgctgatttagcccataatttcactgacggcttggccatcggggcaagtttccgagggggtcgaggactaggtatcttgactacaatgactgtgctcctgcatgaggtaccccatgaggtcggcgatttcgccatactcgtccagagcggctgctctaagaagcaggccatgcggctgcagctgctgactgcagtgggggcattagctgggacggcttgtgccctcttgacagagggaggggcagtgggtagcgagatagcgggtggtgctggccctgggtgggtgctcccctttaccgcaggtggcttcatctatgtggctaccgtctcggtgctgcctgagctcctccgcgaagcatctcccttacagtctcttctcgaagtgcttggactgctgggaggggtcatcatgatggtgttaatcgctcacctggagtag

SEQ ID NO: 135384 - DNA, 1125 bp, synthetic construct
  misc_feature 1..1125: note = Description of Artificial Sequence: Synthetic coding sequence
  source 1..1125: mol_type = other DNA
atggcccgtggactcggtgccccacattgggtggccgtcgggctgctgacctgggcgaccctgggcctgcttgtggcagggctgggaggacacgacgacctgcacgacgatttgcaggaagactttcatggccacagtcattccgctgacctcagctcttccatcttttgtcccctgccataccccagaggagtcgagttatccccagcctctctctccacctccgatctggcccagttttgcttccgctgggcaccaggtcgctgctttctccatctgataccacacgctctggaacctcacagccaccacactttggagcagccaggacacggacattcgcactctgggcaaggccctatcctgtcagttggcttgtgggtactttccggaatcgttgcctttttagtagtggagaagtttgttcggcacgtgaaaggcggacatgggcactctcatggccacggacacgcccattcccatactagagggtctcatggacatggtcggcaggagaggagcaccaaggagaagcagtccagcgaagaagaagagaaagaaacaagaggagtccagaagcggagggggggctctacggtgcctaaggacgggcccgtcagaccacagaacgcagaagaggaaaaaagaggcctggatctgagagtgtctggctatctaaatctcgcagccgacctggcacataatttcaccgatggattagccatcggggcatcctttcgtggcggcagaggcctgggcatactaactaccatgacagtgttgctgcatgaggtgcctcacgaagtaggagactttgccatcctagtacagagtggatgctcgaagaagcaggccatgcggcttcagctgcttacagccgtaggggcactcgcgggtactgcttgcgccctgctgactgagggcggcgcagtgggaagcgagatcgctggcggcgcaggccctggatgggttctgcctttcacagcaggcggcttcatatacgtggctaccgtgtccgtgctgccagagcttctcagagaagcaagccccttgcagtccctgttagaggtcctggggctactgggaggagtcattatgatggttctgattgcgcatctggagtag

SEQ ID NO: 135385 - DNA, 2391 bp, synthetic construct
  misc_feature 1..2391: note = Description of Artificial Sequence: Synthetic coding sequence
  source 1..2391: mol_type = other DNA
atgctcgccccactgagaaatgccccaggcagggagggcgctactagcccgagccctcccaccgatgccaccggcagcctgggggagtgggacgtggatagaaatgttaagacagagggttgggtgtctaaggagcggatcagtaagttgcatagactgagaatggcagacatactctctcagtctgaaactctggcttcacaggacctctcaggagattttaagaagcctgctctacctgtgagccctgccgctagatccaaggctcccgcttcaagcagttcaaacccagaagaagtgcaaaaagaagggccaaccgccctgcaagactccaacagcggggagcccgacatacccccccctcaaccagactgcggggattttcgcagcttacaggaagagcagtcgcgtccacccaccgccgttagcagccccggcggcccagcacgcgcccctccataccaagaaccaccatggggtgggccagcaacagctccatactccctcgagacattgaaaggaggcaccatcctcggcacacggtctctcaagggaaccagctattgtctgtttgggcgactgtctggttgcgacgtgtgcctggaacatccctctgtgtcaaggtatcacgctgtgctgcagcatcgcgcttctggtcccgatggagagtgcgacagcaacgggccaggattctacttgtacgatttaggctctactcatggaaccttcctgaacaaaaccagaataccgcccaggacttattgtcgcgtccacgtgggccatgtggtcagattcggtggctccacccgtctgttcatccttcagggacccgaagaagaccgggaggccgagtcagaactgaccgtcactcagttgaaggagctgcggaaacagcagcagatactgctagaaaagaaaatgctaggggaagactcagacgaagaggaagagatggatacttctgaacggaagataaacgcaggcagccaggatgatgaaatgggctgtacctggggaatgggcgaagacgccgtcgaggacgatgctgaggaaaaccccatcgtgcttgaattccagcaggagcgcgaggccttctacataaaagatcccaaaaaggctttacagggtttttttgacagggaaggagaggaactcgagtatgagtttgacgagcagggccactcgacctggctctgtcgggtccgactgcctgtcgacgatagcaccgggaagcagttggttgccgaagcaatacacagcggaaaaaagaaagaggccatgattcagtgctcactggaagcatgtcgtatcctggatacactcgggctgctgagacaggaagcagttagccgtaagcggaaagctaagaactgggaagatgaggacttctacgattccgacgatgacacgtttcttgaccgcaccggccttatcgagaaaaaacggttgaatcgcatgaaaaaagccggaaagatcgacgaaaaacctgagacctttgaaagtctagtggcaaagctgaacgatgcggagcgcgagttgtctgagatctccgagagactgaaggcctcctcacaggtgctgtctgagagcccatcccaggactctctggacgcttttatgtctgagatgaagtcgggttctacattggacggggtgagccgcaagaagctgcaccttcgcaccttcgaactgagaaaagaacaacaaaggctgaaagggcttataaaaattgtgaaacccgctgagataccagagttaaagaagactgagacacaaactacaggcgccgaaaacaaagctaagaaactcaccttgcctttgtttggggcaatgaagggaggcagcaaattcaagctgaagaccgggactgtgggcaaactgccacccaagcggcccgaactgccgcccactctgatgcgcatgaaagatgagcccgaggtggaggaagaggaagaagaggaggaggaagaagagaaggagaaggaagagcacgaaaaaaagaaactggaggatgggtcactatcaaggccccagccagaaattgaaccagaggctgccgtccaagaaatgcgccccccaacggatctaacccacttcaaggagacccagacgcacgagaatatgtcacagctcagcgaggaggagcagaacaaggattaccaggattgtagcaagaccacctcactctgcgcaggtccctctgcatccaagaacgaatacgaaaagtccaggggggagttaaagaaaaaaaagacccccgggcctggcaaactgccccccactctgtcatccaagtaccccgaggatgacccggattattgcgtttgggtccccccggaaggccaatcaggggatggtaggacccacctaaacgataaatatggctattag

SEQ ID NO: 135386 - DNA, 3699 bp, synthetic construct
  misc_feature 1..3699: note = Description of Artificial Sequence: Synthetic coding sequence
  source 1..3699: mol_type = other DNA
atggactttctattgagaccacaacctgagcctgagtccctcgggccaggcacccctggattccctgagcaggaagaggacgaattacatcggaccttgggcgttgagagattcgaagagatactgcaggaagccggatccagaggaggcgaggagcccgggcgctcctacggcgaggaggacttcgaatatcacagacagagcagtcatcatatccatcatcccctgtccactcatctgcccccagatgcccggaggaggaaaacaccccagggacctggaagaaagcctcggcgcagaccgggggccagtcccaccggggagacccctaccatcgaggagggcgaggaggacgaggatgaagcctcagaggccgagggtgccagggcactgacccagccctctcctgtatcaactccaagctccgtgcagttttttcttcaggaagatgacagcgctgaccgaaaggccgagcgtacatctccctcgtcccctgcccctcttccacaccaagaggctacaccgcgggcatccaaaggggctcaagccggcactcaggtggaggaagctgaagccgaggccgtggccgtcgcctcaggcacagcaggtggcgatgacggaggcgctagtggaaggcctctgcccaaagcgcaacccggccaccgctcatataaccttcaggagcggcgacggatcggatctatgacaggcgcggaacaagccttgcttccgagggtgcccactgacgaaatcgaggcccagacactggccacggcagacttggacctcatgaaaagtcaccgtttcgaggacgtgccgggagtgcgcaggcaccttgttcgcaaaaacgccaaggggagcacccaaagtggaagagagggtcgcgaaccagggcctaccccacgcgcccgtcctcgagcaccccacaaaccgcacgaggtgtttgtagaactcaacgagctgctgctggacaaaaaccaggagccacaatggcgtgagaccgctcgatggatcaaattcgaagaggatgtggaagaggagaccgagcggtggggaaagcctcatgttgctagcttgagcttcaggtccctgttggaactgcggagaacacttgcacatggtgctgtgctgttggacctggatcagcaaacactcccgggggttgcccatcaagtggttgagcagatggtcatctccgaccaaatcaaagctgaggacagagccaacgtcttgagggccctccttctgaaacattctcacccttctgacgagaaagatttctcatttccgaggaatatcagtgcagggtccctgggctccctgctagggcatcaccatggacaaggggcagaatccgatcctcacgtgactgaacccctcatgggtggggtccccgaaaccaggctggaggttgagcgggaacgcgagctccccccccccgcaccaccagctgggattactcgaagcaagtctaagcacgagttgaagttgttggaaaagatacccgaaaatgctgaggcaacagtggtgcttgtggggtgtgttgagtttctgtccagaccaactatggcttttgtaagactgagagaggctgtcgaattggacgctgtgcttgaggtaccagtgcccgtccgcttcctgttcctgcttttaggtccatcctccgccaacatggactatcacgagataggccgcagcatttcaacattaatgtctgataaacagttccatgaggcagcttacctggccgacgagagagaagacctgctgaccgcaataaacgccttcctggactgctcagtagtgctcccgccttctgaagttcagggcgaagaactcctacggtcagtcgctcatttccagagacagatgctcaagaaacgggaggaacagggcaggctcctaccaactggcgccggattggagcccaaaagcgcccaggacaaggccctcctccagatggtagaggccgctggcgccgccgaggacgacccactccggcgcactgggaggccatttgggggtttaatcagagacgtacgtcgtaggtacccccactacctcagtgactttcgcgacgccctcgatccccagtgtctagcagcggtgattttcatttattttgctgcactgagtcccgcaatcacctttggcgggctccttggtgagaaaacacaagacctcattggtgtttctgagctgatcatgagcactgccctgcagggagtggtgttctgtctactaggcgcacagcccttactggtgatcggattcagtggccccctgttggtgttcgaggaagcctttttctccttctgctccagcaatcacctggagtatctagtcggcagggtgtggattggattttggctggtgttcctggccttgctgatggttgctctggagggtagcttcctggtacgcttcgttagcaggttcacgcaggagatctttgcttttctaataagtctgatctttatttatgaaactttttataaacttgtgaagattttccaggaacatcccttacacgggtgctccgccagcaactcatccgaagtagatggtggtgagaatatgacatgggctggcgccagacccacattaggtcctggaaaccggtcactagcaggacagtcaggccaggggaagccccgcggacagccaaataccgctttgctgtccctggtactgatggcagggactttttttatcgccttcttcctgagaaaattcaaaaacagtcgcttctttccaggcaggatccggcgcgtaatcggcgatttcggagtccctatcgcaatcttgataatggttctggtggactatagtatcgaggacacttacacccagaaactctcggttccttctggtttcagtgtgaccgccccagaaaaacgtggttgggtgataaaccccctcggggagaagagtccgtttcccgtgtggatgatggtggccagtctgctacctgccattctggttttcatactgatctttatggagacccaaattacaactttgatcatctctaaaaaggagaggatgctacaaaagggatccggatttcatttggatctgctgctcattgtcgctatgggagggatctgcgctctattcggactgccctggcttgcagccgccactgtaagaagcgttacacatgccaatgcactgactgtgatgtccaaggcggtggctccaggcgataaacccaaaatccaagaggttaaggagcagagggtgaccggtctcctggtggccttgctcgtggggctttccatagtgataggtgacctcctgcggcaaatcccgctggccgtattattcggcatcttcttgtacatgggggtgacgagccttaatggcattcagttctacgaacgcctacacctgttgctgatgcccccaaagcatcatcctgacgttacttacgtgaagaaagtcaggacattgaggatgcaccttttcaccgccctgcagctgctgtgcctggccctgctgtgggctgttatgtcaacagcggcttccctcgcattccctttcattttaatcctgacagtgcctctgagaatggtagtgctgacccgcattttcactgacagggagatgaagtgcctcgacgccaacgaggccgaacctgtctttgacgagcgggagggtgtggatgagtacaacgaaatgcccatgccagtgtag

SEQ ID NO: 135387 - DNA, 3684 bp, synthetic construct
  misc_feature 1..3684: note = Description of Artificial Sequence: Synthetic coding sequence
  source 1..3684: mol_type = other DNA
atgacacagccggagcccgagagcttgggccctggaactcctggctttccagagcaagaagaggacgagctgcatcgaactctaggagtggagcgctttgaggagattctgcaggaagccgggtcgcgcggaggagaggagcctggccgttcctatggcgaggaagattttgagtatcatcgtcaatcttcccaccatattcaccatccactgtccacacacctcccccccgatgcccgcaggcgaaagaccccacaaggccctggcaggaaaccccgacggcgcccaggcgcctctccgacaggagagactcctacaatcgaggaaggcgaagaggatgaggatgaagcgtcagaggccgaaggggcaagagctttaacccagcctagccccgtgagtacgccttcaagtgtccagttcttcctacaggaggacgacagcgccgatagaaaggcggagcgcacttctccctccagccctgcccccctcccccatcaagaggccacacctcgtgcatccaagggagctcaggcagggactcaggtcgaagaagccgaggccgaggccgtggcagttgccagtggaactgccggaggcgacgatggcggggcgtccggtaggcctctgcccaaagcgcagcccgggcacaggtcctacaacctgcaggagagaaggcgcataggctctatgaccggagctgaacaggcactgctgccccgggtgcccaccgacgaaatcgaggcccagacgctggcaactgccgacctagatctaatgaagagccaccgcttcgaagatgttccaggcgtcaggcgccacttagttcgaaagaatgcaaaagggtctacccaaagcggcagggagggaagggagcctgggcctactccaagagccagacctcgggcccctcataagcctcacgaagtgtttgtggaacttaatgaactgctcctggataagaaccaggagcctcagtggcgggaaacagcacgttggatcaaattcgaggaggatgtggaagaggagaccgaacgctggggaaaacctcatgtggcgtccctgagttttaggagccttctggaactgcggagaactttagctcacggcgcagtccttcttgatctggatcagcaaaccctcccaggagtcgctcatcaggtggtcgaacaaatggtgatctcagaccagattaaggctgaagacagagccaacgtcctaagagcgctgctgcttaagcatagtcaccccagtgacgaaaaggactttagcttcccgagaaatatctcagccggatccctgggctccctgctggggcaccaccacggacaaggcgcagagagtgaccctcatgtcaccgagcccctgatgggcggagttccagaaaccaggttggaggtggagagggaacgcgaactgcctcccccagcgccccctgctggtattacaagaagcaagagtaagcacgaactgaaattgctggagaagatacccgagaacgctgaggccactgtagttctggtggggtgtgtggaatttctttctagacccactatggcgtttgttcggctaagagaggccgttgagctcgatgcggtgctagaagtgcctgtgcccgtcagattcctgttcttgctcctggggccatccagtgcaaacatggattatcacgaaattggtcgaagcattagcacccttatgtccgataagcaatttcacgaggccgcttacctcgccgatgagcgtgaggacctccttaccgcaattaatgccttcctggactgtagcgtggtgttacccccaagtgaagtgcaaggagaggagctgcttcgctcagtggctcactttcagcggcagatgcttaagaaacgggaagagcagggccgtctgttacctacgggagcaggactggaaccaaaaagtgcacaagacaaggctctcttacaaatggtggaggcagcaggagccgccgaagacgacccactcagacgcacagggagaccattcggcggtctgattcgagacgtgaggcggagataccctcactatctgtcggatttccgcgacgcgttggatccacagtgtctcgcagcggtgatctttatctactttgctgctttgtcacccgccataacattcggtgggcttctaggcgaaaagacccaggatctgatcggggtatccgaactcattatgagcaccgcacttcaaggcgtggtattctgtttactgggagctcagccgctccttgttataggattcagtggaccgctgctggttttcgaagaagccttctttagtttttgctcctccaaccatttggaatacctggtgggacgcgtatggatcggtttttggctggtctttcttgcccttctgatggtcgccctggagggctcattcctcgtgagattcgtctctcgcttcacccaggagatcttcgcttttcttatcagcttgatttttatttacgaaaccttctacaagttagtgaaaatcttccaggagcacccactgcatggatgttccgccagcaattcgtcggaggtggatggtggcgagaatatgacttgggctggcgcccgccccacgctgggacccggaaatcggagtctggcaggccagtccggacaggggaagcccagggggcaacccaatactgctcttctttccctcgtgctgatggcaggtacgttttttatcgctttctttctcaggaaatttaagaatagtcgattcttccccggcaggatccggagagtcattggagattttggggtgcccatcgcaatcttgatcatggttttagtggattattccattgaagacacctatactcagaaattgagtgtgccctccggcttttcagttaccgctcctgaaaaacgcggatgggttatcaatccattgggagagaaatccccatttcctgtctggatgatggtagcttctcttctaccagcaattctcgtgtttatcttgatcttcatggaaactcagattacaacactcattatatccaaaaaggagagaatgctgcagaaaggaagcgggttccacctagatctgctgctcatagtagcgatgggagggatctgcgcccttttcggcctcccctggcttgctgctgccacggtccgaagcgtgacccatgccaatgccttaacagtgatgagcaaggctgtggcaccaggcgataagccaaagattcaggaggtgaaggaacagcgcgtcacggggctgctagtagccctcctagtgggactgtcaatcgtgataggagacctcctgcggcagatcccgttggcagtgcttttcggaatcttcctgtacatgggtgtgacctccttaaatggcatacagttctacgaaagactgcacttgcttctgatgccacctaagcatcaccctgatgtgacatacgtgaagaaggtgagaactctccgcatgcatctattcaccgccctgcagctcctgtgtcttgctctgctgtgggccgtgatgtcaaccgctgcctcactggcctttccttttatcctgattctcaccgtgcctctacgaatggtcgtcttaacccgtatcttcactgacagagaaatgaaatgcctggacgctaacgaggccgagccggtgtttgacgagagagagggcgtcgacgagtacaatgagatgcctatgccagtctag

SEQ ID NO: 135388 - DNA, 2406 bp, synthetic construct
  misc_feature 1..2406: note = Description of Artificial Sequence: Synthetic coding sequence
  source 1..2406: mol_type = other DNA
gtcatggaggtggtcgaggccgaaaagatagtattactaacttcagcgagatttctgttcctgttgcttggacccgcgggcaaagctccacagtatcacgaaatcggaagatcgattgccactctgatgactgacgagatcttccacgatgtggcttataaggccaaagacagaaatgatcttctgagcggaattgacgagtttctggatcaagtgaccgtgttgccccccggagagtgggaccccagcatccgcatagaacctcctaaatcagttccctcccaagagaaaagaaaaattcctgttttccataatggctccacccccaccctgggagagacacctaaggaggccgcacaccatgcaggccctgagctgcagcggacgggacgtctcttcggaggcctgatcctggatatcaagcgaaaggcccccttcttcctgtcagactttaaggatgcactgtccttacaatgtctagcctcgatcctgttcctgtactgcgcctgtatgtccccggtgatcacatttggagggctcttaggggaggccacagagggaagaatatccgccatagagtctcttttcggggcttctctcaccggcattgcatattccctctttgctggccagccactcacgatcctcggcagtacgggacccgtgttagtcttcgaaaagatcttatacaaattctgcagggactaccagctctcctacctcagtctcaggaccagcataggtctatggacatcgttcctgtgtatcgtgctggtcgcgacagatgcaagcagtctggtgtgctacatcacgcgttttacagaggaggctttcgctgccttgatctgcattatttttatctacgaggctctggaaaagctcttcgatttaggggaaacttacgccttcaatatgcataataacctcgacaaactcacctcttacagctgcgtgtgtacagaaccgccgaacccgtctaatgaaacactggctcagtggaaaaaggataatatcactgctcacaatattagctggaggaatctgactgtgtccgaatgtaagaagctgaggggtgttttcctcgggtctgcatgtggtcatcacgggccatacatccctgatgtgctcttctggtgcgtgatccttttcttcacaactttcttcttaagcagcttcctcaagcagtttaaaaccaagagatacttcccgacaaaggtgcgaagtactatttctgatttcgccgttttcttgacaatagttattatggttactatcgactacctcgttggcgtaccgtcacccaaactacatgtcccagaaaagtttgaacctacgcatccggaaagagggtggattatcagcccattgggggacaatccctggtggaccttgttaatcgcagcaatccccgccctgctttgcactatcctgatatttatggaccaacagatcacggccgtgatcattaaccggaaggagcataagctgaagaagggggccgggtatcatctggatctccttatggttggggtcatgcttggcgtctgttccgtcatgggcctgccttggttcgtcgccgcaacagtgctctctatttcacacgtaaactccctgaaagtagaaagcgagtgctccgcccctggtgaacagcctaaatttttgggtattcgtgagcagagggtgaccgggctcatgatcttcattctgatggggttgtctgtctttatgactagtgtcctgaagttcatccccatgcccgtgctgtacggagtttttctgtacatgggcgtgtcttcattgaaggggatccagctatttgatagaattaagttgtttggaatgccagcaaagcaccagcccgatttgatttaccttcgctatgtccctctgtggaaagtgcacattttcactgtgatccagcttacatgtctcgtccttctatgggtgattaaggtgtcagctgccgccgtcgtctttccaatgatggtgctggcgctggtgttcgtgcgtaaattaatggacttgtgttttacgaagagggagctaagctggctggacgatcttatgcctgaatctaagaagaaaaaagaggatgataaaaaaaaaaaggagaaggaggaggccgaacggatgttgcaggatgacgatgatactgttcacctgcctttcgagggcggaagtctgctccaaattcccgttaaggctctgaaatattccgtcgatccatccatagtcaacatcagcgacgaaatggcgaaaaccgcccaatggaaagcgctgtccatgaacacagaaaacgctaaggtcacccgtagcaatatgtcccctgataaacctgtgagcgtcaagatcagctttgaggatgagcctcggaagaaatatgtcgacgccgaaacttctctgtag

SEQ ID NO: 135389 - DNA, 2244 bp, synthetic construct
  misc_feature 1..2244: note = Description of Artificial Sequence: Synthetic coding sequence
  source 1..2244: mol_type = other DNA
atgcccctgggtaggcagtcgcaccggcatcatagaacccatggtcaaaaacataggcgaaggggcagaggtaagggagcttcacagggcgaggaaggacttgaagcactggcccatgacaccccctctcaacgggtgcagttcatcctgggcaccgaagaggatgaggagcacgttcctcacgaactgttcactgagctggacgaaatctgcatgaaggagggagaagatgccgagtggaaggaaactgctcggtggctgaagttcgaagaagatgtcgaggatggaggagaaaggtggtcaaaaccatacgtggctaccctcagtctgcacagcctgtttgaacttagaagctgcttgatcaatggaacagttctcctggatatgcacgcaaactctatcgaggagatctccgacctaatcctcgaccaacaagaactgtcatccgacctgaacgactccatgcgagtcaaggtaagagaggcgcttttaaaaaagcaccaccatcaaaatgaaaaaaagaggaacaaccttattccaatcgtgagatcattcgctgaagttggaaaaaagcagagcgatcctcacctgatggataagcacggccagaccgtgagtccccagtccgtgccaactactaacctcgaggttaagaacggggtcaactgtgaacatagtccagtggacctgagtaaggtcgacctacattttatgaaaaaaataccaaccggagcagaggcatccaacgtgttggttggagaagttgacattcttgaccggccaatcgtggcattcgtgcggttaagtccagctgtgttgctgtctggactgacggaggtgccaatccccaccaggtttcttttcattctgcttggtccggtgggcaagggccagcagtaccatgaaattggacgttcaatggcaaccatcatgaccgacgaaattttccacgatgtcgcctataaggccaaagagagagatgatttgctcgctggtatcgacgagtttttggatcaagtcactgtgctccctcctggagaatgggatcctagtattagaattgagccccctaagaatgtacccagccaggaaaaacggaagatgcccggtgtcccgaacggcaatgtatgccatatcgagcaagagccacacggtggtcattcaggccctgagttacagagaactggaagactctttgggggattggttctcgatattaagcgtaaagcaccctggtactggtccgactatagagatgctttatccctgcagtgtctcgccagcttcttgttcctttactgcgcctgcatgtcccctgtcatcacgtttggcggactcttaggtgaagccacagagggaagaatcagcgcaatcgagtccctctttggagcatctatgaccgggattgcatacagtctgttcgccggtcaggccctaacaatcctgggttccacggggcccgtcctagtctttgaaaaaatcctgttcaagttttgcaaggattacgccttgtcatacctgagcttgcgcgcatgcatcggcctatggacagccttcctgtgtatagttctggtcgctacagatgcatctagtctggtgtgctatatcacacggtttactgaagaagcttttgctagccttatttgtattatcttcatatacgaagctatagagaaactgattcacctggctgagacttaccccatccacatgcatagccagctggatcatctgtcattgtattattgccgctgcacacttcccgaaaacccaaataatcatactctacaatattggaaggatcataacattgtgacagcagaagtacactgggctaacctgacggtctctgaatgtcaggaaatgcacggtgagttcatgggatcagcctgtgggcatcatggaccctacacccccgacgtcctcttttggtcctgcattctcttctttactaccttcatcctgagttccaccttgaagacctttaagacaagcaggtacttcccaacccgcatggagtcttgtagtgtggcctggctggaatgcggcggcgtgattctcgcacactgcaacttgcgattgctacctagtagttgggattataggcacgcccctcctcagcctgccaacttttgcatctttagtcgtgatggcgtgtcaccgtgttggcccggatggtctcaatctctggatttggtgatatgccttcctagaccacccaaaatgctggggctgcaggcgtag

SEQ ID NO: 135390 - DNA, 3135 bp, synthetic construct
  misc_feature 1..3135: note = Description of Artificial Sequence: Synthetic coding sequence
  source 1..3135: mol_type = other DNA
atgccagccgcgggtagcaacgagcccgacggggtgctttcataccagcgccccgacgaagaagctgtcgtggaccaggggggcacttctacgatccttaatattcactatgagaaggaagagctcgaggggcatcgcacactgtacgtgggtgtgagaatgcccctggggcgacaatcccacagacatcatagaacccatgggcaaaagcatcgacgccgggggagggggaaaggcgcaagccagggagaggaaggattggaggcgcttgcacatgacacccctagccagcgtgtgcagtttatcctggggactgaagaggacgaggagcatgtccctcacgaactgttcacggagcttgatgagatttgcatgaaggagggcgaggatgccgaatggaaagaaacagcccgctggcttaagttcgaagaagatgtagaagacggaggcgagcgatggtcaaaaccttacgtcgccactctgtcactgcactccctgttcgaattgcgtagttgtctgattaacggtacggtgctcctagacatgcacgcgaatagcattgaggaaattagtgacctgatccttgaccagcaggagctaagctctgatcttaacgactctatgagagttaaggtcagggaagctttgcttaagaagcaccaccaccagaatgaaaagaaaaggaacaacctcattccaatcgttcgatccttcgctgaggtgggtaagaagcagagcgacccgcatctgatggacaaacatggccagaccgtgagtcctcagtctgtgcccaccaccaacctggaggttaaaaatggagtgaattgtgagcactccccagttgacctgagtaaggttgatctgcattttatgaagaagatccccactggtgctgaggcttccaacgtcctcgtgggcgaagtggatatcctggacaggcctatcgtggcttttgtgcgtctgagcccagcggtgctactcagcggattgaccgaggtgcccattccaaccagatttctgttcatcctgctagggcccgtgggaaaaggccaacaataccacgagataggccggtcgatggctactataatgactgacgaaatctttcacgatgtcgcctataaagctaaggaacgggatgacctgctggccgggatagacgagtttttagatcaggttaccgtgctgcccccgggcgaatgggatcccagtatccggatcgagccacccaagaacgtgcccagccaggagaagagaaagatgccaggagtccctaacggtaatgtttgccatatcgaacaggagccccacgggggtcactccgggccagagttgcagaggaccggtcgtctgtttggggggctggtgctggacatcaaacgcaaagctccttggtactggtccgactaccgcgacgccctgtctctccagtgtcttgctagcttcttgttcctttactgtgcctgcatgtcacccgtaatcacattcggcggcctgctgggggaggccaccgaaggccgtatctctgcaatcgaatcccttttcggtgcgtccatgacggggattgcctatagtctgttcgcgggtcaggcattaacaattcttggatcaacaggccctgttctggtgtttgagaaaattctcttcaagttctgtaaagactacgccctgagttacctgagcttgagggcttgtattggactgtggacagcattcctgtgcatcgtattggttgctacggacgcttccagcctggtatgctatatcacgagattcacagaagaggccttcgcttccctcatctgtattatttttatctacgaagctatcgagaagctgattcacctggctgagacctacccaatacacatgcactcccagctggaccacctatcactgtactattgtagatgtacacttcctgaaaatcctaacaaccatacgctccaatattggaaggatcataacatagtgacagccgaggtgcattgggccaacttgacagtgagcgagtgccaggagatgcacggagaattcatgggatctgcttgcggacaccatggcccatatactcccgacgtcctgttctggtcatgtattttatttttcaccacattcatcttgtcatccacactcaaaacattcaagaccagtaggtatttccctacacgtgtccgatctatggtatcagactttgctgtgtttttgacgatctttaccatggttattatcgatttcctgattggcgtcccctcacccaaattacaagtgccttcggtatttaagccaactcgggatgacagggggtggattattaatcctattggtccaaacccttggtggaccgtgatcgccgcaatcatcccagccctcctgtgcaccatcctcatctttatggatcaacagatcactgccgttattatcaatagaaaggaacacaagctgaaaaaaggttgtggctatcacctcgacctgttaatggttgcaattatgctgggtgtgtgttcaatcatgggccttccctggtttgtggctgccaccgtcctcagtattacgcatgtgaactctctcaagctcgagagcgaatgctccgccccaggtgagcagccaaagtttctgggcattcgcgaacagagggttacaggcctgatgatcttcgttctgatgggttgttctgtctttatgaccgctatcctgaaattcattcctatgcccgtgctatacggagtcttcctttacatgggagtgagctctcttcagggcatccagttctttgatcggttaaagctgttcggcatgcctgctaaacatcagcccgacttcatttaccttcggcacgtgccattacgtaaagtgcatctgttcacccttatccaacttacatgtctcgtgctcctgtgggttatcaaagcctcccccgcagccatcgtgtttccaatgatggtgctggcgttagtgttcgtgaggaaggttatggatctgtgtttctcaaagcgagagctcagctggctcgacgatctcatgcccgagtctaaaaagaaaaagttagatgatgccaagaaaaaggccaaagaagaggaggtgatcgtactggctcctaccgtatacctcggcgcaagcaattatcggacctag

SEQ ID NO: 135391 - DNA, 2736 bp, synthetic construct
  misc_feature 1..2736: note = Description of Artificial Sequence: Synthetic coding sequence
  source 1..2736: mol_type = other DNA
atggaagaactccaggatgactacgaagatatgatggaggagaatctggaacaagaggagtatgaagaccctgacattccagaatcacagatggaggagccagctgctcacgatacagaggccacagccaccgattatcacacaacctcccatccagggactcataaggtgtacgtggaactccaggaactcgtgatggacgagaagaatcaggagctccggtggatggaagccgcgagatgggtccagttggaggaaaatctgggggagaatggggcatggggacgaccccatctctcccacttaactttttggtcactcctggaacttcggcgggtctttacaaagggaaccgtactcttggacctgcaagagactagtctggctggggtggcaaatcaacttctcgaccgttttatcttcgaggaccagatccgaccacaagacagggaagagctgctgcgagcgttgcttctgaagcactcgcacgctggagagctggaggcactgggtggcgttaagcctgcagttttaacgcggtccggagacccctcgcagccactgctgccccagcatagttcgcttgaaacgcaactgttctgtgaacaaggcgacgggggaacggaaggccactccccatcaggtattctcgagaagattccacctgactccgaagcaacactggtcctcgtcggccgtgcagattttcttgagcagcctgtgctaggcttcgtgaggctacaggaagctgccgagttagaagctgtcgagctgcctgttcccatcagatttctcttcgttctactagggcccgaggctcctcatatcgactacactcagcttggaagagccgccgcaaccttaatgtccgagagagtattccgaattgatgcctacatggcccagtctaggggggaactgcttcatagcctggagggttttctggactgctccctcgtattacccccaacagacgccccatcagagcaagctttactgagtctcgtccctgtgcagcgggagctactccggaggcgttatcagagttctccagcgaaacccgactcttcattttataagggcctggatctcaatggagggcccgacgaccccctgcagcagacgggacaattgttcgggggtcttgtgagggacataagacgccgatatccttactatctcagtgacataactgacgctttttcaccccaagtgctcgccgccgtcatcttcatttatttcgctgccctgtctcccgccatcacttttggaggcctgcttggcgaaaaaactcggaaccaaatgggcgtctcggagctgcttatatctacagccgtgcaggggattctatttgccctattgggggcgcaaccactgctggtagttggattctccgggcccctactcgtgttcgaagaggcctttttttcattctgcgaaaccaatggcctcgagtatatcgtgggccgagtgtggattggcttctggctcattttactggtcgtcctcgtcgtggccttcgaaggctcttttctggtgcgcttcataagtcgctatacacaggagattttcagcttcctaatcagcctgattttcatctacgagacgttcagcaagcttatcaagatctttcaggatcacccattgcagaagacttacaactataacgttctcatggtgccgaagccccagggtcccctcccgaacaccgcacttctatccctggtactgatggcaggcaccttctttttcgcaatgatgctaaggaagttcaagaactctagctatttccccggcaagctgagaagggtcattggcgacttcggtgtccccatctctatcctcattatggtcctggtggacttcttcatccaggatacttatacccaaaagctctcggtccctgacggttttaaagtttctaactcttccgctcgagggtgggtgattcatcccctcggactgcgcagtgaattccctatctggatgatgttcgcctcagcattgcctgctctcctggtattcatactgatctttctcgaaagtcagattactactctgatcgtctctaagcccgaacgaaagatggtaaaagggtcggggttccacctcgacttgcttctggttgttgggatggggggtgtcgccgctctgttcgggatgccatggctcagcgcaactaccgttcggtcagtgacacatgcaaacgcgctcactgtgatggggaaggcatcgacacccggcgctgctgcacagattcaggaggttaaagagcagcgtatttccggcttgcttgtggccgtccttgtagggcttagtattttgatggagccaattctgagcagaatccccctggcagttctgttcgggattttcctgtacatgggcgtcacatctctgtccgggatacaactgtttgaccggattctgcttctgtttaagccccccaagtaccaccccgacgtgccctacgtcaagcgggtgaaaacctggagaatgcatttgttcacaggaatccagattatatgcctagctgtgctgtgggttgtgaaatctacgcccgccagcctggcactgccctttgtcttaattttaaccgtcccactgagaagagttctgctgccgctcatcttccgaaacgtggaactgcagtgtctggatgcagacgatgcaaaagctactttcgatgaagaggaaggacgcgacgagtacgacgaggtggcaatgccggtttag

SEQ ID NO: 135392 - DNA, 3480 bp, synthetic construct
  misc_feature 1..3480: note = Description of Artificial Sequence: Synthetic coding sequence
  source 1..3480: mol_type = other DNA
atgtcttcggccccacggaggccggcaaaaggtgcagactcattctgcacccccggccccgggcgtaaacccagaaggaggccaggtgcttcacccactggggagacccctacgatcgaggaaggagaagaagacgaagacgaggcttcagaggctgagggtgcccgggcccttacacagccaagtccggtcagtacaccgtcttctgtgcagtttttcctccaggaggatgatagtgctgatcgtaaggccgagcggaccagcccaagcagcccagccccgctcccacaccaggaggctactcccagagcaagcaagggagctcaagctggtactcaagtggaagaggccgaagccgaagccgtagcggtagctagcgggacagctgggggcgatgatggtggtgcatccggcagaccattgcctaaggcgcagccgggtcaccgatcctacaatttacaagagagacgccgaatcggcagtatgaccggcgccgaacaggccctgctccccagggtaccaaccgacgagattgaagctcagaccctggcaactgcagatctagacctgatgaaatcccatagatttgaggatgtgccaggcgtgagacgccatctggtccgcaaaaatgccaagggctctacgcagagcgggagagagggacgtgaaccaggcccaaccccaagagcccgaccgagagctcctcacaagcctcacgaggtgtttgtcgagcttaacgagctgctactagacaagaatcaagaaccacagtggagggagactgcccgatggatcaagtttgaagaggacgtggaagaagagactgagagatggggaaagccacatgtggcctccttgtctttccgtagcctccttgagctgcggaggactctcgcacatggagccgtgctgctggacctggaccaacagaccctacctggggtggctcaccaggtggtggagcagatggtcatctcagaccagataaaggctgaagaccgagccaacgtcttaagggccctgctcctgaaacactcccatccttcggatgagaaggacttttccttccctcgcaacatctctgcagggtcccttgggagtctgctgggtcatcaccacggccagggtgctgagtctgatccacacgtgaccgaacctttgatggggggtgtacctgagacgcgattggaggtagaacgggaaagagagctgccacctccagctccccctgccgggataacaaggagcaagtctaagcatgaattaaaacttctggaaaaaattccagagaatgccgaagcgaccgtcgtgctagtgggctgtgtagaattcctgagtagaccaactatggccttcgtaaggctgcgcgaggcagtggagctcgatgccgtcctggaagtgcccgttcctgtgaggtttcttttcttgctcctaggccccagcagtgccaatatggactaccatgagatcggaagatcaatatccacccttatgtcagacaagcaattccacgaagccgcgtatttagccgacgagagagaggacctccttacggccattaacgcattcctggattgttccgtggtgctgccgcctagtgaggtccagggagaggaacttctgcgttcagttgcccattttcaaaggcagatgctgaagaagcgggaagaacagggccgtctcctgccaaccggcgcaggcttggagcccaaatccgctcaggacaaggctctgctgcagatggtggaggccgctggtgctgcggaggacgatcctctgagaaggaccggccgaccttttggtgggcttataagagatgtgagaagacgttacccccattatctctccgacttccgggacgcccttgacccacagtgtctggcagccgttatttttatatactttgctgccctttcacccgctatcaccttcggggggctgttgggagagaagacccaggacctgattggcgtgagcgagctgatcatgtccactgcactgcaaggagtcgttttttgccttttgggcgctcagccattgttggtgatcggcttctctgggcccctcctggtgtttgaggaggctttcttttctttctgttccagcaaccacttagagtaccttgtgggcagggtgtggataggtttctggctggtcttccttgccctgctaatggtggcccttgaggggagctttctggtgcgattcgtatctcgattcacgcaggaaatattcgcgttcctcatcagcttgatcttcatttacgagactttttataaactagtgaagatcttccaagaacatccactgcacggatgttcggcctcgaactcttcagaggtagatgggggggagaacatgacatgggccggagcccggccaactctcggtccagggaatcgctccttggctgggcagtccggccaggggaagcctaggggccaacccaacacagctctcctgtcactcgtgctcatggctggtacgtttttcatcgccttttttctgagaaaattcaaaaatagtcgctttttccccgggagaatcaggcgagtcatcggcgattttggcgtgcccattgctatcctgatcatggtgcttgtagactactctattgaagatacatacactcagaaactgtccgtgccctcggggttttcagtgacagctccagaaaaaaggggttgggtaatcaaccctcttggagagaagtcaccctttcccgtgtggatgatggtcgccagtctactgcctgcaatcctggtgttcatcctcatttttatggagactcagatcactacactgattatttctaaaaaagagcgtatgcttcaaaaaggctcaggttttcacctagatctgcttctcatagtcgccatgggagggatctgtgctctgttcggactcccgtggctggccgcagcaacagtccgaagcgtcacacatgctaatgccctgaccgtcatgagtaaagcggtggcccccggggataagcctaaaattcaggaggtgaaggaacaaagggtcacaggccttttggtcgccctgcttgtggggctcagcattgtaatcggtgatctactgcgccagatcccattggcagtgctctttggcattttcctgtatatgggggtcacaagcctgaatggaatacaattctacgagcgcctgcacctcctgctaatgccacccaaacatcacccggacgtcacctatgtgaaaaaggtccgtacccttagaatgcacttgttcactgcgttacagctgctgtgcctcgctctgctgtgggccgtcatgtccacagccgccagtctcgccttccccttcatcctcattttgactgttcccttaaggatggttgtcctgacaagaatctttactgatcgcgaaatgaagtgcctcgatgctaacgaggccgaacctgtttttgacgagagggaaggagttgacgaatataatgagatgcctatgccagtctag

SEQ ID NO: 135393 - DNA, 3726 bp, synthetic construct
  misc_feature 1..3726: note = Description of Artificial Sequence: Synthetic coding sequence
  source 1..3726: mol_type = other DNA
atgagctccgccccacggaggcccgccaagggggcagactcgttttgtactcccgagccggaaagcttggggcccggcacccctgggttccctgagcaggaggaagacgagctgcatcggacactaggagttgagagatttgaggagatcctgcaggaggccggctctagggggggggaggaacccgggcggagctatggagaggaggattttgagtatcacaggcagtcctcacaccacatccaccatcccctgagcacccatctgccacctgatgccaggaggagaaagacaccccaaggccctggccggaaacccagacggcggcctggagcttctccaacaggagaaactcctacgatcgaggaaggggaggaagatgaagatgaggcctccgaagcagagggcgctcgagcactgacccaaccctcccccgtgtcaacaccctcatccgtccagtttttcttacaggaagacgactcggccgatagaaaagccgaaagaacgagccctagctccccggctcccctgccacatcaggaggccacacccagagcttcaaagggggcccaggccggcactcaggttgaagaggcagaagctgaagccgttgccgtggccagcggaactgccggtggcgacgacggaggcgcaagcggccgccccctgcctaaggcgcagcctgggcatcgttcctacaatctgcaggaacgcaggcgtattggttcgatgacaggcgccgagcaggccctgctgccgagggtaccaaccgatgagattgaggcccagaccctggccacagctgacctggacctgatgaagtcacaccgcttcgaagatgtgcccggtgtgcggcggcatctggtgagaaagaacgcaaagggatcaacccagtcaggccgggagggacgggagcccggacccacccctagggcccgtcccagagcccctcataaaccacacgaggtatttgtcgagctcaatgagctcctcctggataagaaccaggagccacaatggagagagacagcgcgctggatcaagtttgaagaagacgtggaagaggagacagaaagatggggcaaaccacacgttgcctccctgtcttttcgctcccttttggagctccgacgcacactcgctcacggagccgttcttctcgacctcgatcagcagacgctgccaggggtggcacaccaggtagttgagcagatggttatcagtgaccaaataaaagcggaggacagagccaatgtgctgcgggcactgctgctgaagcacagccacccatccgatgagaaggacttttcctttcccaggaatatatctgccgggagcctgggctctctcctaggacatcatcatggacagggggccgaatctgatccgcatgtgaccgaaccattgatgggcggtgtccccgaaactaggctcgaagtggaacgcgaacgggagctccctcctccagctcctcctgctgggattacccgcagcaagtcaaagcacgaactgaagctccttgaaaagataccagaaaatgcagaagctactgtagtgctcgtgggatgcgttgagtttctcagtcgccctacgatggccttcgtgcgattgagagaagcagttgagcttgacgccgtcctagaggtgccagtgcctgtgaggtttctattcctgcttttgggcccttctagcgcaaatatggactaccatgagattgggagatctatttctacgcttatgagcgataagcagttccatgaagccgcctatctcgccgacgaaagagaggatcttttgacggccatcaacgcctttctcgattgttctgtcgtcctccctccatctgaggtgcaaggcgaggagctcctccggagcgtagcacacttccaaagacaaatgctaaagaagcgggaggagcagggccggctcctacctacgggcgctgggctcgagccaaaatccgcacaggacaaggctttgctccagatggttgaggccgctggcgccgccgaggacgatccactcaggagaaccgggcggcctttcggcggcctaataagagatgtacgacggagatacccccactatctgagcgattttagggacgcacttgacccgcagtgtctggcggccgtcatttttatatacttcgctgctctatctccagctatcactttcggcggcctgctgggggagaagactcaggacctgatcggagtgagtgaactgattatgtcaacagcccttcaaggcgtagtcttttgtctcctcggtgctcagcccttgctcgtcataggcttctctggtcctcttctcgttttcgaggaggcctttttctccttctgcagttctaaccacttagagtacctggtcgggcgggtatggataggattctggcttgtgttccttgcactcttgatggtcgcactggagggcagttttctcgtaagatttgtgagcagattcacccaggaaatttttgcctttctgatctcactgatcttcatttacgagaccttctacaaacttgttaagatattccaggagcaccccctgcatggctgcagtgcatcaaactctagtgaagtagatggcggggagaatatgacctgggccggcgcacgccccacgttggggcccggtaaccgcagtctggccggccagtctggtcaggggaagcctcggggccagcccaatactgcccttcttagcctcgtgctgatggctggtacgttcttcatcgccttttttctccgcaagttcaaaaactctcgctttttcccaggacgtatacgacgggtgatcggcgacttcggggttcctatagcgatcctcatcatggtattggtggactactcaatagaggacacatatacacagaagctgagcgtgccctcgggattctctgtgacagctcccgaaaagagaggctgggtgatcaacccgctgggtgaaaagtctcctttccctgtctggatgatggtggctagcctactcccggctattctggtgtttatcctcatcttcatggaaacacagataaccactctgatcatttcaaaaaaggaacgaatgctacaaaagggctccggatttcaccttgacctgctgctgattgtggccatgggcgggatttgtgcattatttggcttgccatggctggccgcggcaaccgttcgatccgttacgcacgctaatgccctgacagttatgtctaaggccgtcgctcccggtgacaaacctaaaatccaggaggtaaaagagcaacgtgttacaggacttcttgtggccctgctggttgggttgagtattgtgatcggtgatctcctgaggcaaatacccctggctgtactgtttggcattttcctttacatgggcgtgacctcacttaatggcattcagttttatgaaaggcttcaccttttgctcatgcccccaaagcatcacccggatgtgacgtacgttaaaaaggtccggacactccggatgcatcttttcactgctctgcagctcctctgtctcgccctcctctgggctgttatgtcgactgctgcctccctggcctttccttttatactgattctcacagtgcctttacggatggtggttctcacccgaatattcactgatcgcgagatgaagtgtttggatgccaatgaagctgagcccgtattcgacgaaagggagggcgtggacgagtacaatgaaatgcctatgcctgtctag

SEQ ID NO: 135394 - DNA, 456 bp, synthetic construct
  misc_feature 1..456: note = Description of Artificial Sequence: Synthetic coding sequence
  source 1..456: mol_type = other DNA
atgtcctcagcaccgcgccgccccgccaagggcgcggactccttttgtactcctgagcccgagagcctgggcccgggtacccctggattcccagagcaggaggaggacgaacttcaccgtacccttggcgttgagagatttgaagagattctgcaggaggccggctcccggggcggagaagagccaggacgaagctacggtgaagaagactttgagtaccacagacagtcttctcaccatatacatcaccctctcagcacccacctcccccccgatgctagaagacggaagactccacagggccccggaagaaagcccagacggcggcctggagcgtcaccaacaggggaaactcccactatcgaggaaggtgaggaagatgaagatgaagcatcagaggccgaaggcgcacgtgccctcacacagcccagtccggtgtcgacccctagcagctag

SEQ ID NO: 135395 - DNA, 384 bp, synthetic construct
  misc_feature 1..384: note = Description of Artificial Sequence: Synthetic coding sequence
  source 1..384: mol_type = other DNA
atgagctcagcacctcgacgtcctgccaaaggcgccgattctttttgtaccccagagcctgaatcattaggtcctggaacccccggcttcccggagcaagaagaggatgagctgcaccgcacgctgggagtagagcggtttgaggagatcctgcaggaggccggatcacgaggaggtgaggagcctggtaggtcttatggtgaggaggattttgaatatcatagacagtcttcgcaccacatccaccatccactgtcaacgcacctgccacccgacgctcggaggcgcaaaactccgcagggacccgggcgtaagcctaggagaaggcccggagcttcgcctacaggagagacaccaactatagaggagggggaggaggattag

SEQ ID NO: 135396 - DNA, 438 bp, synthetic construct
  misc_feature 1..438: note = Description of Artificial Sequence: Synthetic coding sequence
  source 1..438: mol_type = other DNA
atgtcctcggctcctcggcgtcctgctaaaggagcagatagcttttgcactcccgagccagagagtctcggcccaggcacgcctggattccccgaacaagaggaggatgaattacacaggacactaggcgttgaacggttcgaggaaattctacaggaagctggctctcgaggaggagaggagccggggcggtcttacggggaggaggactttgagtatcaccggcaatcttcacaccacatacatcaccccctctcgacccaccttccacccgacgcccgcagaaggaaaactcctcagggacccggccgtaaacccagacggaggcctggcgctagccccaccggcgagacccccacaattgaagaaggagaagaggatgaggatgaagccagcgaagccgagggagctagagccttgactcagcccagcccgtag

SEQ ID NO: 135397 - DNA, 3726 bp, synthetic construct
  misc_feature 1..3726: note = Description of Artificial Sequence: Synthetic coding sequence
  source 1..3726: mol_type = other DNA
atgtcctctgcccctaggcgcccagccaaaggtgctgacagcttttgtacccccgagcccgaatccctcggaccgggtaccccgggctttcccgagcaagaggaagatgaactgcacagaaccctcggcgtggagcgtttcgaggagatcttacaagaagctgggagcagggggggcgaggaacccggccggtcctacggagaagaggattttgagtaccaccggcaatctagtcatcacattcatcacccactctcaacacacttaccccccgacgcccgcaggcgcaagacaccacaggggccaggccggaaacctagaaggcgacctggtgcctcgcctacaggggagactcccaccatcgaggagggggaggaagatgaggacgaagcatccgaagccgagggagcacgcgcactgacacagccttctccggtttctacaccatctagcgtgcagtttttcctgcaggaagacgactcagcagaccggaaagccgagaggacatcaccatcttctcctgctcccctccctcatcaggaggcgactcctcgggcgtcaaagggtgcacaggctggaacgcaagtggaggaagccgaggcggaggcagtcgccgtggcatcaggtactgctggaggggacgatggtggagcctctggtcggcccctgccgaaggcccagccagggcatcgcagttataacctccaagaaagacgtcgaattggttcaatgacgggtgcagagcaggctctgctgcctagggttcccacagacgaaattgaggcccagacactcgctaccgctgatctcgacctgatgaagagccacagattcgaagacgttccaggcgtccggcgtcaccttgttagaaagaacgcaaaaggttctacccagagcggacgtgagggacgcgagccgggaccaacacctcgcgcacgccctagagcaccgcataaaccacatgaggtttttgtggagctgaacgagctgctgctcgataagaatcaagagccacagtggcgggagacagcccgctggatcaagttcgaagaagacgttgaagaggagacggaaagatggggcaagccccacgtggcctcactttcattccgaagtcttctggaactaagacggacactggctcacggtgctgtcctgcttgacctggaccagcaaaccctgcccggtgtcgcccaccaagttgtggagcagatggtcatttcagatcagataaaagccgaggatagagcaaatgtgcttcgggcgctattgttgaaacactctcatcctagtgacgaaaaagatttttccttcccacggaatatctccgcagggagccttggttctctgctcggccatcaccacgggcagggggctgaatctgatccccatgtaacagagcccctgatgggcggagtcccggaaaccagactggaggtcgagcgagagagagagcttccgccaccagccccaccggctggtatcacgcgctctaagtcaaaacacgaacttaaattgcttgaaaagatccctgaaaacgctgaggccacagtggtgcttgtcgggtgtgttgaattcctcagccggccaaccatggcattcgtgcgattacgggaagcggtggaactggatgctgtgttggaggtgccagtacccgttagatttctcttcctcctgctgggaccctcatctgctaatatggattatcatgaaataggtaggtccatctctacactgatgtcagataagcagttccacgaggccgcctatttggccgacgaacgagaagacttgctcaccgcaataaatgctttcttggattgctcggttgtgctccctccctcagaggtacaaggtgaagagctgctgcgcagcgtggcgcattttcaaagacagatgttaaagaagcgcgaagagcagggccggctcttaccaacgggtgctggcctggaacccaaatccgcccaggacaaggctctcctgcagatggttgaagctgcaggcgccgctgaagatgaccccctccggagaaccggtcggccgttcggaggcttgatccgcgatgtccggcgtcgttatccacactatctcagtgattttcgcgacgcactggatccacaatgtttagccgcggtgatcttcatatactttgcggcgctgagcccagcaataactttcggcggcttacttggagagaagacacaagatctaattggagtgtctgagctgatcatgtccaccgccctgcagggcgtggtgttctgcttgctgggtgcccagcccctgctcgtgatcggatttagcggtccactgctggtctttgaagaagcgtttttctctttttgcagttctaatcacctggagtatttggttggtagagtttggattggattctggctcgtgtttctagctctgctgatggtcgcactagaaggctcatttctagttcggttcgtgagcaggtttactcaggaaatcttcgccttccttattagtctgattttcatttatgagaccttttataaattggtgaaaattttccaggagcatcccctgcatgggtgttcggcctccaattctagtgaagtggatggcggtgagaatatgacttgggctggggcccgcccaactctgggacccggcaataggtctctggcaggtcagagcggacagggaaaacccaggggacagcctaataccgccctcctcagtcttgtgctgatggctggcacatttttcattgccttctttttacgaaaatttaaaaattccagatttttccccggacggataaggcgggtgatcggtgacttcggagtccctatcgccatactaattatggtcctcgttgactattccattgaggacacatacacccagaagctgagcgtgccatcgggtttctcagtcacagcgcctgagaaacgcggctgggtgataaaccccctcggagagaagagtcccttccccgtgtggatgatggttgccagccttcttcctgcgattctggtctttatcctgatattcatggagacccaaatcaccacactgatcatctcaaagaaggaacgcatgctccagaaaggtagcggattccacctagacctgctgctgatcgtcgcaatgggcggcatttgcgccttattcggactaccgtggctcgccgccgccacagttaggtctgtgacccacgcaaacgctttgactgtcatgtctaaagccgtggcccccggggataagcccaaaattcaagaagttaaagagcagagagtaacaggattgctggtagctctcctcgtgggactgtctatcgtaatcggtgaccttctgagacaaatcccgttagccgtgctcttcggaatctttttgtatatgggagttacctccctgaacggaattcaattttacgaacgccttcacctgcttttgatgccccccaagcaccaccccgatgtcacgtatgttaagaaggtacgaacattaaggatgcatctgtttacagccttacagctgctgtgtctcgccctcttatgggcagtgatgtctacagctgcgagcctggcattcccattcatcctgatattgactgtccccctgaggatggtagttctcacaagaattttcaccgatagagagatgaaatgtctagatgccaacgaggccgagcccgtgtttgacgagcgtgaaggcgtggatgaatacaacgagatgcccatgcccgtctag

SEQ ID NO: 135398 - DNA, 213 bp, synthetic construct
  misc_feature 1..213: note = Description of Artificial Sequence: Synthetic coding sequence
  source 1..213: mol_type = other DNA
atgtccagcgcccccagacggcccgccaaaggcgcagactcattctgcactccagaacctgagtctttaggccctggaactcccgggtttcccgagcaggaagaagacgagctccacagaactctcggggtcgaaagattcgaggaaatcctgcaggaggcagggtccagggggggtgaggagcctgggcggagttatggcgaggaggactag

SEQ ID NO: 135399 - DNA, 510 bp, synthetic construct
  misc_feature 1..510: note = Description of Artificial Sequence: Synthetic coding sequence
  source 1..510: mol_type = other DNA
atgagctctgcaccgcgtaggcccgccaagggagcggattctttttgcacgcctgaacccgagtcgctagggcccgggactcctggcttccctgagcaggaggaggacgagttgcaccgcaccttaggagtggaacgcttcgaggagattttgcaggaagccggttctaggggtggcgaagagcccggacgctcctacggggaagaggacttcgagtaccaccgccagtccagccaccacatccatcaccccttgagtacacatttaccacctgatgccaggcggagaaagactccacagggtccagggcgaaagccacgacgcagacctggagcctcccccaccggtgaaacacccacgattgaggagggtgaggaggacgaggatgaggcttctgaggccgagggagcccgagctctcacccaaccctcgcccgtcagcaccccatcttctgtgcagttcttcctgcaagaggatgatagcgcggaccggaaggccgagcggacttag

SEQ ID NO: 135400 - DNA, 3240 bp, synthetic construct
  misc_feature 1..3240: note = Description of Artificial Sequence: Synthetic coding sequence
  source 1..3240: mol_type = other DNA
atggaggatgaggcggttctcgaccggggcgcctcattcctcaaacacgtttgtgacgaggaagaagtggagggccatcacacgatatacataggtgttcatgtgcccaagagctataggaggcgccgtagacacaagcggaagaccgggcacaaagagaaaaaggaaaaagagcgaattagtgagaactattccgataaaagcgacatcgagaatgccgatgagagcagctcctccattctgaagcctctaattagcccggctgcagaacggattaggttcatcctcggagaagaggacgactcccctgcaccaccccagctgtttactgagcttgatgagttacttgccgtggacggccaggagatggagtggaaagagactgctagatggattaaatttgaagagaaggttgagcaggggggtgaacgatggtctaagccacacgtggccacactgagcttgcattctctgtttgaactccgtacttgtatggaaaaggggtccataatgctggacagagaggcatcgtcgctgcctcagctcgtggagatgattgtcgatcatcagatcgaaacaggcctcctgaagcctgaactgaaagataaggtcacatacacactgctgaggaaacaccgacaccagacgaagaagtcgaatctgaggagcttagctgatatcggcaaaactgttagttctgcttccagaatgttcactaatccggacaacggctctccggcaatgactcaccggaacctgacctccagctctcttaacgacatttcagacaagccggaaaaggatcagctcaaaaataagttcatgaagaagcttccacgcgacgccgaggcttctaacgtcctggtcggcgaggtggacttcctggatacacccttcatcgcttttgtccgtctgcaacaggccgtgatgctgggcgccctcacagaagtgcctgtgccgacccggtttctgtttatcttgctcgggccgaagggcaaagccaagagctaccacgagatcggaagggccatcgcaacgctgatgtctgatgaggtctttcacgatatagcatacaaagccaaggatcggcatgatcttatcgccgggatcgacgagttcctggatgaggtcatcgtcctgccacccggggagtgggaccccgccatacggatcgaacctcctaaaagcttaccatccagcgataaacgaaaaaatatgtacagcgggggtgaaaatgtacagatgaacggggatacccctcacgatggaggtcacggcggcggcggacacggggattgcgaggagcttcagagaactggcagattctgtggcggactcatcaaggatatcaaacgcaaggcccccttcttcgcatccgacttctatgatgccttaaatatccaagctctcagtgccatcctgttcatctaccttgccacggtgacaaatgccataacatttggcggtctgctgggcgacgcgactgataacatgcagggcgtccttgaaagcttccttggaaccgccgtgtccggagcgatcttttgtctgttcgcgggacaacctctgactatcctgagcagcaccggtcctgtactggtgttcgaacgactcttgttcaacttctccaaggacaacaactttgattatcttgagtttcggttatggataggcttgtggtccgcttttctctgtctgatcctggtcgcaaccgatgccagctttctggtgcaatacttcacaagatttacggaggagggttttagctccctgatctctttcatctttatttacgacgccttcaaaaagatgattaagctggcagattactacccaataaattctaatttcaaggtaggctataacacactgttctcctgcacatgcgtgcccccagaccctgcaaacataagtatcagcaatgacacaacactggcccctgaatacctcccgaccatgagcagtaccgacatgtatcacaataccactttcgactgggcttttttgtccaagaaagaatgttctaaatatggcggtaacctggtgggcaataactgcaatttcgtgcccgacattaccctgatgtcttttattctgtttctgggcacgtacacatcttccatggccttaaagaaatttaagacatcaccctacttccctacaacagcccggaaattgatctctgactttgctataattctttccattttgattttctgtgttatcgacgccctggtgggtgttgatactccaaaactcatagttcctagcgaatttaagcctacatcccccaatagaggatggtttgttcctcctttcggggaaaacccctggtgggtatgcctggctgccgccatcccagctctcctggtgacaatcttgatattcatggaccagcagatcacagcagtgatcgtcaatcgaaaggagcacaaactgaaaaaaggggcagggtaccacctcgatctgttctgggtggccatcctgatggttatctgtagtctgatggccctaccctggtacgtggccgcaaccgtgatttcaatcgctcacattgattctctgaagatggagaccgagacaagcgctcccggagagcagcccaaatttctgggcgttcgagaacagagggtgactggaaccttagtgttcatcttgaccggattgtctgtctttatggcccccatactgaagttcatcccgatgcccgtcctgtacggagtcttcctgtatatgggtgtcgcctccctaaatggtgtccagtttatggatcgcttgaagcttctgctgatgcccctgaagcaccagccagacttcatctatctcaggcacgtgcctttgcggcgggtgcacttgtttacctttctccaagtgctgtgcctggccctattgtggatactaaagtccactgttgcggcgattatatttccggtcatgattctagcccttgtggccgtgcgcaaggggatggactacttgttcagccaacatgatctcagctttctagacgatgtgattcccgaaaaggataagaagaagaaggaggatgagaaaaagaagaaaaagaaaaaagggagcttagacagcgataatgatgatagcgactgcccttactccgaaaaggttccaagcatcaaaatccccatggacatcatggagcagcaaccattcttaagtgattccaagccctccgacagggagcgctctccaacctttctagaacgacacacaagttgctag

SEQ ID NO: 135401 - DNA, 3108 bp, synthetic construct
  misc_feature 1..3108: note = Description of Artificial Sequence: Synthetic coding sequence
  source 1..3108: mol_type = other DNA
atgagcacggagaatgttgagggcaagcccagcaaccttggtgaaagaggacgcgctcgcagctccacgttcctcagagttgtgcagccaatgttcaatcacagtattttcacctcggcggtatctccagctgcagaaagaataagatttattctcggggaagaggatgactcgcctgcaccacctcagctatttacggagctggatgagttgctggcggtggatggccaggagatggagtggaaagagactgccagatggatcaagtttgaggaaaaagtggaacaagggggggaaagatggagcaaaccccacgtggccaccctctcgctccacagcctttttgagcttcgtacctgcatggagaaaggtagcatcatgttggacagggaagcgagtagtctccctcagctggtggagatgatcgtcgatcatcagatcgagaccggtctgctgaaaccggaactcaaggacaaggtaacatatacccttttgcggaagcataggcatcagactaaaaagtccaatctccgcagcctcgcggacattgggaaaaccgtgtcctccgccagcaggatgtttacaaaccctgacaatggatccccagcgatgacccaccgcaatctgactagcagtagtctaaacgacataagtgacaagccagaaaaggatcagctaaaaaataagttcatgaagaagctgcctcgggatgctgaggcaagcaacgtcctggtaggtgaggtggatttcctcgatacaccatttatcgcattcgttaggttgcaacaggccgtgatgctcggagcattgactgaagtgccggttccaactagattcctattcatcctgttgggccctaagggcaaagcaaaaagctaccatgaaattggcagggcaatcgcgactctgatgtccgacgaggtatttcacgacattgcatacaaggccaaagatcgacatgatcttattgccggaatcgacgaattcctcgacgaagttatcgtcttaccccccggtgaatgggatcccgcaattcgcatcgagcccccgaagagtctgcctagctccgacaaaaggaaaaacatgtactcagggggggaaaatgttcagatgaacggagatacccctcacgacggtggccatggcggaggtgggcacggggactgcgaggagctacagcgaactggcaggttctgcggaggattgatcaaagatatcaagcggaaagctccattttttgcttcagatttctacgacgcccttaatattcaggcactgtcggccatactctttatctatctggccacagtcactaacgctatcactttcgggggattattgggagatgccaccgacaacatgcagggagtactggagagctttctggggaccgccgtttctggggctatcttttgcctgttcgccggccagccactcactatattgagtagcactggtccggtgcttgtgttcgaaagacttttatttaacttcagcaaagataacaactttgactatctggaatttcgtctttggataggtttgtggtctgcttttttgtgcttaatactggtggccacggatgccagctttctagttcagtacttcacccgctttacagaggaagggttttcctcattaatttcatttatattcatttacgacgcctttaaaaagatgattaagctggcggattactacccaatcaattcaaatttcaaggtaggctataacaccctcttttcatgtacatgcgtgccacctgaccctgcgaatatcagtatcagcaatgacacaacccttgcacccgagtacctgcctactatgtcctcgaccgatatgtaccataatacaacattcgattgggctttcttatcaaaaaaagaatgttccaaatatggcggaaacctagtcggtaataattgcaatttcgtccccgatattacactgatgtcattcatcctgttcctggggacatatacttcctcgatggctctgaagaagtttaaaacatcgccctattttcccactactgctagaaaacttatcagcgacttcgccattattctatctattcttatattctgcgtgattgatgccctggtaggtgtcgacacacctaagctgattgtcccatccgaatttaagcctacgtctcccaatcgcgggtggtttgtaccaccattcggtgaaaatccatggtgggtgtgcctagccgccgccatccccgcactcctggttaccattctgatcttcatggatcagcaaataactgctgtcatcgtgaatagaaaagagcacaagctgaagaaaggggcaggctaccacctcgacctgttctgggtggctattttgatggtaatttgcagcctgatggccctgccttggtacgtggccgctactgtgatcagcatagctcacatcgatagcctgaagatggagaccgaaacttctgcccccggtgaacagccgaaattccttggtgtccgggagcaacgggtcaccggtacgctggtgttcatcctcactggtctctcagtgttcatggcgcctattctgaaatttatccctatgccagttctgtacggagtatttctttatatgggggttgccagtctaaacggcgttcagtttatggataggcttaaactcctactgatgcctctgaaacaccagccggacttcatctacctgagacatgtcccgctacgtcgggtgcatctcttcacctttctccaggtgctttgcctggcgctgctctggatcctgaaatcaacagtcgccgccattatttttcctgtgatgatactggctcttgtggcagtgagaaaaggtatggactaccttttttcccagcatgatctgtcctttttagacgatgtgattcctgaaaaagataagaaaaagaaagaggatgaaaaaaaaaagaagaagaagaagggtagcttagattctgataacgacgactccgattgcccatatagcgagaaagtgcctagcattaaaattcctatggacatcatggagcagcagcccttcctgtccgattccaagccatcagaccgggaacgttcacctacttttctcgagaggcacactagctgttag

SEQ ID NO: 135402 - DNA, 2988 bp, synthetic construct
  misc_feature 1..2988: note = Description of Artificial Sequence: Synthetic coding sequence
  source 1..2988: mol_type = other DNA
atggaggacgaggctgtcttggatcgcggggcctcatttctcaagcatgtttgcgacgaagaggaagttgaggggcatcacactatctacatcggagtgcacgtgcccaaatcctacaggaggcggaggagacacaaaagaaagaccgggcacaaggagaagaaagaaaaggagcggatcagtgaaaattacagcgataaatccgatatcgagaatgccgacgagagctcttcatcaatccttaaaccactgattagtcccgccgccgagcgtatacggtttatactgggcgaagaagatgactcacccgcaccaccgcagctgtttactgagttagacgaacttctcgcagtggatggtcaggagatggagtggaaagagactgcgcggtggatcaaatttgaggaaaaggtcgaacagggtggcgaacgttggtctaagccccacgttgcgacactgagcctgcattctctgttcgagttgcggacctgcatggaaaaaggctccatcatgctggacagagaagcatcctcattgccccagctagttgagatgatcgtagatcatcagatcgagaccggcctgttaaagcctgagctcaaggacaaagtgacatatacactgcttcgcaaacaccggcatcagacaaagaaatcgaacttgcgtagcttagccgatattggtaaaacggtgtcgagcgccagtagaatgttcaccaaccctgataacggctctcccgccatgactcaccggaacctgacgagcagctctctgaatgacatctccgataagccagagaaagaccagttgaagaacaaattcatgaagaaactgcccagggacgcagaggcctccaatgtgcttgtgggggaagttgactttctggatacccccttcattgccttcgtcagattgcaacaggccgtgatgctcggggccttaaccgaagtgcccgttccaacgcggtttctgtttatccttctcgggcccaaagggaaagctaagtcctatcatgaaataggccgggcaattgccactcttatgagcgatgaggtgttccatgacatcgcgtacaaggccaaagacagacacgatttaatcgccggaatagacgagttcctagacgaggtgatcgtcctgcctcctggcgagtgggacccagccatccgcatcgaacctcctaagtccttgccaagcagcgataaaagaaagaatatgtactccgggggcgagaatgtgcagatgaatggtgataccccccatgatggtggtcacggcgggggcggtcacggggactgtgaggagctgcagcgcaccgggcggttctgtggaggcctcataaaggacattaagaggaaggccccattcttcgctagcgacttctacgacgcccttaacatccaagccctgtctgcaatccttttcatttacctggctacagttaccaacgccattaccttcggaggacttttgggtgatgccactgataatatgcaaggagtccttgaatcatttctgggcacagctgtttcgggggcgatattttgcctcttcgccggtcagccgctcacaatattgagctctacagggccggtcttggtgtttgagagattacttttcaacttttctaaagataataattttgattacctcgaattccggctgtggatcggcctgtggtcagctttcttgtgcctgatcctcgtggccacagatgccagctttctagtccagtacttcactcgtttcacagaagagggattttcttcactgatcagtttcatcttcatatatgatgcatttaaaaaaatgattaagttggcagactactatccaattaatagtaactttaaggtcggctataataccctgttctcctgcacatgtgtgccccccgatccagccaacatctctattagcaacgatactacattggctcccgagtacctccctaccatgagttcaaccgatatgtatcacaacaccaccttcgactgggcatttctgtctaagaaggagtgcagcaagtacggaggaaatctcgtcggtaataactgcaatttcgtgccagatattacgttaatgtcgtttattctgtttttgggcacctatacgagctctatggctttgaaaaagttcaagacgagcccttattttccaaccacagctcgaaagctgatctccgactttgccatcattctgtcaattctgattttctgtgtaattgacgccctggtcggggtggatacccccaagttgatagtcccaagtgagttcaaacctacatctcctaacagaggctggtttgtgccaccctttggagaaaacccgtggtgggtatgtctggctgctgccatacccgccctcttggtcaccatactaattttcatggaccaacaaattaccgccgtcatagttaatcgtaaggagcacaaactgaagtttatccctatgcctgtcctgtatggggtgtttttatatatgggcgtggcctcgcttaacggagttcagttcatggaccgcctgaaactgctgctcatgcctctgaagcatcagcctgacttcatttatctacgacatgtgcccctgcgcagggtccatctgttcactttcctccaagttctctgcctggctcttctgtggattctgaaaagtaccgtcgcagccatcatcttccccgtgatgatcttagctttggttgctgttcgcaagggtatggattatctgttctctcaacatgatctgtcatttttggatgacgtcatcccagaaaaagacaaaaaaaaaaaggaagatgagaaaaaaaagaagaagaagaagggttctcttgacagtgataacgatgacagcgattgtccatattccgagaaggtaccctctataaagataccaatggatattatggagcagcagccatttctctctgactccaaacctagtgaccgggagcggagccccacctttctggagcgccacacttcctgctag

SEQ ID NO: 135403 - DNA, 3285 bp, synthetic construct
  misc_feature 1..3285: note = Description of Artificial Sequence: Synthetic coding sequence
  source 1..3285: mol_type = other DNA
atggaggacgaagcagttctggatcggggcgccagtttcttaaaacacgtgtgtgatgaggaggaagtcgagggtcatcatacgatttacattggcgtacatgtgcctaagagctaccggagacggcgtcggcataaacgaaaaacgggccataaggagaaaaaggagaaggagcgaatttcagaaaactactcagacaaatccgatatagaaaatgcggatgagagcagttccagtattctgaaaccattaatttcaccagctgccgagaggataaggttcatccttggagaggaagatgacagccctgcacccccacagctgtttaccgaacttgacgagttattagcggtcgatgggcaagagatggagtggaaagagacggcacgctggattaaattcgaggaaaaggtggaacagggtggggagcgctggtcaaaaccacatgttgcgactctttctttgcacagtctgttcgagctgaggacctgtatggagaagggtagtattatgctcgatagggaagctagctctctcccgcagctggtcgaaatgatcgttgatcaccaaatcgagactggacttctgaaaccagaattgaaagacaaggtgacttatactttgctgcgaaagcatcgccaccagactaaaaagagcaatctgcggtccctggcagacattggcaagacagttagctccgcctcaaggatgttcacaaatcctgataatgggagtcctgcaatgacccacagaaatctcacgtctagctccctcaacgacatctccgacaagcccgaaaaggatcagctcaagaacaagtttatgaaaaagctccccagagatgctgaagcgtctaacgtgttggtgggtgaggtggactttttagacacccccttcatagcgttcgtgcgcttgcagcaggcggttatgctcggcgctttaaccgaggtaccagtgcctacacgatttctttttatccttctggggccaaaggggaaggcaaagtcttaccatgagatcggaagggctattgcaactctgatgagcgacgaggtgtttcacgacatcgcctacaaggctaaagacagacatgatctgattgctggaattgatgagtttctggatgaggtgatcgtgctgccgcctggcgagtgggatccagccatccggatcgaacccccgaagagcctgccttcatctgacaaaaggaagaatatgtattctggaggcgagaatgtgcaaatgaacggagatactccccacgacggtggtcacggcggaggcgggcacggagattgtgaggagcttcagagaactggtagattctgcggcgggctgatcaaggatataaagcgtaaggcccccttcttcgcgtccgacttctatgatgctctgaatattcaggcgctgtcggctatcctgtttatttatctggccacggtaactaatgctataacattcggagggctgttgggagacgcaacagataatatgcaaggagtgctcgagtccttcctggggaccgccgtgtctggggctatcttctgcctttttgcaggccaaccgctgaccattctgagctctaccggacctgtgctggtcttcgaaaggctgctctttaatttctcaaaggataataactttgattacctcgagtttcgattgtggatcgggttgtggtctgcttttctttgtttaattctcgtagccacagacgcatcctttctcgtacaatactttaccagattcacggaagagggatttagcagcctgatatcgttcatttttatttatgacgctttcaaaaaaatgattaagttggccgactactatccgatcaattcgaattttaaagtcgggtataacaccttattcagttgcacatgtgtgccacccgaccctgccaatattagtatcagtaatgatactactctggcacccgagtatctgccaacaatgagttccaccgacatgtaccataataccacatttgactgggccttcttgtctaagaaagaatgttccaagtatggagggaatctggtggggaataattgcaatttcgtccctgatatcaccctgatgtcattcatcctttttcttggtacatacacctcttccatggccttgaagaagtttaagacctcaccttattttcctactacagctcggaagctgatctccgacttcgctatcatcctgagcatactgattttttgcgtgatcgacgccttggtgggagttgatacacccaagctgattgtccccagtgagtttaaaccgacctccccaaatcggggctggttcgtgcccccatttggagagaatccctggtgggtttgcctggctgcggccattccagctttattagtgacaatcttaatctttatggaccagcagataactgcagtgattgtgaatagaaaagagcacaaactaaagaagggcgcgggatatcacctggaccttttttgggtcgcaatcttaatggtgatatgttccttgatggctctcccttggtatgttgcggccaccgtaatcagcatagcacatatcgacagcctaaaaatggagaccgaaacgtctgcccctggcgagcagcctaagttcctgggtgtcagggaacagcgtgtgaccggcaccctggtgtttattttaacgggtctatccgtattcatggctccaattctgaaattcatacccatgcccgttctgtacggggtttttctgtatatgggcgtggcttctttgaatggcgttcaatttatggatcggttaaagctcctgctgatgccgcttaagcaccagccggatttcatttatctccgacatgtgccactccgacgcgttcatctgtttaccttcctgcaagttctctgcctggcactgctctggatactgaaatcaaccgttgcggctataatcttccctgtaatgatacttgccctggtggctgtgcgaaaaggaatggattatcttttcagccagcatgatttgtcctttctggacgatgtcattcctgaaaaggataagaagaaaaaagaggacgagaaaaaaaagaaaaagaaaaagggctctttagactcggacaacgacgatgagaaagatcaccaacatagtctgaatgcgacacatcacgccgacaaaatccctttcctgcagagcctgggaatgccgtcacctccccgaactcccgttaaagtggttccacaaatccgcatcgaactggagcccgaagacaacgactatttctggcgctctaaaggaaccgaaaccacgctgtag

SEQ ID NO: 135404 - DNA, 3123 bp, synthetic construct
  misc_feature 1..3123: note = Description of Artificial Sequence: Synthetic coding sequence
  source 1..3123: mol_type = other DNA
atgaaggtgaaggaggagaaggccggcgtggggaaacttgaccacacaaaccaccggcggcgcttccccgatcaaaaagaatgccctcccattcacattggactgccggtgcccacctacccgcagagaaagacagaccagaagggacatctgagtgggctgcagaaggtgcattggggactgaggccagatcagcctcagcaggagttaacaggtccaggaagtggggcctctagccaggacagctctatggacttgatcagccggactaggagccccgccgcagaacagctgcaggatatcttaggggaggaagacgaggctccgaatccaaccctcttcacagagatggatacccttcagcacgatggggaccagatggagtggaaggagtctgccagatggattaagttcgaagaaaaagtggaagagggcggtgagagatggagtaagccgcatgttagcacactttccctgcacagcctctttgaattgcggacgtgtctccagacgggaaccgtgctgctggatctggactctgggagcttgcctcagattattgacgatgtcatcgaaaaacagatagaagatgggcttcttagacccgagctgcgcgaaagagtgagctacgtactgctacgccgccatcgtcatcagactaaaaagccaattcaccgatccctggcggacatcgggaagtcagtgagtaccacaaacagaagccctgctcgctctccaggagcaggtccttctttgcatcatagtacagaggatcttagaatgcggcagtcagccaattatggaagactctgccacgctcagtcacggagcatgaacgatatctctctcacccccaatacagatcagaggaagaacaagttcatgaaaaaaatccctaaggacagcgaagcatcaaatgtcctcgtgggcgaggtagactttctggatcagccctttatcgctttcgttcgcttaattcaatccgctatgttagggggtgtgaccgaggtgccagtgccaaccaggtttctcttcattctgttagggccctcaggacgggcaaagtcctacaacgagattggaagagctattgcgacgctgatggtcgatgatttgttcagcgacgtagcatacaaggctcgcaacagggaggatttaattgctgggatcgatgagttcttagatgaggttattgtcctcccacctggggagtgggacccgaatatcaggatcgaaccaccaaagaaagtgccctccgcggacaaaagaaaatccgttttcagccttgctgaactcggacaaatgaatggatccgtggggggcggcggcggcgcgcctggcgggggtaacggcggggggggtggaggggggtcgggggggggcgctggctccggcggagccggtggtacaagttccggcgatgatggcgaaatgcctgccatgcacgagattggggaggagctcatctggaccggcaggttcttcggcggcctgtgtctcgatatcaaaagaaagctgccttggttcccttccgacttctacgatgggttccatattcagtccatctccgccatcctgttcatctatctgggctgtatcacgaacgcaatcacatttgggggcttgctcggtgatgcaactgacaattatcagggcgtcatggaatctttcctgggtactgcaatggcgggcagcctgttttgtctgttcagtggacagcccctgataattttgtcttctaccggacccattctaatcttcgaaaagctgttatttgatttttctaaaggcaacggcctagactacatggaattccgcctgtggattgggctgcatagcgcagttcagtgtcttatactggtggcaacggacgccagcttcatcattaaatacatcaccaggttcaccgaagagggcttctccacactgatttcgttcatctttatctacgatgcgattaaaaagatgatcggtgcttttaaatattatcctatcaatatggatttcaagcccaacttcattacaacctataaatgcgagtgtgtcgcccctgacacagtgaatacaaccgtgtttaacgctagtgcccctctggctccggatacaaatgcgtcactgtataacttgctcaacctgaccgctctggactggtcgctcctgagtaagaaggagtgtctgtcatacgggggcaggttgttaggtaacagctgtaaatttatccctgaccttgctctgatgagctttatcctcttttttggaacttactccatgacactcactttgaaaaagtttaaattctccagatatttcccaactaaagtgcgcgccctggtcgccgatttttccatcgtcttctccatcttgatgttttgcgggattgatgcctgtttcggccttgaaaccccaaaactgcacgtgccaagcgttataaagcccaccagacctgatagagggtggtttgtggcaccgttcggaaagaacccatggtgggtataccccgcgagcatcttgcccgcactattggtcactatcttgattttcatggaccagcaaattactgctgttatcgtcaatagaaaagagaataagctcaaaaaagcagccggataccacctggatttgttttgggttggcatcctgatggctctatgttccttcatggggctcccatggtacgtcgcagccacagtcatcagtatcgcccatattgacagcctgaaaatggagaccgagaccagcgcccctggggagcagccccagtttttgggagtccgagaacagcgagttaccggaattatcgtttttattctgacggggatctctgtgttccttgctccgatcctaaaaatactcggcctaatcatagtcagaagattgcttgactttattttcagtcagcacgacttggcgtggatcgataatatactacccgaaaaggaaaagaaggaaactgacaagaagcgcaaacggaaaaagggggcgcacgaagactgcgacgaagaaccccagttcccacccccaagtgtcataaagattccaatggagtctgtccaaagcgatcctcagaatggaatacactgtattgccagaaaaagatcgtcctcctggtcatactctctctag

SEQ ID NO: 135405 - DNA, 3414 bp, synthetic construct
  misc_feature 1..3414: note = Description of Artificial Sequence: Synthetic coding sequence
  source 1..3414: mol_type = other DNA
atgaaggtcaaagaggagaaggcaggcgtcgggaagctcgatcataccaaccaccggagacgctttcccgaccagaaagaatgtccccccatccacattggccttccagttccgacgtacccacaacggaagaccgaccaaaaggggcacctctcgggcctgcagaaagtgcattggggattgagacctgatcagcctcaacaggagctgactggccccggatctggggccagcagccaagatagctccatggacctcatcagccgcactcgcagtcctgctgccgagcagctgcaggacattctgggcgaagaggatgaggcaccaaacccgacactcttcacagagatggataccctgcagcatgatggcgaccagatggagtggaaagagagcgccaggtggattaagttcgaagaaaaagttgaagaagggggtgagcgctggagcaagccccatgtaagcactttatccctgcatagcctgttcgagctaagaacctgcctgcaaaccgggacagtactgctggatctggattcgggctcactcccccagatcattgacgatgttatcgagaagcagatagaagacgggttgctcaggcccgagctgagagaaagggtctcctacgtgctgcttaggcgccatcggcaccagacaaagaagccgatccacagatcgcttgctgatattggaaaaagtgtgtctacaacaaacagatccccggcaagatcaccaggagccggaccgtcgcttcatcattcaacagaggacctgcgtatgcggcagagtgcaaactatggccgcctctgccatgcgcaaagtaggagtatgaacgacatctccctaacccccaacactgaccagaggaagaataaattcatgaagaagatccccaaggacagcgaagcttctaatgtgctggtcggtgaagtagatttcctagaccagcctttcatcgcattcgttagactgatccaaagcgcaatgctggggggcgtgacagaggttcctgtcccaacccgatttctatttattctgctgggccccagcgggagagctaagtcctataacgaaatcgggagagcgatcgcaaccttgatggtagacgatctgttttctgatgtggcgtacaaggcccggaatagagaggatctgatcgccggcatcgacgaattcctcgatgaagtcatagtactgcccccaggagaatgggatcctaatatcaggatcgagcctcccaagaaagtcccctcggctgataagcggaaatctgtattctctctggccgaattgggccagatgaatggatcagtggggggtggcgggggcgcccctggcgggggcaacggcggcggtggaggtggggggagcggtggcggggcaggatctgggggtgcgggagggacctcttctggagatgatggggagatgccagcaatgcatgaaatcggcgaggaactcatctggaccgggcgcttcttcggcggtctctgcctggacatcaaacgaaagctgccttggtttccgtcggatttctacgatgggttccacatacaatcgattagtgccatcctctttatctatttagggtgtatcactaacgcaatcacattcggcggtctcttgggggacgctaccgacaattaccagggcgtaatggagagttttctgggaacagccatggccggttcattgttttgtctcttttctggacagccgctgataatactctcttctacaggaccgatcctcatttttgaaaaactcctctttgacttctctaaaggtaacggattggactatatggagtttaggttgtggatcgggttgcacagtgcagtgcagtgtttgatcttggtggccaccgacgctagtttcatcatcaagtatatcaccagatttaccgaggaaggatttagtacactcatctctttcatctttatctatgatgcaattaagaaaatgatcggcgctttcaagtactaccccataaacatggacttcaagcccaattttataacaacatataaatgtgaatgtgtagcacccgatactgtgaacacgaccgtgtttaatgccagcgcccccctcgcccccgacaccaacgccagtctttataacctcctgaacctgactgcactggactggtcactcctgtctaaaaaagagtgccttagctacggaggaaggctgctcggcaactcctgcaagtttatccccgacttggccttaatgtcattcatcctgtttttcgggacatactctatgactctgacactgaagaaattcaagttcagcagatacttcccgactaaggtgcgtgctctcgtggctgactttagtattgtcttttcaatactgatgttctgcggcattgatgcctgtttcggcctagagaccccaaagctgcatgtcccctctgtgatcaagccaacaagacctgatagaggttggttcgtagctccgtttgggaagaacccctggtgggtgtatcccgctagcatcctgccagcactgctggtgacaatcttgatcttcatggatcaacagatcaccgccgtgattgttaatagaaaggagaataagttgaagaaggccgctggctatcacctggacctcttctgggtggggatcctgatggccttatgctccttcatggggctaccctggtacgtcgcggcgaccgttatcagtattgcgcatattgactctcttaaaatggagactgagaccagcgcgccaggggagcagccacagtttctcggcgtgcgcgaacagcgtgtcaccggaattatcgtgttcatcctcaccggtatctctgttttcctggcgccaatcctgaagtgcatcccattaccggtactgtatggtgtgtttctatacatgggcgtcgcctccctgaacggcatccagatgggtactgggggtagcgagtttaagatccaaaaaaagcttacacccttctgggaacggtgcaaactctttcttatgccagctaagcaccagcccgaccatgctttcctcagacacgttcctctaagacggatccatctttttacactagtgcagattctgtgcctggcagtgctctggatcctgaagagcaccgtggcagcaattatcttccccgttatgatcctgggcctgataattgttcgaagactgctcgacttcattttctcccaacatgatctagcatggatcgataatatcctgccggaaaaagagaaaaaagaaaccgataaaaaacgcaaacgtaagaaaggcgcccacgaggactgcgacgaggaaccacagtttcctcctcccagcgtcataaagattcccatggaatccgtgcagtccgatccccagaacggaattcattgtatagcccgtaaacgaagctcgagctggagttattcattatag

SEQ ID NO: 135406 - DNA, 3060 bp, synthetic construct
  misc_feature 1..3060: note = Description of Artificial Sequence: Synthetic coding sequence
  source 1..3060: mol_type = other DNA
atgaaggtcaaggaagaaaaagctggggtcggcaagctggatcatactaaccacaggaggagattccctgaccaaaaggggtctcctgcggccgaacagcttcaagatatcctgggcgaagaagatgaagctcctaaccccacactctttacagaaatggacaccctacagcacgatggagatcagatggagtggaaggagagtgctcgctggattaagtttgaggagaaagtggaggaaggtggggaacggtggtccaaaccacacgtctctactttgtccctgcattctctgtttgagttgaggacctgccttcagaccggcacggtactcttggaccttgacagcgggagtcttccccagatcatcgacgatgtgatagaaaaacagatcgaggatgggctgctgcgacccgagctccgggagagggtcagctacgttttgctccgccgacaccggcatcaaactaagaaacccatccatcgctccctggctgacattgggaaatctgttagcactaccaataggagtccggcacgtagtcccggggcaggtccatccttacaccattctactgaagatttaagaatgcggcagagcgccaattatggtcgactctgtcatgctcaatcccgatcaatgaacgacattagtctaacccctaacactgatcagaggaaaaacaagttcatgaagaagatcccaaaggattctgaggcctccaatgtgttggtcggcgaagtcgattttctagaccagccttttatagcgtttgttaggctgattcagtcagccatgttgggtggcgttacggaggtaccagtgccaacacggttcctgttcatcctcctgggcccctccggccgcgccaaatcatacaacgagatagggagagctatcgcaactctgatggtggacgacctttttagcgacgttgcctataaggctcgtaacagagaggatttaatcgctggcattgacgagttcctggatgaggtcattgttctgccaccaggcgagtgggacccaaatatccgtatcgagcctcccaaaaaggtgccctccgcagataaaaggaaatccgtctttagcctcgccgagttaggccagatgaacggtagcgtgggcggaggcggcggcgcacccggggggggtaacggagggggcggaggcggaggcagtggaggaggcgccgggagcggcggagcggggggaacctctagtggcgacgacggcgagatgcccgcaatgcacgagattggggaggaacttatttggacaggcagatttttcggcggactgtgcctcgacatcaaaagaaagttgccgtggtttcctagtgacttctatgacggctttcacattcagagcattagcgctatactttttatttaccttgggtgcataaccaatgctatcacgttcggcggcctgctaggcgatgctacagataactaccagggggtaatggaaagctttcttggaactgcaatggctggaagccttttctgcttgtttagtggacagccattaatcatactcagtagtacgggacctattcttatcttcgaaaagctgttattcgacttctctaagggcaacgggttggattatatggagtttcggctgtggattgggctgcacagtgccgttcagtgtctgatcctggttgctacagacgctagtttcattattaaatatattactagatttactgaagaggggttcagtaccttgatttcgttcatttttatctatgatgccatcaaaaaaatgattggtgccttcaagtactacccaattaacatggatttcaaaccaaacttcatcacaacatacaagtgtgagtgcgtcgctcccgacacagtcaataccaccgtttttaatgcatcagctccactggcacctgacacgaacgcctccctgtacaatctgttaaatctgaccgcacttgattggtccctgctgtccaagaaagagtgcctatcctatggtggaaggcttttaggcaattcctgcaaattcattcccgaccttgctctgatgagctttattctgttctttggcacctactcaatgaccctgactctcaagaaatttaagttctcacggtacttccctaccaaaccaactagacccgaccgcggttggtttgtggccccttttggcaaaaacccctggtgggtttaccccgcttcaatcctaccagcacttttggtgacaatccttatctttatggaccagcagattaccgccgtgatagttaaccgcaaagagaacaaactgaagaaagccgccggctatcacctggatttattctgggtaggaatactgatggctctgtgctcattcatgggcctgccttggtatgtcgctgccactgttatctcaatagcccacattgactccttaaagatggagaccgagacgtctgctccgggcgagcaacctcagttcctcggcgttcgagaacaacgcgtgaccgggataatcgtgttcattcttaccggcattagtgtctttctcgcgccgatccttaagtgcattcccctgcctgtgttatatggggtattcctgtacatgggggtcgcatctctcaatgggattcagttctgggaaagatgtaagttgtttctcatgcctgcgaagcaccagcccgatcatgcgttcctccgccatgtccccttgaggcgcatccaccttttcactctagtgcagattctttgtttggcagtgctctggatcttaaagagtacagttgcagcaattatctttccagtaatgattctagggctgatcattgtgagacgcctactggatttcatattctctcagcatgacctggcctggatcgacaatatcttgccggaaaaagagaagaaggagacggacaagaaaaggaagcggaagaagggagcccatgaagactgcgacgaggagccccagtttccgcctccttcagtgattaaaatccctatggagtcggtccagagtgacccacagaatggaatacattgcatcgcccggaaacgctcatccagctggagctacagcttgtag

SEQ ID NO: 135407 - DNA, 3060 bp, synthetic construct
  misc_feature 1..3060: note = Description of Artificial Sequence: Synthetic coding sequence
  source 1..3060: mol_type = other DNA
atgaaggtcaaggaagaaaaggccggagttggcaagcttgaccatacaaatcatcggagaagattccccgaccagaagggtagccccgctgcagagcagttgcaggacattctgggggaagaggacgaggcccctaatcccactctgttcaccgaaatggatacactgcaacacgacggcgatcaaatggagtggaaagaaagcgcgcggtggatcaaattcgaggagaaggtcgaagagggtggcgagcgatggtcaaaaccacacgtcagtacgctctcgctccattctctgtttgagctgcgtacctgcttacagaccggcaccgtccttctggatctggattccgggagtctcccacagatcatcgacgatgtaattgaaaagcagatcgaggacgggctgctgagaccagaactgcgggaaagggtgtcctacgttctgctgcgcagacataggcatcaaacaaaaaagcctatccacagatcattagcagacataggaaaaagtgtcagtacaaccaataggtcacctgcccgttccccaggagctgggccttccctgcatcacagcaccgaagacctccgcatgagacagagcgctaattatggccgcttatgccacgctcagtcccgctcaatgaatgacatctcactcactccaaacaccgatcaacgtaaaaataagtttatgaagaaaatccccaaggactccgaagctagtaatgtgctggtcggagaagtggacttccttgaccaaccctttatcgcttttgtgcggcttattcaatcagccatgctgggtggagtgaccgaagtgccagtgcctacccgtttcctattcatactgctcggccctagcggccgtgctaagtcctacaacgagattggccgggcaatcgcaaccttgatggtcgatgatttattctccgatgtcgcgtataaggctaggaatagggaggatctgatcgctggtatcgacgagtttcttgacgaggtgattgtccttccacccggcgagtgggatcctaatattaggatcgagcctccgaaaaaggttccatccgcagacaaacgcaaaagtgtgtttagcctagcagagttaggccagatgaatggctccgtgggcggcggcggcggtgcccccggcggcggcaacggcggcggcggcggcggggggagcggtggcggggcgggttccggcggcgctgggggtactagctcaggcgacgacggagaaatgccagctatgcacgagatcggggaggagctgatctggaccggccgcttcttcggtggactttgcctggacatcaaacgcaagctgccctggttcccatcagacttttacgatggctttcatattcagtccattagcgctattttgtttatttatctgggatgtattaccaacgccatcaccttcggcggactcctcggggacgccactgacaattaccaaggagttatggaaagttttctagggaccgcaatggcaggatccctcttttgtctcttcagcgggcagccacttattatcctttcctccaccggccccatcttaattttcgagaagctgctgttcgatttttcaaagggcaatggactggactacatggagtttcgactctggatagggctgcattccgcggtgcagtgcctcatcctggtcgctactgatgcatcctttattattaagtacatcacacgatttaccgaggaaggattctctaccctcatttccttcatctttatctacgacgctattaagaagatgattggcgcgttcaaatattatccaattaacatggacttcaaaccgaattttatcaccacctataagtgtgaatgcgtggccccagatactgtcaacacaactgtgtttaatgcttctgcgccactggcgccagacacgaacgcctccctttataacctcctgaacctgacggcccttgattggagtttgctctccaagaaggagtgcttgtcctatgggggccggcttctcgggaatagttgcaagttcatcccagatctggctttgatgagctttattctgtttttcggcacatacagtatgacactgaccctgaaaaaatttaagtttagcaggtactttcctactaagcctaccaggcctgacagagggtggtttgtcgccccctttggaaaaaatccgtggtgggtttatcctgcatcaatcttgccagcactgttggtaacaattctcattttcatggatcaacaaatcaccgccgtaattgtgaatcgcaaagaaaacaagctgaaaaaggccgccggctaccatctggatctgttctgggtcggcatactcatggctttgtgctcttttatggggctcccatggtacgtggcggctaccgttataagtatcgcacacatcgatagcttaaaaatggagaccgagacttcagcacccggcgaacagccccagttcctgggcgtgagagaacagcgggtgacaggcattatcgtctttatcctcactggcatctctgtgttcctggccccaatcctgaaatgcattcctctgcctgttctttacggagtttttctgtacatgggggtggcgtccctgaatggaattcagttctgggaaaggtgtaagctttttctgatgccagctaaacaccaacctgaccatgcctttctacgccacgtccccctgagaaggatacacctcttcacactcgtgcagatcctctgtctcgccgtgctctggatcctcaagtcgactgtggcagctattatcttccccgtcatgatcctgggactgataatcgttagacgcctgcttgattttatattcagccagcatgatttggcctggatcgataacattttgcccgagaaggagaagaaggagactgacaaaaagcggaagaggaaaaaaggagctcatgaggactgcgacgaagaaccacaattccccccgccatcagttatcaagatcccaatggagagtgtgcaatctgacccgcaaaatggcatacactgtattgctcgaaaaaggagctcttcctggtcctattctttatag

SEQ ID NO: 135408 - DNA, 3123 bp, synthetic construct
  misc_feature 1..3123: note = Description of Artificial Sequence: Synthetic coding sequence
  source 1..3123: mol_type = other DNA
atgaaggtgaaagaggagaaggccggggtgggaaaactagaccacaccaaccaccggcgcaggttccctgaccagaaggagtgccctcctatccacattggactgcccgtgccgacatatccacagcgcaagaccgaccagaagggtcacctttcgggcctccagaaggtccactggggtctcagacccgaccagccccagcaggaacttaccggacctggttctggcgcctcctcacaggactcaagcatggacctgatatccaggacccgttctccagctgccgaacagctacaagacatcttgggagaagaggacgaagcacctaacccaacgctattcacagaaatggataccctacagcacgacggcgaccagatggaatggaaagagtcagcacggtggataaagtttgaagagaaagtcgaagagggtggtgaaagatggtctaaaccacatgtgagcactctgagtctacacagcctattcgagcttcgcacatgcctgcagacaggtactgttctgctcgatctggattccggttctcttcctcagattatagatgacgtaatcgagaaacagatcgaggatggcctcctgaggcctgagctccgcgagcgagtgtcctacgttttgttaagacggcatcggcaccaaactaagaagccaatccatagaagtctggccgatattggaaagtctgtgagcactactaaccggtctcctgccaggtcccccggggccgggccaagtctccaccatagtacggaagacctgagaatgaggcaatcagccaactacggcaggctctgtcatgcacaaagccgttcaatgaacgatatatcgctcacacccaatacagaccagcggaaaaataaattcatgaagaaaattcctaaggactccgaggcttctaacgtgttggtcggtgaggttgacttcctggatcaacctttcatcgcgtttgtgaggctgattcagtctgctatgcttggaggtgtaactgaggtccctgtgccaacaaggttcttattcatcctcctaggccctagtggccgagcaaagtcttataatgaaatcggccgcgctatagccacactgatggttgacgacctctttagcgacgtcgcctataaggcccggaatcgagaggatttaattgcaggtatagatgagttcctggacgaggtaattgtgctgccccctggcgagtgggaccccaatataaggattgagccgcccaagaaggtgccttcagccgacaaacgcaaaagcgtgttcagcctggcagaattgggtcaaatgaacgggtccgtgggaggaggcgggggcgccccagggggaggcaatgggggtggtggcggcggcggaagcggaggcggtgcaggttcaggaggagcaggaggaacctcctcgggcgacgacggcgaaatgccagccatgcatgaaattggtgaggagctaatctggacgggcaggtttttcggtggactttgtctggatatcaagcggaaactgccgtggtttccatccgacttctatgatggcttccacatacaaagcatctctgctattttgttcatttatctgggctgcatcacaaatgctatcacatttggggggctgctcggagacgcgacagataattaccagggcgttatggaatccttcttgggtaccgccatggctggctctctgttctgcctcttctcagggcagccgttaatcatcctgagcagcaccggccccattctgatttttgagaagctgctcttcgattttagcaagggcaacggcctggattatatggaattccgactctggatcggactgcatagtgcagtccagtgtctcattctggtggctacagatgcttcgtttattattaaatacattacccgattcactgaagaaggatttagcacgctcatctcattcatctttatttatgacgccataaagaagatgataggtgcctttaagtactaccctatcaacatggacttcaaacctaattttattacaacgtacaaatgtgagtgcgtagcacctgacactgttaacaccactgtcttcaatgcttccgcgccgctcgcacccgataccaacgcgtcactgtataacctccttaacctcactgccctggactggtcgctgctgagcaaaaaagaatgtctgtcttacggggggcggctgctggggaactcctgtaaatttattccagatctcgcactcatgtccttcatacttttttttggtacttactctatgacactgactcttaaaaagtttaaattcagccgatactttcctaccaaggtgcgggctctggtggccgacttctctattgtgttttctattttaatgttctgtggaatcgacgcctgttttggtttagagactccgaagctgcacgttccttcagtgatcaagcctacgagacccgacagaggatggttcgtcgctccatttggtaaaaacccttggtgggtgtatcctgcatccattctcccagcactgctcgtgactattctgattttcatggaccagcagatcactgctgttattgtgaaccgcaaggaaaacaagttgaagaaagcagccggctaccatttggacctcttttgggtggggattctaatggctctgtgctccttcatggggctgccttggtacgttgctgccaccgtaattagcattgcccacatcgattccctaaaaatggagacagagacttccgccccaggggagcagccacagtttctgggagtgcgagaacagcgagtgaccggaattattgtgtttatcctgaccggtatatccgtatttctggcaccaattttaaagatcctggggctgatcattgtaagacgtctgctagatttcatattcagtcaacatgatttagcctggattgataatatcctgcccgagaaggaaaagaaagaaactgataagaagcgcaagcgcaagaagggagcccacgaagactgcgacgaggagccgcagttcccccctccatctgtcatcaaaatccccatggagtccgttcaaagcgacccacagaacggcatccactgcatcgctagaaaaagaagtagctcttggtcatactcactctag

SEQ ID NO: 135409 - DNA, 3414 bp, synthetic construct
  misc_feature 1..3414: note = Description of Artificial Sequence: Synthetic coding sequence
  source 1..3414: mol_type = other DNA
atgaaagtgaaggaggaaaaggcgggcgtcggcaagcttgaccatactaaccatagaaggaggttccccgatcaaaaggaatgcccaccgatacacataggcctccctgttccgacctacccgcagagaaagacggaccaaaaggggcatctgagcggactgcaaaaggtccattggggtttgaggccagaccaaccccagcaggagttgaccggaccgggatcgggcgctagttcccaggattcgtccatggatcttatcagtcgcacaaggtcacccgctgccgagcagctgcaggacattctcggagaggaggacgaagcccctaacccaaccctgtttacagaaatggacactctgcagcacgacggggaccagatggaatggaaggagtcggctagatggattaagtttgaggagaaggttgaggagggcggtgagaggtggagcaaaccacacgtcagtaccctgagtctgcactcactctttgaacttaggacctgcttgcagaccgggaccgtcctgctagacctggatagcggttcccttccccagataattgacgatgtcatagagaagcagatcgaggacggcctgttacgacctgaacttcgagagcgggtcagttatgtgctgctgagacgtcacagacaccagacaaaaaaacccatccaccgtagcctggctgacatcggcaagtcggtgtccaccaccaatcgctcccccgcgcgcagcccaggagccggcccaagcttgcaccactccacggaagacttgaggatgcgtcagtcagcaaactacggtcgactgtgtcacgctcagtctagaagcatgaatgatataagcctgactcccaacacagatcagaggaaaaataagtttatgaagaagattccaaaggacagtgaggccagcaatgttttggtcggagaagtggacttcctggaccagcccttcatcgcattcgtccgccttattcagtccgcaatgctcggtggcgtaactgaggtcccagtgccaacccggttcctgtttatactcctgggcccaagcggacgggcaaagtcgtacaatgagataggacgcgccatcgccacactgatggtggacgatctctttagcgatgttgcatacaaggcaaggaacagagaggacctcatcgcaggcatcgacgagttccttgatgaggtaatagtccttccccctggcgagtgggacccaaatattagaatcgagcctccaaagaaggtaccctccgcagataagaggaagagcgtgttctcattagccgagcttgggcaaatgaatggcagcgtgggaggcggtgggggggccccaggcggcgggaacggtgggggagggggaggaggtagcggcggaggtgctggctctgggggggccgggggaacgagcagtggggacgacggagagatgcctgctatgcacgaaatcggggaagaactaatctggaccggcaggttctttggcgggttgtgcctggacattaaacggaaactgccatggttcccttccgacttctacgatggtttccacatccagagtatcagtgcgatcctgttcatctacttgggctgtataaccaatgctatcaccttcggcggcttgcttggcgacgcgacagacaactatcagggagtaatggagagctttctcggtacagctatggcaggcagtctgttctgtctttttagtggacagcctctcataatcctgtcgagcacaggcccaatactgatcttcgaaaagctgctcttcgatttctccaagggcaacggtctggattatatggagtttaggctgtggattgggctccacagcgctgttcagtgtctgatcttagtggcgactgacgcttcatttattatcaagtacattacacgatttaccgaggaaggattcagcacccttattagctttatatttatatatgatgcgattaaaaaaatgataggtgccttcaagtattaccctatcaatatggatttcaaacccaatttcatcactacctacaagtgtgaatgcgtcgccccagatacagtgaatactacggttttcaatgcaagcgcgccacttgcccctgataccaatgcctccctctacaatttgcttaatctgacagccttggattggtcactcctatcaaagaaagaatgtttatcgtacggtgggcgactcctggggaactcctgtaagtttatcccagatctggccctgatgagtttcatactgtttttcgggacctatagcatgacacttacccttaagaagtttaaattctcaaggtattttccgactaaggtccgtgccttagtggccgactttagtatcgtgttttccatcctcatgttctgcggtatcgatgcttgttttggattggaaacacctaagctccacgtgcccagcgtgataaaacctacccgcccagacagaggctggttcgtcgcgccattcgggaagaacccttggtgggtatatccagccagcatactcccagccctgctagtaacaatacttatattcatggaccagcagatcaccgcagttatcgttaaccggaaggaaaataagttgaaaaaagctgcaggctatcatctggatctcttttgggttggtatactgatggccttgtgcagttttatggggctgccttggtatgtcgccgccaccgtaatcagtattgctcatatcgattctctgaaaatggagacggagacgagtgcacccggtgagcagccacagtttttaggcgtccgggaacaacgtgtgacagggatcatagtttttatactgacgggcataagcgtgttcctggcacccattttgaagtgcatccccttgccggttctttacggtgtctttctgtacatgggagtggcttcgttgaacgggattcagatgggcacaggaggctccgaattcaagatccagaagaaactaacaccattttgggagcgatgcaaactctttctaatgcccgctaagcaccagccggaccacgcgtttctgaggcatgtgccattgcgccgtattcacctgtttaccctggtgcagattctgtgtctggccgtgctgtggattctcaagagcaccgtcgccgccataatctttccagtcatgattctggggcttatcattgtccgccggctcttggacttcatcttcagccagcacgacttggcttggatcgataacatcctgccagagaaagagaagaaggagacagataaaaaacggaaaagaaagaagggtgctcacgaagactgcgacgaggagcctcagtttccccccccatctgtgatcaagatccctatggaaagcgtgcagtccgatccacagaatggaatccactgtattgcgaggaagcgtagcagcagttggtcttatagcctgtag

SEQ ID NO: 135410 - DNA, 3366 bp, synthetic construct
  misc_feature 1..3366: note = Description of Artificial Sequence: Synthetic coding sequence
  source 1..3366: mol_type = other DNA
atgaaggtgaaagaggagaaagctggagtggggaaactggaccacaccaatcatagacggaggttcccagaccaaaaagaatgcccgcctattcatatcggtctccccgtgcccacctatccacagaggaaaactgatcagaagggacatctgtccggcctgcagaaagtgcattggggcctccggcctgatcagcctcaacaggaactgacggggcccggtagtggggctagtagtcaagacagctccatggacctcatcagtaggaccagatctcctgcggccgagcagttgcaggatatcctgggcgaagaagacgaagcccctaatccaactctgttcactgaaatggacaccctacagcatgacggcgaccagatggaatggaaggagagcgcccggtggattaagttcgaggaaaaggtggaagaggggggcgaaagatggtccaagccccacgtgagcacactgagtctgcattcactgttcgagttgagaacttgtctccagacaggaaccgtcctgctggatctcgatagtggcagcctgccacagattatcgatgacgttatcgagaagcagatcgaggatggtttattacgcccagaactgagggaacgtgtatcttacgtgctgcttaggagacataggcatcagaccaagaaacctatccaccggagcctggccgacattgggaaatctgtttcaaccacgaaccgcagcccagccagaagcccaggtgcgggccccagcctccaccacagtaccgaggatcttagaatgcgccagtcagcaaactatggtcgtctttgtcacgcccagtcacgaagcatgaatgacatctctctgactcccaacacagatcaacggaagaacaagttcatgaagaaaatccctaaggactctgaggcatccaatgttctggtcggggaggtggactttctggatcaaccgtttatcgcatttgttcgactaattcagtccgccatgttggggggcgtcaccgaagtgcctgtgccaacccgattcttgttcatcctcctgggaccgagtggtcgggcaaagagctacaacgagataggaagggccattgctacacttatggtcgatgacctcttctctgacgtggcatataaggctaggaatcgggaggatctcattgcaggaatcgatgagtttctggatgaggtgatcgtgctgccaccaggagaatgggatccaaacatcaggattgagccacccaaaaaggtcccctctgcagacaagcggaagtcagtgttcagcctggctgaactcggacaaatgaacggatccgttggcggtgggggtggcgctccgggcggaggcaatggtggaggtgggggtgggggctccggtgggggggctggatcgggaggggccggcggaactagtagtggggatgacggagagatgcctgccatgcacgagatcggagaggaactcatctggactggacgcttttttggtggtctgtgtttggacataaagcggaagctcccttggttcccaagtgacttttatgacggattccacatccagtcgatttctgccatccttttcatttacctgggatgcataaccaacgcaatcacctttggaggtcttctgggggatgccactgataactatcaaggagtaatggagtcctttctggggacagcaatggccggaagcctcttttgtctgttcagtggtcagcctcttatcattctatcctcgactggtccgatcctcatatttgaaaagctgttgtttgattttagtaaggggaatggccttgattacatggagttcagactctggattggactgcattctgcagtgcagtgcctgattctggtggctactgacgcatcctttattatcaagtacatcaccagattcacggaagagggtttcagtactctgataagcttcatcttcatttacgatgctataaagaagatgattggagcctttaagtactacccaattaacatggattttaaacccaacttcataacaacttataagtgcgaatgcgtggccccggatactgtaaacaccacagtgttcaacgcaagcgcaccactggcaccagacactaatgctagcctctacaacctcctgaacttgacggcattggactggtcactgctcagtaagaaggaatgtctctcgtatggtggtagactgctgggcaactcttgtaaatttattcctgatctagccttgatgagttttatcctcttcttcggcacgtacagcatgaccctcaccctcaaaaagttcaaatttagccgctacttcccgaccaaggtgcgcgctctcgtcgccgatttctccattgtcttttccattcttatgttttgcggtatagatgcttgcttcggattggagacaccgaaactgcacgtcccgagcgtaattaagcctactagacctgaccgagggtggttcgtagctccctttggcaagaatccttggtgggtctacccagccagcatcctgcctgcgttgctggtaaccatcctcatttttatggatcagcagatcacggccgtaatcgtaaatcgaaaggaaaacaagctgaagaaagccgcagggtaccatttggacttattctgggtggggattttgatggccctgtgttctttcatgggcctgccttggtacgtggctgccacagtcatatctatcgctcacatagattccctgaagatggagaccgaaacatcagcccctggcgaacagccccaatttctgggtgtgagggagcagcgagtcaccggcatcatcgtcttcattctgaccggcatttctgtgtttctggcccccattctcaagtgtatacccctaccagttctatatggagtcttcctgtacatgggtgtcgcatctcttaacggtattcagttttgggagcgctgtaagttgtttctaatgcccgctaaacaccaacccgatcatgcttttctgcgtcacgtgccactgagacggatccatctgtttacactcgttcagattctgtgcctcgccgtgctgtggatccttaaatctaccgtcgccgctattatcttcccagtgatgatcttaggtttaatcatcgttaggaggctattggattttattttctcgcagcatgatctggcctggattgacaatatcctcccggagaaggagaagaaggagaccgataaaaaacgtaaacggaagaaaggggcacacgaagactgtgacgaggagccccagttccctccaccctcagtgattaagatccctatggagtccgtacagagcgatcctcaaaacggaattcattgcatagccaggaagaggtcatcgtcttggagctattctctgtag

SEQ ID NO: 135411 - DNA, 2982 bp, synthetic construct
  misc_feature 1..2982: note = Description of Artificial Sequence: Synthetic coding sequence
  source 1..2982: mol_type = other DNA
atgaaagtcaaggaggaaaaggccggcgtcggcaagctcgatcacacaaaccatcgcagacggttcccagaccagaaagagtgtcctcccatccacattggactgcctgtgcccacatacccccaaagaaaaacagatcagaagggtcacctgtctggtctgcaaaaagtgcactggggactgcggcctgatcagcctcagcaggagctgactgggccaggtagcggcgcctcaagccaggacagctctatggacctgatctctagaactcggagcccagctgctgaacagctccaagatattttaggagaggaagatgaagcccccaaccccacactgttcaccgaaatggatacattacaacacgacggagaccaaatggagtggaaggaatccgccagatggatcaagttcgaggagaaagtcgaagagggaggagaacgatggtcaaaaccacacgttagcactctctccctccacagcctttttgagctacggacctgtttacagaccggcactgtgctccttgatctggactccggtagcttgccacagattatcgacgacgtcatcgaaaaacagattgaggacggtctgcttaggcctgagttaagggagcgcgttagctacgttttgctgcggcggcatagacaccaaacaaagaaaccgatacacagaagcctcgctgacattggcaagtcggtctccacaacgaatcgatctcccgcccgaagtccgggggctgggccatctcttcaccattccacagaagacctgagaatgagacagtccgcaaactatgggcgactctgccacgcgcagagcagaagtatgaatgatattagcctgaccccaaataccgaccagaggaaaaacaagttcatgaagaaaatccccaaggactccgaggccagcaacgttctcgtgggagaagttgatttcctggaccagcctttcatcgccttcgtgcgactcattcagagcgccatgctgggcggcgtaactgaggtaccagtacctactcgattcctcttcatcctgctgggcccctctggcagagcaaagtcctataacgagatcggtagagcaattgcaacactcatggtcgatgatctgttcagtgacgttgcatacaaagccaggaatcgcgaggatttgatcgccgggatcgacgagtttctggatgaggttattgttctgcccccaggcgaatgggatccgaatattagaattgaacctcccaaaaaagtaccaagcgccgataagcgaaagagcgtgttctccctggcggaacttggccagatgaacggaagcgttggcggcggcgggggcgcccccggtgggggcaatggcggaggcggcggcggaggtagtggcggaggcgcgggcagtggaggggccggaggcacgtcgtccggagacgacggagaaatgccagctatgcacgaaattggcgaggaacttatatggacggggcggttttttggcggtctgtgtctggatataaagcgtaaactgccttggtttccttcagatttctatgatggatttcacatacagagcatatccgcaatactgttcatttaccttggttgtatcaccaacgcaataacctttggggggctcctgggcgatgccaccgataattaccagggcgtgatggaatccttcctgggaactgccatggccggctccttgttttgtctgttctctgggcagcctctgattatcctgtcatccactggccctatactgatcttcgaaaagctgctctttgacttctcaaaaggaaacggcctggactacatggagtttaggctgtggattggtctgcactcagccgttcagtgcctgattttagttgccacggacgcaagcttcatcatcaagtacattacaaggttcacagaggaaggattttccactctcatatcctttatttttatttacgatgcaatcaaaaagatgataggagcatttaagtattaccccattaacatggacttcaagcccaatttcattaccacctacaaatgtgaatgcgtggccccagatacagtgaacactactgtgtttaatgcctccgccccgttggccccagacactaacgccagtctttataatctcctgaacctgacggcactggactggtccttgctgtccaagaaagaatgtctgagttacggaggccgcctcctcggcaattcatgtaaattcattcccgaccttgccctcatgtccttcatcttgttcttcggcacttattcaatgactctcaccctgaaaaaatttaagttctctaggtacttcccaacaaaagttcgggccctggttgccgacttttccatagttttcagtatccttatgttttgtggaatcgatgcatgctttggcctcgagacacctaagctgcacgtaccttccgtcataaagccaacccgccccgaccgagggtggtttgttgccccttttggaaagaacccttggtgggtgtaccccgcgtctattctgccagcgctgctggttaccattttaatctttatggatcaacaaatcacagccgttatcgtaaatcgtaaagagaataaactgaagggcactgaatctaatagacaccaccggctgcatcccgacggaaacttgtgcctgcctggaagccacccgaaagtgtatccaccagcaggcgcggttcgtagtttacctctccacggacgagggctgccagagtggcatccagtcttggggaccctgcaggcactgcctgatgcctcccaggcccccgccggaccgtgcctgcctgccgcccgggctgccgccccagatcctccccttcacccaggtgccgaccccctcccaggcggcgcgcttgatccccagatccacgggggctgccaccacctgcctgggcatgaccctgggcctcatcacaggtcaaaagccagtggctttcatctttttcctgcacgcccagggctggattag

SEQ ID NO: 135412 - DNA, 2895 bp, synthetic construct
  misc_feature 1..2895: note = Description of Artificial Sequence: Synthetic coding sequence
  source 1..2895: mol_type = other DNA
atgaaggtcaaggaagaaaaagccggggttgggaagctggaccacaccaatcaccggaggcgcttccccgaccagaaggaatgccctcccatccacattggactcccagtgcctacatatccccagcgtaaaacggatcagaaggggcacttgtccgggttgcaaaaagtgcattgggggcttcgtccagatcaaccccaacaggaattaaccggccctgggtccggagcaagcagccaagacagttcaatggatctaattagccgcacacgcagtccggccgctgaacagctgcaggatatcctgggagaggaagatgaggctcccaaccctactctgttcacagagatggacacactccagcatgacggcgaccagatggaatggaaggagtcagctaggtggatcaaatttgaggagaaagtggaagagggaggagaacgttggagcaaaccacacgtgtccaccctgagcctccactccctttttgagctgagaacctgtctgcagacaggcaccgtgcttctggacttggacagcggttcacttccacaaatcatcgatgacgttattgaaaagcaaattgaggatggccttctccggccagagttgcgagagcgcgtttcatacgtgctcctgcgaaggcatcggcaccagacgaagaagcccatccatagatcacttgccgatatcgggaaatcagtgagtactactaacaggtcacccgcgagaagccccggtgccggacctagcctgcatcattccactgaggacttgcgtatgagacagtctgccaattacggccgcctctgtcacgctcagagcagaagcatgaatgatataagccttacaccgaacacagatcaacgcaagaacaaattcatgaaaaaaatccctaaggattcagaggcctcgaatgtgttggtaggagaggtggacttcctcgaccagccttttatcgccttcgtgaggctgatccaatcagcaatgttgggcggcgtcacagaggtgccagtacccactcggttcctgttcattctgctcgggccttccggaagagctaagtcgtacaatgaaataggacgggccatcgccacgctgatggtcgatgatctcttctctgacgtggcttacaaggccagaaatcgagaggacctcatcgccgggatagacgagtttcttgacgaagtcattgttctgcctcccggtgagtgggatccaaacatccgaatcgagccgccaaagaaagtaccctctgccgataagcgaaagtccgttttctcacttgctgaactcgggcagatgaacggatccgtgggggggggcgggggcgccccagggggaggcaatggaggcggcggtgggggagggtccggggggggggctggcagcggcggcgccgggggtacatcatcaggcgatgacggtgaaatgcctgctatgcacgagataggtgaagaattgatatggaccggcaggtttttcggtggactctgtctggacattaagcgtaagctgccctggtttccgtctgacttctacgacgggtttcacattcagtctatatccgccattctcttcatttacttaggttgcatcactaacgcaatcacattcggcggcctgctgggcgatgccacggataactatcagggagtgatggagagcttcctgggcactgccatggccggttcattgttctgtctcttctcggggcagccactgattatacttagcagcacgggccctatcctgattttcgagaagctgttgtttgacttcagcaaggggaatgggctcgattacatggagtttaggctttggattgggttgcacagcgccgtgcagtgtcttatcctggtggccacagacgctagttttatcattaaatacataactcgatttacagaggaagggttcagtacgttaatctcatttatcttcatctatgatgccattaaaaaaatgatcggcgcgtttaagtactaccccataaacatggactttaagccgaacttcattactacctacaagtgcgagtgtgtagctcccgacacggtgaacactactgtgtttaacgcatctgccccgctcgcacctgatactaacgcaagcctgtacaatctgttaaacttgaccgcactagactggagtttgctgtccaaaaaagagtgtttgtcttacggcgggcgcttattgggaaattcatgcaagtttataccagacctggccctgatgagtttcatactgttcttcggcacctactccatgactttaactttgaaaaaattcaagttcagccgttactttcccactaaaccaacacgccccgaccgaggctggtttgttgcccctttcgggaaaaacccatggtgggtatacccggcctctatattacccgccctgctggtgactatcttgatcttcatggaccaacagattacagccgtcatagttaataggaaagagaacaaacttaaagggaccgagagcaaccggcatcataggttacatcctgacggaaacctatgtctgcctggaagtcatcctaaggtctacccacccgcaggggcagtacggtctctgcctcttcacggtcgaggcctccctgagtggcatcccgttttgggaactctgcaggctctgccggatgcttcccaggccccggctggaccctgcctgcctgctgctagggctgctgccccagacccacctctccaccccggggccgatcccctgcccggaggggctctggaccctcaaatccatgggggctgccaccacctgccaggccatgtgtcactacaccaccgctcttgggcatcttcatcgttcgagggattttggatcagcagcttcccatccacgacctggccgggtttaactactagttag

SEQ ID NO: 135413 - DNA, 390 bp, synthetic construct
  misc_feature 1..390: note = Description of Artificial Sequence: Synthetic coding sequence
  source 1..390: mol_type = other DNA
atgaaggtcaaagaggaaaaagcaggtgttggtaagctggatcataccaaccaccgaagaagattcccagatcagaaagaatgtccccctatccacattgggctgcccgtgcccacatatccacagcggaagaccgaccagaaggggcacttatccggccttcagaaagtgcattggggcctccggcccgaccaaccccagcaggaactaaccggcccaggaagcggtgcttcatctcaggactcaagtatggatctgatcagcagaacacggagtccagccgccgaacagcttcaagatatcttgggcgaagaggacgaggctcccaacccaaccttgttcaccgaaatggacactcttcagcacgacggcgatcagatggaatggtag

SEQ ID NO: 135414 - DNA, 438 bp, synthetic construct
  misc_feature 1..438: note = Description of Artificial Sequence: Synthetic coding sequence
  source 1..438: mol_type = other DNA
atgaaggtcaaagaggaaaaggctggagtcggaaaactggatcatactaatcaccggcgcaggtttccagaccaaaaagagtgccccccgatacacatcggcttacctgttcccacgtacccccaacggaaaaccgatcaaaaaggacacctgtctgggctgcaaaaggtacactgggggctgcgcccagatcagccacagcaggaactgactgggcccggctcaggagcctcctcacaggactcttccatggacctaattagcaggacaaggtctcccgctgcagagcagctgcaagacatcttgggcgaagaagatgaggctccaaaccctactctatttactgagatggacactctgcagcatgatggcgatcagatggaatggaaagaaagtgctcgctggattaagttcgaagagaaggtagaggagggctag

SEQ ID NO: 135415 - DNA, 3429 bp, synthetic construct
  misc_feature 1..3429: note = Description of Artificial Sequence: Synthetic coding sequence
  source 1..3429: mol_type = other DNA
atgaaggttaaagaggagaaggcgggagtcggcaagctggatcataccaatcatcggcggagatttccagatcagaaggaatgtcccccaatccatatcgggcttcccgttcctacgtaccctcagcgaaaaaccgaccaaaagggccatttgtccggtcttcagaaagtccactgggggttgagaccggaccaaccacagcaggagctgaccggacccggctccggggcatcctctcaggacagcagcatggatctcattagccgtacccggtccccagccgcggagcagctgcaggatatcttgggagaggaggacgaggccccaaatcccactctgtttactgagatggatacgctccagcacgatggcgaccaaatggaatggaaggagtccgctcgctggattaaatttgaggaaaaagtggaagaggggggagagaggtggtctaaaccccacgtgagtacattgtctttgcattctttgttcgagcttaggacttgcttgcagaccggcacggttttgctggatttggactccgggtcactcccacaaatcatcgacgatgtgatcgaaaaacagatcgaagacggtttactccggcctgaactgcgagagcgggtttcttacgtcttgctcaggcggcaccggcatcagaccaagaaacctattcacaggagcttagcggatatagggaaatccgtgagcacgacaaacaggtccccggctcgttctcctggagctggtccgtctctacatcactccacagaggatctgcgcatgcggcagagcgccaactacggaaggctgtgtcatgcgcagagcagaagtatgaatgacatttccctgaccccgaatacagaccagaggaagaacaagttcatgaagaagatcccaaaggactcagaagcaagtaacgtcctcgttggcgaggttgatttcctggatcagcccttcatcgccttcgtccgcctcattcagtcagccatgctaggtggcgtcacggaggtgcccgttcccacaagattcctgtttattctcctgggcccgtcaggccgggctaagagctataatgagatcgggcgcgctatcgccactctgatggtggacgatctgttcagcgatgtggcatacaaggcaaggaatagagaggacttgatagccggcattgacgagtttctcgacgaggtgatcgtgctgccgcctggcgagtgggatcctaacatcagaatcgagcctccaaagaaggtgccttccgccgacaagcggaaatctgtgttttccttggcagagcttggccagatgaacggtagcgttggcggaggcggaggagcacccggcggcggcaacggtggtggaggcgggggaggcagtgggggaggagcaggaagcgggggcgccggcggcacgagcagcggagatgatggtgaaatgcccgcaatgcatgagatcggggaggagctcatttggactggcaggttcttcggcggcctttgtctggacattaagcggaaactcccctggtttccttccgatttttacgacgggtttcacattcagtctatttctgcaattctatttatataccttggatgcatcacaaatgccatcacattcggcggattactgggagacgctacggacaactaccagggtgttatggaaagcttcctgggcacagcaatggccggatctctgttttgcttatttagtggacaacctctcattattctgagctccaccggaccaatactgatcttcgaaaaattactatttgattttagcaaagggaatggattggactatatggaatttaggctatggatcggcctccacagcgccgttcagtgcttgatcctggtggccacggacgcaagtttcatcattaagtacataacgcgctttacagaggagggtttcagcacactcatctcatttatctttatctacgatgccattaagaagatgatcggagcctttaagtactaccccataaatatggacttcaaaccgaactttataaccacttacaagtgcgaatgcgtggccccagacactgtcaacaccactgtgtttaatgcctccgcccccttggcccccgatacaaacgcgtccctgtataacctgctgaacttgacagcccttgactggagtttgctctctaagaaggaatgcctctcctatggaggccgtctcctgggcaacagctgtaaatttatccccgatctcgctctgatgagttttatcctgtttttcgggacttactcaatgactctaacattgaagaagttcaagttttctcggtacttccccacgaaagtgcgagccctagttgctgacttttctatagttttcagcatcttgatgttctgcgggatcgatgcttgttttggattagagacccccaaactgcatgtgccatcagtgatcaagccaacacgccccgatcggggctggtttgtggcaccttttggcaaaaacccgtggtgggtctatcctgcttcaatcttgccagctctcctcgtgaccatactgatcttcatggaccagcaaataaccgcagtgatcgtcaaccgtaaggagaataagttgaagaaagcagctgggtatcatcttgacctgttctgggtgggcatcctcatggcattgtgctccttcatgggactgccatggtatgtagcagcaacagtgatcagcatcgcccatatcgacagcctgaaaatggagacagaaacctcagcccctggagaacagccacaatttctcggagtgagagagcagcgagtcactgggataatcgttttcatcttaactggcatttctgtttttctggcaccaatcctcaagtgcattcctcttccagtgctgtatggcgtcttcctctatatgggggtcgctagcttaaatgggatccagatgggcacaggaggaagtgagtttaagatccagaaaaagcttaccccattctgggagcgatgcaagctgttcctaatgcccgccaagcaccagcccgatcatgcctttctgcggcatgtaccactgagaagaatccacctcttcacgttagttcagattttgtgtttggctgtgctctggatcttgaagagcactgttgcagcaataatattcccggttatgagcctgagcacaaccgatctcgggcttatcatcgtccgacgactgctggattttatcttctcacagcacgatttagcctggattgataacatccttccggaaaaagagaaaaaagaaactgacaaaaagcgcaagagaaaaaagggcgctcacgaggactgtgacgaggaaccccaattcccccccccctcggtcattaagattccaatggagtccgtgcagtctgaccctcaaaatggcatacattgcatcgcgcggaagcgctcctcttcctggagctactcattatag

SEQ ID NO: 135416 - DNA, 3645 bp, synthetic construct
  misc_feature 1..3645: note = Description of Artificial Sequence: Synthetic coding sequence
  source 1..3645: mol_type = other DNA
atggaaagattccggctagaaaaaaaactgcctgggcccgacgaggaggccgtcgtagacctcggcaagacttctagtactgtcaatactaagttcgagaaggaagagctggaatcccaccgggcagtgtacatcggcgtgcatgtgccgtttagtaaagaatcaagaaggcggcacagacaccgcgggcataagcaccatcaccggcgaaggaaggataaagaatcagataaggaagacggccgcgagtcaccctcctatgacacgccctcccagagagtccaattcatcctggggaccgaagacgatgacgaagaacatattccgcacgacctgtttacagagatggacgagctgtgctatagagatggtgaggaatatgaatggaaggagaccgcacggtggctgaagttcgaggaggacgtggaagacggcggggacagatggtcaaagccctacgtggccacgcttagtcttcactccctgtttgaacttcgatcctgcatcttgaacggcactgtaatgctcgacatgcgggcttcaaccttagacgagatcgccgatatggttcttgacaatatgatagcatcagggcagctggatgagtccattagggagaacgtgcgagaagcccttcttaagagacaccaccaccaaaatgaaaagcgcttcacaagtaggatcccactggtcagatctttcgctgacatcgggaagaagcactcagacccccatctcctggagcggaatggcgagggccttagcgcttcacgtcactctcttcggacaggcctgtccgcctcgaacctcagtctacggggagagagccctttatccctgctgcttggccacctcttgccctcatcacgggcgggtacacccgctggttcaagatgcactacacccgtcccaacccctcagaactcccccccatcaagcccatcgatcagcaggctgacgtctagaagctctcaagagagccagagacaggcgccagaactcctcgtgtctccggcctctgacgacatcccaacagtggtcatccacccgccagaagaggatcttgaggccgcactgaagggcgaggaacagaagaacgaggagaacgttgatctgactccaggcattctcgcatccccccagagcgctccaggcaatttggacaactccaagtctggggagataaagggcaatgggagcggaggcagcagggagaacagtaccgtcgatttctctaaggttgatatgaatttcatgcgaaaaattcctaccggtgcagaggcctctaatgtcctggttggtgaagtggactttctggaacgacccattatcgctttcgtgcggctcgcccctgccgtgctgctgaccggactgaccgaggtcccggtgcctacaagattcctgttcctgctgctgggacccgctggtaaggccccacagtaccacgaaatcgggcgcagtattgctacacttatgaccgatgagattttccacgacgtcgcttacaaagccaaagatcggaacgatctgctttctggaattgatgaattcctggatcaggtgacagtgttaccacctggagagtgggaccccagtatcaggattgaaccccctaagagcgtgccttctcaagagaagagaaaaattccggtatttcacaacggctccactcccactctgggagagacacccaaagaagcagcccaccacgcaggtcctgaactgcagcgaaccggacgtctctttggaggcttaatcctcgatatcaaacgaaaagctcccttttttctgtccgattttaaggacgctttgagccttcagtgtttggcctcgatcctgtttctgtactgcgcctgtatgtcaccggttattacttttggcggactgttgggcgaagccacagaggggcgaatatctgccatagagtctctttttggagcatctctgacaggaattgcctactccctgttcgctggccagcctctgaccatcctgggaagcaccggcccagtgctggtgtttgagaaaatcttgtataaattttgcagggattatcaactttcatacctgtctctcagaacaagcatcggcctctggacatcatttctatgtatcgtccttgtggcaaccgacgccagttcactagtatgctacataaccaggtttacagaggaagcatttgccgcattgatatgtataatatttatttatgaggccctggagaaactgttcgacctgggggaaacgtatgcctttaatatgcacaataatctggataagttgacatcatatagctgcgtttgtaccgaaccccctaatccgtctaacgagacactggcacagtggaagaaagataatatcacggcccacaatatcagctggcgaaacctcaccgtaagcgagtgtaaaaagctaaggggtgtgtttcttggatctgcttgtggccatcacggtccctatatacctgatgtcctattttggtgcgtgattctgttcttcactacctttttcctgtcttctttcctgaaacagtttaaaactaagaggtattttccaaccaaagtgcggtctactattagcgatttcgcagtatttctcaccatcgtgataatggtaaccatcgattatctggtcggggttccatcccccaaactccatgtccccgagaagtttgagcctacacatcccgagcggggttggatcatcagcccgctgggagataacccttggtggacccttctcattgctgccatacccgccctgctctgcactatactgatctttatggatcaacaaattactgcagtgatcattaatcgaaaggaacataagctcaagaagggtgcggggtaccacctggacttactgatggtcggagtaatgctcggcgtgtgctctgtgatgggcctgccttggttcgtagcggccaccgtcctgtctattagtcacgtaaatagccttaaggtcgaatcggagtgctctgccccaggcgagcagccaaagttcctgggaatccgcgagcagagggtgaccggactgatgatcttcattctgatggggctgtccgtgttcatgactagcgtgcttaagttcattcctatgcctgtgctctacggcgtatttctgtatatgggggtgagctccctcaagggcatccagttgttcgacagaatcaagctctttggtatgcctgcaaaacaccaacctgacctcatctacttgcgttacgtgcccttgtggaaagtgcatatttttacagtgatccagctcacatgcctagttctcttatgggtgattaaagtgtcagcagcggcggtagtattccccatgatggtcctggccctggtgttcgtccgcaaactgatggatctctgtttcactaagagagaactgtcctggctggatgatctcatgcccgagagtaagaaaaaaaaagaagacgataagaagaagaaagagaaagaagaagctgaacgcatgctgcaggacgatgacgataccgtgcacctgccgtttgagggaggctctctattgcagatacctgtgaaagcattgaagtatagccccgacaaaccagtcagcgtgaaaatttcttttgaggatgagccacgcaaaaagtatgtagacgccgagacatccctgtag

SEQ ID NO: 135417 - DNA, 2403 bp, synthetic construct
  misc_feature 1..2403: note = Description of Artificial Sequence: Synthetic coding sequence
  source 1..2403: mol_type = other DNA
atggaggtcgtggaagcagagaaaattgtgctcctaacttcggccagattcctgtttcttctgctgggtcctgctggaaaggctccccaataccacgagataggcaggtcaatagctaccctgatgactgacgagatctttcatgacgtggcatacaaggccaaggatcggaatgacctcctcagcgggatcgatgagttcctagaccaggttacagtgcttcccccaggcgagtgggacccgtctatccggattgaacctcctaagtccgtgccttcccaagagaagaggaagataccagttttccataatggctctacaccgactctgggggagaccccaaaagaagctgcccatcatgccgggccagagctgcagagaacggggcgcttatttgggggtttgatcctggacattaagagaaaagcaccattcttcctgtccgattttaaggatgcactttccctgcagtgtctcgccagtattctgtttttgtactgcgcttgcatgagtcctgtgatcacatttgggggccttttaggtgaagctacagaaggtagaatcagcgctatcgaaagccttttcggtgcctctctgaccggaatcgcctattctctcttcgcgggtcagcccctgaccatcttaggtagcactgggccagttctggtgtttgagaaaatactgtacaagttctgtcgcgattaccagttatcatacctctcgctgaggacttccattggactgtggacctccttcctgtgtatcgtgctggtggcaactgacgccagctcactcgtgtgttatataacacgctttaccgaggaggcctttgccgcattgatatgtatcatttttatttacgaagctttagagaagctattcgatttgggagagacatacgccttcaatatgcacaataacctggacaagctaacgagttactcctgcgtctgtacagaaccacccaaccctagcaacgagaccctggctcaatggaagaaggacaatattacagcgcacaatatttcttggcgaaatctgaccgtttcagagtgtaaaaagctgcgcggggtgtttttgggtagtgcttgcgggcaccacgggccctatatccccgatgtgctgttttggtgtgttatcttgttcttcacaaccttttttctgagctccttcctgaaacagtttaaaactaagagatattttcccactaaggtgcgcagcactatcagtgatttcgccgtgtttttgaccattgtgatcatggttaccattgactacctggtgggcgtaccctcccccaaactgcacgttcctgagaagttcgagcctacccatcccgagcgtggatggatcatttcccctctaggcgacaatccgtggtggacacttcttatcgccgccattccagcccttctttgtaccattctgatctttatggatcagcaaattacagccgtgatcataaaccggaaggagcacaagttgaagaaaggcgctggttaccacttagacctcttgatggtgggtgtcatgttaggcgtatgcagcgtgatgggtcttccttggtttgtggcagcaacagtgctgtctatctctcacgtcaatagcttgaaggtggagtctgagtgcagtgctcccggtgagcaacccaagttcttaggaatacgggaacagcgcgtgaccgggctgatgatcttcattctgatggggctgtcggtgtttatgacatctgtgttgaaattcattcctatgcctgttctgtatggagtattcctgtatatgggcgtttcctccttaaagggaatacaactgtttgaccgcatcaagctgtttggcatgcccgcaaaacaccagccagatctgatatatctgagatacgttcccctgtggaaggtgcacattttcactgtgatacaattgacgtgcttggtcctgctgtgggtgattaaagtgtccgctgcagctgtcgtcttccccatgatggtgctagctctagtctttgttcgcaagctgatggatttgtgttttaccaagcgggaattatcctggctggacgaccttatgccagaatccaagaagaaaaaagaagatgataagaaaaagaaggagaaagaagaggccgagaggatgttacaggacgacgatgatacagtgcacctgccgtttgaaggtggcagccttctgcagatccccgtgaaagccctaaagtactctgttgatccatctattgtgaatatctctgacgaaatggctaaaaccgcccagtggaaggctctgtccatgaataccgaaaacgccaaggtgacgcggtccaacatgtcccctgacaaaccagtgtctgtgaaaatctctttcgaagatgagcctaggaaaaaatacgtggatgctgagacttctctctag

SEQ ID NO: 135418 - DNA, 1725 bp, synthetic construct
  misc_feature 1..1725: note = Description of Artificial Sequence: Synthetic coding sequence
  source 1..1725: mol_type = other DNA
atggaagcagatggagcaggcgaacagatgcggcctctgctaaccagaggaccagatgaagaagctgttgtggatttgggcaagacctctagcacagtgaatacaaaattcgaaaaggaagagcttgagtctcaccgtgccgtctacatcggcgtccatgtccccttctcaaaggagagccgcaggcggcacaggcacaggggacacaaacaccaccaccggcgcagaaaagacaaagagtcagacaaagaagatggacgggagtccccttcctatgacaccccttcacaacgagtgcagtttatccttggaaccgaagatgacgacgaagagcacatcccacatgacttattcactgagatggacgagctttgctacagggatggcgaggagtacgagtggaaggagactgccagatggctaaagttcgaggaagacgtggaggacgggggcgaccggtggagcaaaccatacgtcgccacactaagtctccactcactgttcgagcttaggtcttgtatccttaatggaaccgttatgttggacatgcgggcgtctacactcgacgaaatagccgacatggtactggataatatgatagcatctggccagcttgacgaatccatacgcgaaaacgtcagggaggcactccttaagcgacaccatcaccagaacgagaaacgtttcacatcccgaatccccttggtcagatcttttgctgacattggagagggccttagtgctagcagacactccctccggaccggcctctccgccagtaatctttctctgcgaggtgagtcacctctgagtctgcttctggggcatttgctgccttcctccagggcaggtactccagcaggatctagatgcactacgcctgtgccgacgcctcagaacagccccccctcctccccctctatctctcgactgactagcagaagtagccaggagagtcagcgtcaggcccctgaactgctggtgagcccggcctctgatgatataccaactgttgtgattcacccaccagaagaagatctcgaagccgctttaaaaggtgaggagcaaaagaacgaggagaatgtagacctcacacctggcatcctcgcttccccccagagcgctccaggcaatctcgacaactctaagagtggagaaatcaaggggaatggctcggggggatcacgagaaaattccaccgtcgactttagcaaagtcgacatgaactttatgcggaagatccctaccggcgccgaggcgtcaaatgtgctcgtcggcgaagtggactttcttgaacggccaattatcgcatttgtgaggctagcccctgcagtgctgcttaccggattgacggaggtgcccgttcccactcgctttctgtttctcctgctcggaccagctggcaaggctccgcagtatcacgagatagggcgcagcatcgccacccttatgacagacgaaatcttccacgatgtagcctataaggccaaggatcgtaatgacctgttgtccggcattgatgaattccttgaccaggtgaccgtgctgccccctggtgaatgggatcccagcataaggatagaaccgcctaagtctgttccaagccaggagaaaaggaaaataccagtttttcacaacggttctacccctactctgggagagacaccgaaggaagccgcacatcatgccgggcccgagttgcaacgtaccggccgggtccagtag

SEQ ID NO: 135419 - DNA, 3273 bp, synthetic construct
  misc_feature 1..3273: note = Description of Artificial Sequence: Synthetic coding sequence
  source 1..3273: mol_type = other DNA
atggagaggttccgcctggaaaagaagctgcccggccccgacgaagaggccgttgtggacctgggcaagacctcctcaactgtgaatactaagttcgaaaaagaggaactggagtcccacagggctgtttacatcggagtgcacgtaccattctctaaagaatctcgacggagacatagacatagggggcataaacaccatcatagaagaaggaaagacaaggaatccgacaaggaggacgggcgggaaagcccatcctacgatacaccctctcagcgcgtccagtttatcttgggaacagaggacgacgatgaggagcatatcccacacgatttgttcacagagatggatgaactctgctatagggacggtgaggaatacgaatggaaagagaccgcccgatggctgaaatttgaagaggatgtcgaagacggtggcgaccggtggtccaagccatacgtggctacactctcattacactcacttttcgaattaagatcttgcatccttaatggtactgttatgcttgatatgcgggcttccacactcgacgagatcgcagatatggttcttgacaatatgattgcctccgggcaattggacgagagcatccgcgagaatgtgagagaagccctgcttaagcggcatcatcaccagaatgagaaacggtttacaagtagaatacccctggtgcgctcatttgctgatattgggaagaagcacagcgacccccacttactcgaacgtaatggaattctggcctctccacagtctgccccgggcaacttggataactcaaagtccggcgagatcaagggaaacggcagcggcgggagtcgcgaaaattcaaccgtagatttttcgaaagtagatatgaactttatgcgaaagattcccacaggtgccgaagcctcgaacgtgcttgtcggagaggtcgacttcttagagagaccgataattgctttcgttcgcctcgccccggctgtgctcttgaccggcctcacggaggtgccagttcccaccagattcttgttccttttgctcggtcccgcaggtaaggccccccagtaccatgagatcgggcgatccatcgccaccctgatgactgacgagatttttcatgacgtggcctataaagcgaaagaccggaacgaccttctgagtggcatcgatgagtttctcgaccaggtcacagtgcttccccccggcgagtgggaccccagcattaggatcgagccccctaaatccgttccctcacaggaaaaacggaaaatcccggtgttccacaatgggagtacccccactcttggtgagacacctaaggaggcagctcaccacgccggccccgaactgcagagaacagggagactgttcggaggattgattctggatattaagagaaaagccccattcttcctttcggacttcaaggatgccttatccctgcaatgtttagcaagcattcttttcttatactgcgcctgcatgtcgccggtgatcaccttcggaggcctcctgggcgaggccacggaaggacgcatcagtgctattgaaagcctgttcggggcctcactgacagggatagcatacagtctttttgccggccagcctctcacgattctcggaagcaccggacccgttttggtctttgagaagatcctctacaaattttgtcgggattatcagttgagctacctctctctacggactagcattggactctggacctcttttctgtgcatcgtgctcgtagcaacagacgcctcctctttggtgtgctacattacgcgcttcacagaagaggcttttgcggccttgatttgtatcatttttatctacgaagctctcgagaagctgtttgacctaggtgaaacttatgccttcaatatgcataacaacttggataaactaacatcttactcctgtgtgtgtacagagcctcccaatcctagcaacgagactctagcacaatggaaaaaggacaatataacagctcataacatttcgtggcgaaacttgaccgtttccgaatgcaagaagttgcgcggggtcttcctgggtagcgcatgtggccatcacgggccctatatccccgatgtcctgttctggtgtgttatcctgtttttcactactttctttctgtctagttttctgaagcagttcaagactaagaggtactttcccactaaagtgcggtctacaattagcgactttgcggtgttcttgacaatagtgatcatggtcacaatagattatctggtcggcgtgccatctcctaaactgcatgtgcctgaaaagtttgagcccacccaccccgaacgtgggtggataatctctcccctcggagacaatccatggtggaccttgctgatcgccgcaattccagccctgctctgtacgattctgatcttcatggaccagcagataaccgcggtcatcatcaacagaaaggaacacaaactgaagaagggagccggatatcacttagatttactcatggttggcgtgatgttaggcgtttgcagcgtgatgggtctcccgtggtttgtcgcagctaccgtcctaagcatcagccacgtgaattccttgaaagttgaatctgaatgctcagcacccggggaacaacctaagtttctgggtatccgcgaacagagggtgaccgggttgatgatttttatactgatggggctaagtgtcttcatgaccagcgtgctgaaattcattcccatgccggtcctctacggggttttcctctacatgggcgtgagttccctaaagggaatccagctttttgaccgcataaaactgttcgggatgcccgccaagcatcagcccgatctcatctacctgaggtatgtgccactgtggaaggtgcatattttcacagtcatccagcttacctgtctggtgctgctatgggtgattaaggtttctgccgcagcagtggtgtttcccatgatggttctggccctggtgtttgtaagaaagctaatggatttatgcttcactaagcgggaactatcctggttggatgatctcatgccagaatcaaagaagaaaaaagaggatgacaagaagaagaaggagaaagaggaggccgaacgcatgctgcaggacgatgatgatacagtccacctgccgttcgaaggaggctccctgttgcagatacccgttaaggcgctcaaatattcacctgacaaacctgtgtcggtcaagatctcattcgaagatgagccacgcaagaaatacgtagatgctgagacctccctctag

SEQ ID NO: 135420 - DNA, 3408 bp, synthetic construct
  misc_feature 1..3408: note = Description of Artificial Sequence: Synthetic coding sequence
  source 1..3408: mol_type = other DNA
atggaagctgacggcgctggagaacagatgcgcccattattgactagagttacaagtcggggacccgacgaagaggcagtggtggaccttggcaagacttcttctactgtgaataccaagtttgagaaggaggaattagaaagtcatcgcgccgtgtacattggagtgcatgttccattctctaaggagtctaggcggcggcatagacatcgcggtcacaaacaccatcataggcgacgcaaggataaagagtccgacaaggaagatggcagagagtccccctcgtatgacacccctagtcaacgcgtgcagtttatccttggaacagaagatgatgatgaagagcacattccccatgatctgtttactgagatggatgaactctgctaccgggacggcgaggagtacgagtggaaggagaccgcccgctggctgaagttcgaggaggatgtcgaagacggtggcgatcgctggagcaagccttatgtagctactctttccctgcacagtctgtttgagttgcggagttgtatactcaacggtacagttatgttagacatgagagctagcaccttagacgagattgccgatatggttctggacaacatgattgcttccgggcaattggacgagtctatccgggagaacgtccgggaggccctcctgaagagacatcaccatcagaacgaaaaacgtttcacctctcgcataccactcgttagaagctttgcagatattggcaaaaagcacagcgacccgcacctcctggaaagaaacggaatactggcctcaccccagtccgcccccggcaatctcgataattccaagagtggggaaatcaagggcaatgggtctggcgggtcaagggaaaactcaacagtagacttctctaaagtggacatgaactttatgagaaaaattcccacaggagccgaggcaagcaacgtgctcgtgggagaagtcgattttctggaacgcccaattattgccttcgttcgtctggcccctgctgtcctccttaccggtctgacagaagtccccgttcccactcggttcctcttcttactcctggggcccgccggtaaggctccacagtaccatgagatcggtcgcagcatcgcgactctaatgacagatgaaattttccacgatgtggcatacaaggccaaggatcggaatgacttgctgtccgggatcgatgagtttctggaccaggtgactgttctgcctcccggagaatgggatccatccatcagaatcgagccaccgaagtctgtccccagtcaggagaaacgaaaaatccccgtattccacaatgggtctacaccgactctgggagagactccgaaagaggccgctcaccacgctggacccgagctccagcggacgggtaggttattcggcggattgattttggacataaaacgtaaagcccccttcttcttaagtgatttcaaagacgctttgagccttcagtgcctcgcctccatcctgtttctgtactgcgcgtgcatgtcaccagtgattaccttcggaggattgctgggtgaggcaaccgagggccgtatctcagccatcgagtctctattcggcgcctcactaactggtattgcttactccttgttcgcagggcaacctctgactattctcggatccactggaccagtgctggtgttcgagaagattctgtacaaattttgtcgtgactatcagctgtcttatctgtcattgcgtacgtcaatcggcctgtggacgtccttcctgtgcattgttctggtcgctacagacgcttcttcattggtgtgctatattacacgattcactgaagaggcattcgcagcacttatctgcattattttcatttacgaagcactggaaaaattatttgacttgggtgaaacatatgcgttcaatatgcacaacaatctggataaacttaccagctatagctgtgtgtgtacagagcccccgaacccatccaacgaaaccctggctcagtggaagaaggacaatattaccgctcacaatatctcttggagaaacctgactgtgtccgagtgtaagaaactgaggggagtgttcctgggctctgcatgtggtcaccacgggccatatatacccgacgtcctgttctggtgcgttatcttatttttcacaacctttttcttgtcaagctttcttaaacagtttaagaccaagagatatttcccaactaaggtgagatctacaatttccgacttcgccgtgttcctgactatagttatcatggtgaccatagactatctggtgggagttccaagtcctaagctacacgttccagaaaaatttgagcccacccacccagagaggggctggatcatctcaccacttggagataacccctggtggaccttactcatcgccgcaatccccgcccttctgtgcactattctgatcttcatggaccagcagattaccgcggttatcatcaatcgcaaagagcacaagttgaaaaaaggggccggctatcatttagacctcctaatggtgggtgtcatgttgggcgtatgtagtgtgatgggcctgccatggttcgtagccgccaccgtgctgtccataagccacgttaatagccttaaggtggagtccgaatgcagcgccccgggggagcagcctaaattcctcggcatacgcgaacagcgagttactggacttatgatattcatattaatggggctgagtgtctttatgacttcagtgctgaagttcatacccatgccagtgttatacggagtattcctatacatgggcgtctcttctctgaagggtatccagttatttgacagaattaagctgtttgggatgcccgccaagcaccagccggaccttatctatttgcggtacgtgcctctttggaaggtccatatcttcaccgtgatccagttaacctgcctggtactcttatgggtgattaaggtgagcgctgcagccgtggtgtttcccatgatggtcctggcactggtgtttgttcgcaagttaatggacttatgtttcacgaagagagagctttcctggcttgatgatcttatgcccgaatccaagaagaaaaaggaagacgacaaaaagaagaaggaaaaggaggaggctgagcggatgttgcaggacgatgacgatactgtccacctaccctttgaagggggctcactgctccagattcctgtgaaggcactgaaatattcagttgatccctcaatagtgaatatctctgacgaaatggctaagaccgcgcaatggaaagctcttagcatgaacaccgagaacgctaaagtgacacgctccaatatgtcaccggacaaaccagtctccgtcaagatttcattcgaagacgagccccgcaaaaagtacgtcgatgccgagacgtccttgtag

SEQ ID NO: 135421 - DNA, 3288 bp, synthetic construct
  misc_feature 1..3288: note = Description of Artificial Sequence: Synthetic coding sequence
  source 1..3288: mol_type = other DNA
atggaggccgacggagccggtgagcagatgagacctctcctgactagaggcccagacgaagaagcggtcgtggatttaggaaaaacgtcaagcactgtgaatacaaaatttgaaaaagaagaactcgagtcgcaccgcgccgtgtacattggggtgcacgtcccattcagcaaggaaagtagacgtcgccaccgtcatcgcgggcacaagcatcatcatcgacgccgcaaagataaagagagcgataaggaggatggcagagaatccccatcgtacgatacaccgtcgcagcgcgttcagttcatcctgggcacagaggatgacgatgaggaacacattccacacgatctgtttactgaaatggatgaactgtgttacagagacggggaagaatatgagtggaaagagacagcacgctggctcaagtttgaggaagatgtcgaggacggcggtgacagatggtccaaaccctacgttgccactttgagcctgcactctttgttcgagcttaggagttgcatactaaacggcaccgtgatgctggatatgagggccagcacacttgatgaaatcgctgacatggtcctcgataacatgattgcgagcggacagctggatgagtctatcagagaaaacgttcgtgaagccctactcaagcgacaccaccaccagaacgagaagaggttcacaagcaggatccctctcgttagaagtttcgcggacatcggcaaaaaacacagcgaccctcatttactagaaaggaacgggatcctcgcatctccacagtcagccccaggaaatctggacaactccaagtccggcgagataaaagggaatggaagcggcggttcccgcgagaactctactgttgatttttcgaaggtggatatgaacttcatgaggaaaattcccactggcgcagaggcctctaacgtgcttgtaggcgaggtcgactttctggagcgaccaatcattgcatttgtgcgcctcgctcccgcagtactgctcaccggccttactgaggtcccagttccgacaagatttctgttcttacttttaggccccgccggtaaagcgccccagtaccacgaaatcggcagatctatagctacactgatgaccgatgagatcttccacgacgttgcctacaaggctaaagatcggaatgatttactgtccgggatcgacgagttcttagaccaggttactgtgctgccgcctggggagtgggatccatctattagaatcgaacctcccaagagcgttccatcgcaggagaagcgcaaaattccagtatttcacaatggctctacgccaacactgggagagacccctaaggaggccgcccaccacgccggacccgagttgcagaggactgggaggctgttcgggggcctgatcctcgacataaaaagaaaggcccctttttttctttcagatttcaaagacgctttatcactgcagtgccttgcatctatactgtttctgtactgcgcttgcatgagccccgtgatcactttcggcgggctgctcggcgaggccactgagggaagaatcagtgcgatcgaaagcctcttcggcgcaagtctgacagggatagcttacagtctgttcgctggacaacctctgaccatactgggatctacagggccagtgctggtgttcgaaaaaattctctacaagttttgtcgggactaccaactgtcatatcttagtttaaggacaagcattgggttgtggaccagctttctgtgtatcgtgttggtcgcaactgatgcttcatcgctagtatgctacatcactagattcacagaagaggcgttcgctgccttgatatgcataatatttatttacgaggcactggaaaagctgtttgatctgggagaaacttatgcctttaatatgcataataacctggacaagctgactagttacagctgcgtctgtactgagccaccaaacccgagtaatgaaactctggcacagtggaagaaagataatatcactgcccataatattagctggcggaacctgacagtgagtgagtgcaaaaaattgcggggcgtgttcctgggctccgcttgtggacatcatggcccttatatcccggatgtgctcttctggtgcgtcattctgttttttaccacattctttttgagttccttcctgaagcagttcaaaacaaagcggtattttcccaccaaagtgaggagcactatttcagatttcgccgtatttctgactatcgttattatggtcactatagactacttagtgggcgtcccgagccccaaattacacgtgcccgaaaagtttgagcctactcatcccgaaaggggctggattatctccccactgggcgacaacccctggtggactctcctgatcgcagccatcccagcgctcctgtgtactatcctgattttcatggatcagcagatcacagcagtaattattaatcgtaaagagcataagctcaagaaaggtgccggctaccacctagatctgctgatggtaggggtcatgttgggagtgtgttctgtgatggggctcccttggtttgtagctgcaaccgtcttaagtattagtcatgtgaactccttaaaagtggaaagtgagtgctctgccccaggcgagcaacctaagttcctgggtattcgcgaacaacgggttacaggcctgatgatatttatcctgatgggactaagcgtctttatgacctccgtgctgaagttcatccccatgcccgtgctgtatggtgtttttctctacatgggagttagcagtcttaagggtatccagctgtttgatcgcataaaacttttcggcatgcctgccaagcaccaaccagacctgatctacctacggtacgttcctctatggaaagtgcacatttttacggtgatacaattaacatgcctggtattgctgtgggttattaaggtatccgcagcggcagtggtcttccccatgatggtgctagcccttgtgttcgtaagaaagcttatggacctgtgcttcactaagagagagctctcctggctagacgatctcatgccagaaagcaaaaaaaagaaggaagacgacaagaaaaaaaaggaaaaggaggaggcggagcggatgctgcaggatgacgatgacacagtgcacttgcccttcgaaggcggctccttgctgcagatcccagtcaaggcacttaaatacagtcccgataagccagtcagtgttaagattagctttgaggacgagcctagaaaaaagtatgtggatgctgagacaagcttatag

SEQ ID NO: 135422 - DNA, 1392 bp, synthetic construct
  misc_feature 1..1392: note = Description of Artificial Sequence: Synthetic coding sequence
  source 1..1392: mol_type = other DNA
atggaagcagacggcgcgggcgaacagatgcgaccattacttactagggggccggacgaggaggccgtggtcgatcttggcaagacttcatctactgtgaatacaaaatttgagaaggaggaacttgaatcccaccgggctgtgtatataggagtgcacgtaccttttagcaaggagagccggcgccggcaccgacacaggggccacaagcatcaccataggcgacggaaggataaagaatccgacaaggaggacggtcgcgagtctccctcttatgataccccgagccaacgcgtgcaatttattcttgggactgaggatgatgacgaagaacatatacctcatgatctttttaccgaaatggacgagttatgctatagagacggggaggagtacgagtggaaggaaaccgcccgatggctcaaattcgaagaggatgtggaagacgggggggaccgatggtcgaagccctacgtggccacgctgagtttacattcattgtttgaactacgctcctgtatcttaaacggtacggtcatgttggatatgcgagcctctaccctcgacgaaatcgcggacatggtactcgacaacatgatcgcatcgggccagctggacgagtctattcgagaaaatgtgagagaagccttactgaaacggcaccaccatcagaacgagaagcggtttaccagtagaattccactcgtaagaagctttgctgacattggtaagaaacactcagatccgcatttgctggagaggaacggcatattggccagtcctcagagtgctcctggcaacctggacaatagcaagtcgggcgaaatcaaaggaaacggcagcggagggagccgagagaacagcacagtggacttctccaaagtcgacatgaactttatgcggaaaatccccaccggcgctgaggcctcaaatgtactggtcggggaagttgatttcctagagcggcctatcattgcattcgttaggcttgcccccgccgtcctcctgaccggcctgactgaagttcccgttccaacccgctttctgtttctgcttttaggacccgctggaaaggcccctcagtatcatgagatcggaagatccatcgctacattgatgactgacgagatttttcacgacgttgcctacaaagcaaaagaccgcaacgatctgctgtcgggtatcgacgagtttttagatcaggtcacggtgctgccaccgggtgaatgggatccttccatcagaattgaacctcccaaatccgtccccagtcaggaaaaacgcaagattccagtgttccacaatgggtcaaccccaacacttggggagactccaaaggaggctgcgcaccacgctggtcctgaattgcagcggactgggagggtgcagtag

SEQ ID NO: 135423 - DNA, 1725 bp, synthetic construct
  misc_feature 1..1725: note = Description of Artificial Sequence: Synthetic coding sequence
  source 1..1725: mol_type = other DNA
atggaagcggacggcgccggggagcagatgagaccactcttgactaggggccccgatgaagaggcagtggtggatcttgggaagacgtcatccaccgtgaataccaaatttgagaaggaagagctggaatcacatcgggctgtgtatattggtgtccacgtaccgttctcaaaagagtcccgcagaaggcataggcacagaggacacaagcatcatcaccggcgtagaaaagataaggagagcgataaagaggatggaagagaatctcctagttatgatacccctagccagagagttcagtttattctgggtacagaggatgacgacgaagaacacattccccatgacttattcaccgaaatggatgaattatgctacagggacggagaggagtacgaatggaaagagactgcaagatggctcaaattcgaagaggatgtagaggatggcggcgaccgttggtccaaaccctacgtcgccaccctcagtctgcattccctgtttgaactgagatcgtgcattctgaatgggaccgtcatgttagacatgagagcgtccacactggacgaaatcgccgacatggttcttgacaatatgatcgcctccggacagctggacgagtctatcagagagaatgtgcgggaggccctcctgaagcgccaccatcaccaaaacgagaaacggtttacatctagaattcctctcgttagatcattcgccgacataggggaaggcttaagcgccagccgccacagcctgcgaacaggactgtccgcctcaaacctctcccttcggggggaatccccgctcagtctcttacttggccacctgctgccatcatctcgcgctggcacgccagccggttcccgatgcacgacacccgtcccgaccccccagaatagtccacctagctcgccaagcatttctagactgacgtccagatcgtcccaagaatcacagcggcaggctcctgaattgttggtctctcccgcatctgatgatataccgactgtcgtgattcatccccccgaagaagacttggaagcagccctaaagggggaggaacagaaaaatgaagagaatgtggacctcacgccgggaattctggcgagtccgcagagtgcacccggcaatctcgataacagcaaatctggcgagatcaagggcaatggctccgggggttcacgggagaactctacagtggatttctcaaaagtcgacatgaacttcatgagaaaaattcccaccggggccgaagcatccaacgtactggtcggcgaagtcgatttcctggaacggcccattattgcattcgtgaggctcgcgcccgcagtgcttctcactgggcttacagaggttcctgtccccacacgcttcctgttcttgctgcttggcccagccggtaaggcaccccaataccatgagataggtcggtccattgctacactgatgactgatgagatttttcatgatgtggcatacaaagccaaagatcggaacgatttactgtccggcattgatgagttcttggaccaggtgaccgtcctgccaccaggcgagtgggacccaagcattcggatcgaaccccctaaaagtgtgccgtcgcaggagaagcggaaaatcccggtgttccacaacgggtctacaccaacattgggtgaaacccctaaggaagccgcccaccacgccgggccagagctgcagcgcactggacgggtccagtag

SEQ ID NO: 135424 - DNA, 3741 bp, synthetic construct
  misc_feature 1..3741: note = Description of Artificial Sequence: Synthetic coding sequence
  source 1..3741: mol_type = other DNA
atggaagctgatggggcaggcgaacagatgcgcccgctgctaacccgggttacatcaagagggcccgatgaagaagccgtcgtagacttaggtaaaacgagctcgaccgtgaacaccaagtttgagaaagaagaactcgaatcccatagagctgtctacatcggagttcacgtgccgttttccaaagagtcccgaagaaggcataggcacagaggtcataaacatcatcacaggaggcgaaaggacaaggaatcagataaagaagatggtcgtgaaagtccttcgtatgatactccttctcagcgggtgcagttcatacttggaactgaagatgacgacgaagaacatatcccgcacgatctgtttaccgagatggacgagctttgttatcgggacggcgaggagtacgagtggaaggagaccgccagatggctgaagttcgaggaggatgttgaggatgggggcgacaggtggagtaagccctatgtggctactctaagtctgcatagccttttcgaattgaggagttgcattttgaacggcactgtgatgctggatatgcgcgctagcaccctggacgagatagctgatatggtgctcgacaatatgatcgctagcggtcagctcgatgaatctatcagagaaaacgtgcgtgaggccctgttgaagcgccaccaccaccagaatgagaaacgcttcactagccgcatccccctcgtccgcagcttcgcagacatcggagagggtctgtccgctagtcggcacagtctgcgaaccggcttgtccgctagtaacctaagcttgagaggggagagccccttgtccctgttgctgggacatctccttccaagttctcgggcgggaacaccggctggatctaggtgtacgacgccagtgccaacacctcagaactccccgccctcctccccatcgatatcaaggctaacgtccagaagcagtcaagagagccagcgacaggccccagagctcttggtgagccccgcctctgatgacatccctactgtggtgatccacccacctgaggaggacttggaagctgcgctcaaaggcgaggaacagaaaaatgaggaaaacgtcgacctgacaccaggaattctggccagtcctcagagcgcacctggcaatttggacaatagtaagagtggagagataaaaggcaacggatccggcggcagcagggagaactccacagtggacttctctaaggtggacatgaattttatgaggaagattcccactggcgccgaggctagcaacgtgcttgtgggagaagtagattttcttgaaagacctattatcgctttcgtccggttggcaccagctgttcttctaactggtttgaccgaggtgccagttccaacgagatttctgtttctgcttcttgggcctgcagggaaggctccgcagtaccatgaaatcgggaggtcaatcgcaacgctgatgacggatgagatttttcatgacgttgcctataaggctaaggataggaatgacttactgtccgggattgatgaattcttggatcaagtaacggtcctgccaccaggcgagtgggacccgtctatcaggatagagccacccaaaagcgtgcctagccaggagaagcggaaaataccagtcttccacaacggctccacccctaccctgggcgagacaccgaaggaggccgcacaccatgcggggcccgagctgcaacgcaccggccgtctgttcggcgggctcattttggatataaaacggaaggcccctttttttctgtcagatttcaaagacgccctgtccctgcaatgtctggcttccatcttgttcctctactgcgcttgcatgtccccagtgattacattcgggggtcttctgggcgaggctacggagggtcgtatctcagccatcgagagtctgttcggtgccagcctgaccggcatagcctactctcttttcgccggacagcccctgacaattcttggaagcactgggcccgtgctcgtgttcgaaaagatcctttacaagttctgccgggattaccaactgagttatctgtccctgcgaacttctataggactgtggacctcgtttttgtgtattgtgctggtcgccaccgatgcatccagtctggtgtgttacataacccggttcacagaggaggcttttgcagccctcatctgcatcattttcatctacgaagccttagagaagctgtttgatttgggcgagacgtacgcgttcaacatgcataacaatcttgacaaactgacttcatattcgtgcgtttgcactgaaccaccaaacccatcgaacgagactctggctcagtggaagaaggacaatataacagctcataacatctcatggcggaatttaacagttagtgagtgtaagaagctccggggcgtatttcttggaagcgcctgcggtcatcacggcccctacatccctgacgtgctgttttggtgcgtcatcctgttctttactacattctttttgtcaagctttctcaagcagttcaagaccaagcgttattttccgactaaagtgaggtccacaatctccgactttgctgtgttcctgacgattgtcatcatggtcaccatcgattacttggtgggcgtgccaagccctaagctccacgtgccggaaaaatttgaacccacccaccctgagagaggatggattatatcgcccctgggcgacaatccatggtggactctcttgatagccgccattccagccctgctgtgtacgatcctgatctttatggatcagcaaatcactgccgttatcattaaccgtaaggaacataagttaaagaaaggggctggctatcacttggacctcctaatggtcggtgtgatgctgggggtctgttccgttatgggtctcccttggtttgtagcagctactgtgctgtctatcagccatgtgaatagtctcaaggtggagagcgaatgcagtgcccccggggaacaacccaaatttttggggatcagggaacagagggtgaccgggctaatgatattcatcctgatggggctgtccgttttcatgacatcggttttaaaatttattcctatgccagtgctgtatggggtcttcctctatatgggcgtcagctccttgaaagggattcagctcttcgaccggattaagctgtttggaatgcccgcaaagcatcagccagacctcatatatctcaggtatgttccactgtggaaagtacacatatttaccgtgattcaactgacatgcctcgtgctactttgggtgatcaaggtctcggctgctgctgtggtgttccccatgatggtcctagccctcgtgttcgttagaaaattgatggacctatgctttacaaagagagaactgagctggctggacgacctgatgcccgagtccaaaaagaaaaaagaagacgataaaaagaagaaagagaaagaggaggctgagagaatgttgcaagacgacgacgataccgtgcatctcccatttgagggcggatctctgctgcagatccctgtgaaggcactgaagtactctgttgatccgagtatcgtaaatatctctgacgagatggcgaagaccgcccagtggaaagcccttagcatgaacactgaaaacgctaaagtaacccgatcgaacatgagcccagataagcccgtctccgtcaaaattagcttcgaggatgaaccaaggaagaagtatgtcgacgccgagacatcgttgtag

SEQ ID NO: 135425 - DNA, 3780 bp, synthetic construct
  misc_feature 1..3780: note = Description of Artificial Sequence: Synthetic coding sequence
  source 1..3780: mol_type = other DNA
atggaagctgatggggccggggaacagatgcgtcctctcctgacgcgggtcaccagccgcggccctgatgaagaggcggtggttgacttggggaagacttcctctactgtcaacacaaagttcgaaaaagaagaattggaatcccacagggccgtctacattggggtgcacgttccattcagcaaggaatctagaagacggcaccgccaccggggacataaacatcaccacaggagacgaaaagacaaggaaagtgacaaagaagatggtcgggagtcaccctcttatgacactccctcccagagagtccaattcattctgggtacagaggatgatgatgaagagcacattccccatgacctgttcacagaaatggatgagctctgttacagagacggcgaggagtacgaatggaaggagaccgccagatggctgaagtttgaagaggacgtggaggatgggggagatcgatggtccaagccctatgttgccaccctgtcactccacagcttgttcgaactgcggagctgtatcctgaacggcactgtcatgctggacatgcgggcctctactctggacgagattgctgacatggtgctggataatatgatcgcttccggccaattggacgagtccattcgcgaaaatgtccgcgaggccctgctcaagcgccaccaccaccagaatgaaaagaggtttacctcccggatcccccttgtcagaagtttcgcagacatcggcaagaaacattccgaccctcaccttctcgagaggaatggggagggcctgtcggcatccaggcactcacttaggaccggtctgtccgcttccaatctctcattgaggggggaatcgcccctaagcctgctcctgggtcacctcttgccctcctcccgagctggcacccccgccggcagccggtgcaccacccctgtccccaccccccagaattcccctcccagctctccctcaatctcacgcctgacttcgcggagcagccaggagtctcagcgccaagcacctgaactcctggtgtccccggcatccgacgacatccctacagtcgtcattcatccgccagaggaagacctggaggccgcattgaagggcgaggagcagaagaacgaggaaaacgtcgacctgacgcccggtattctggctagcccacagagtgcccccgggaatttagacaattctaaaagtggggagatcaaagggaacggctccggcgggtctcgggagaacagtacagtcgacttctccaaggtggatatgaactttatgagaaaaatccccaccggcgcagaggcgagcaatgttctagtcggcgaagtcgacttcctggaaaggcctattattgcattcgttcggcttgcacccgccgtgctcctaactggtctgacggaagtgcccgtaccaaccaggtttttgtttcttcttctgggtcccgcaggaaaagcaccccagtaccacgagatcgggaggtctatcgctacactgatgacagacgaaatcttccatgatgtggcctacaaagcaaaggatagaaacgacctgctctccggcatcgacgagttcctggaccaggttacggtcttgccgccaggggaatgggacccttctattcgcatcgagcctcctaagtcggtccccagccaggagaagaggaaaattcccgtgttccataatggctcaacacccaccctcggcgagactccgaaggaggctgctcaccacgctggacctgagctgcagagaactggtcgtctgttcggaggcctgatcctagacattaagagaaaagcgccattcttcttatccgacttcaaagacgcactgtctctgcagtgcctggcatcaatactgtttctctactgtgcttgcatgagtcctgtgattacttttgggggccttttgggcgaggctacagagggccgaatctcagccatagaatccctgttcggggcgtccctgacgggcattgcctatagcctctttgccggacagccgctcacgattctggggagtactggtccagtattggtattcgagaaaatactgtataagttttgccgggattaccaactgtcctatctaagtctgagaaccagcattgggttatggacatcattcctttgcatcgtgctagtggctactgatgcgtcctccttggtctgttatatcactagatttacagaggaagcatttgctgcgcttatatgcattatatttatttacgaggcactggaaaaactgtttgacttgggtgagacttatgcatttaatatgcataataatctagacaaacttacttcatatagttgcgtgtgtaccgaaccacctaatccgtcgaatgagaccctggcgcagtggaagaaggacaatataacagcccataacattagttggcgcaaccttacagttagcgagtgtaaaaagttgagaggggtcttccttgggagcgcctgtggccatcacggtccctatattccagacgtgctgttttggtgcgtcattctgttctttacaacattcttcctatccagttttctgaagcagttcaagacaaagcgttatttccccactaaggtgcgatctaccataagcgatttcgcggtctttttgactattgtaataatggtgaccatcgactaccttgtgggcgtgccgagtcctaaactccacgtccccgagaagttcgagcctacacacccagaaagagggtggatcatctcaccactgggggataatccatggtggaccctgctgattgccgctattccagccttgctgtgcaccattctgattttcatggaccagcagattaccgccgtcattattaatcgcaaggaacacaaattgaagaaaggcgctggctaccatctggatctattgatggtcggtgtgatgctgggtgtgtgcagtgtaatgggcctgccttggttcgtggccgctactgttctgagtatctcacatgtcaactctttaaaagtggagtccgaatgtagcgcacccggcgagcagcctaagttcctcggcattcgggaacagagggtgaccggactaatgatttttattcttatgggcctgagtgtgttcatgactagtgttttaaagttcattcctatgcccgtgttgtacggcgtatttctctacatgggggtgtcatcactgaagggcattcagctgttcgatcgcatcaaactgtttggaatgccagcaaaacatcaaccggacctgatttatcttcggtatgttcccctctggaaagtccacatcttcactgtgatccagctgacgtgcttagtgctgttatgggtgattaaagtgtccgccgccgccgtggtttttccgatgatggtgctggccctggtgttcgttaggaagcttatggatttatgtttcacaaaacgggagctcagttggctggacgatctcatgccagagtccaagaagaagaaggaggacgacaaaaaaaagaaggaaaaggaagaggcggaacggatgctccaggatgatgacgatacagtgcatttgcccttcgaaggaggcagcttgctgcagattcccgtcaaagcgcttaaatactccgtagacccctcgattgtaaacatctcagacgaaatggctaaaactgctcagtggaaagctttgagtatgaacacggaaaatgctaaagttacccgtagcaatatgtcacccgacaagcccgtgtctgtcaaaatttcatttgaggatgagccaaggaagaagtacgttgacgcagagacaagcttgtag

SEQ ID NO: 135426 - DNA, 3396 bp, synthetic construct
  misc_feature 1..3396: note = Description of Artificial Sequence: Synthetic coding sequence
  source 1..3396: mol_type = other DNA
atggaggcagacggtgccggtgagcaaatgcggcccctgctgacaagggggcctgacgaagaagctgtggttgatctgggcaaaactagcagtacggtcaatactaaatttgagaaggaggaattagaatcacaccgggccgtgtacattggggtacatgtgcccttctccaaagaatctagaaggcgtcacagacacagaggacacaagcaccatcaccggagaagaaaagacaaagagtctgataaagaggacggtcgcgaaagcccatcatacgacactccttctcagcgagtgcaatttatactgggtaccgaggatgacgatgaggagcacattcctcacgacttgtttacagaaatggatgagctctgctatcgtgacggggaggaatacgagtggaaagagacagcgcgctggttgaagttcgaagaggacgtggaagatggcggcgataggtggagtaagccttatgtcgccaccctgtctctacactctctgttcgaactccgatcctgtatattgaacggcaccgtcatgttagatatgcgggcttccaccctggacgaaatcgcagatatggtactagataatatgattgccagcggccagttggacgagtctattagagagaacgtgcgcgaggcgctgctcaaacgacaccatcatcagaacgaaaagcggttcacaagcaggatacccttagtaaggtccttcgcagacatcggaaagaagcactctgacccacacctgctcgaaaggaacgggatcctcgcttctccccagtcagcacccggcaacctggacaattccaaatccggcgagattaagggaaatggctccggtgggtcccgggagaattcgaccgtcgatttctcgaaagtggacatgaattttatgcgaaagattccgaccggtgctgaagcttcaaacgtgctcgtcggcgaggtcgacttcctggaacgccctatcattgcctttgtgcgactggcccctgcagttctcctgactggactgactgaagttcctgttccaacccgtttcctgttcctgctgctaggacctgccggaaaggctcctcagtatcatgagatcggaaggtcgatcgctacactgatgacagatgagattttccatgacgttgcctacaaagccaaggataggaatgacctgctgtccgggatcgatgaattcctagaccaggttacagtgctccctccaggtgaatgggatccgtcaatacggatcgagcccccaaagagcgtacctagccaggagaagagaaagattccagtatttcacaacgggtcaaccccaaccctcggtgaaactccaaaggaagccgcgcaccatgccgggcctgagcttcaaagaacagggcgtctgtttgggggtcttattttggacatcaagcggaaagcgccgttttttcttagcgatttcaaagacgccctgtccctgcaatgcctggcaagcatcctgttcctgtattgtgcctgcatgagcccggtcattacattcggcgggctcctgggggaggctaccgagggtcgtatctccgccatcgaatccctcttcggagcaagcctgacaggcatcgcatatagtctcttcgcagggcagccgctgactatactcggaagtactggacccgtgctggtattcgaaaagatcttgtacaagttctgccgggattatcagctgtcctatctgtccctcaggactagtattggattgtggacttctttcctctgcattgtcctggtagccacagacgcctcatccctggtctgttacatcactaggttcaccgaagaggccttcgccgctctcatttgcattatttttatctacgaagccctggaaaagcttttcgatttaggggaaacttacgccttcaatatgcacaataacctagataaacttacaagctactcgtgcgtttgtactgagcccccaaatccgagcaatgaaactctggcccaatggaagaaggataacataactgcccacaacattagctggcggaatctgaccgtgtccgagtgtaagaagcttagaggggtcttcttagggtctgcttgtggccatcatggtccatacatccccgacgtgctgttctggtgtgtgattctcttcttcaccacgttcttccttagctccttcttaaaacaattcaagaccaaaagatactttccaactaaagtgaggtctactatcagcgacttcgcagtatttctcacaattgtgatcatggtgactattgactatttggtaggggttcccagtccaaagctgcatgtgcctgaaaagtttgaacctacacaccccgagaggggttggattatcagtcctctcggagataatccatggtggaccctgcttatcgctgcaattccagcgctgctatgtaccattctgattttcatggatcagcagatcaccgcagtgattatcaatcggaaagaacataaattgaagaagggcgccggatatcatctcgatctgctcatggttggggtgatgctgggagtctgcagtgtgatgggcctgccgtggtttgtggctgctacagtgctttcaatcagccatgtcaattctttaaaggtcgaaagtgagtgctcagcaccgggggagcagcctaagttcctgggaattcgggagcagagagtgactggccttatgattttcatactaatgggactgtcggtcttcatgacatcagtactgaaattcatccccatgcccgtgctgtatggtgtgtttttatacatgggtgtctcctctctgaaaggcatccaactcttcgaccgtatcaaattatttgggatgccagccaaacaccagccggacttaatctacctgcgctacgtccccctgtggaaagtacatatctttaccgtaatccaactgacatgcctcgtgctactgtgggttatcaaagtaagcgctgccgctgtagtctttccaatgatggtcctggcgctggtgttcgtacggaaactgatggacctctgtttcaccaagcgcgaactgtcctggctggacgatctcatgcccgagagtaaaaaaaagaaagaagatgataagaaaaaaaaggaaaaggaagaggctgagcgaatgctgcaggacgatgacgatactgttcacctgccttttgagggcgggagcctgctccagataccagtaaaggccctaaagtactcagtggatccaagcattgtgaatatatcagatgagatggccaaaaccgcccaatggaaagccctgtctatgaacaccgagaacgctaaggttacaaggtcaaatatgtcacctgataaaccagtgtccgtgaagatctccttcgaggacgagccacgaaagaagtatgttgatgccgaaacatctctttag

SEQ ID NO: 135427 - DNA, 1392 bp, synthetic construct
  misc_feature 1..1392: note = Description of Artificial Sequence: Synthetic coding sequence
  source 1..1392: mol_type = other DNA
atggaagccgacggggccggcgagcaaatgcgcccacttcttacaagaggccctgatgaagaggccgtggtagacctggggaagacgagctccactgtcaatacaaagttcgagaaggaagagctcgaaagtcatcgtgcggtttatatcggtgttcatgtgcctttcagcaaggagagtagacgtcgccatcgtcacagaggtcacaagcatcaccaccggagacggaaagataaggaatcagataaagaggatggcagagagagtccaagctacgatactccgtcccagcgcgtgcagtttatactgggcaccgaggatgacgatgaagagcacatcccacacgacctgttcacagagatggacgagctctgttatagggacggggaggagtacgagtggaaagagacagcccggtggctcaagttcgaggaagatgtcgaagacggaggcgaccgatggtccaagccctacgtggccaccctgtcccttcacagtctgtttgagctgagatcatgcatcttaaacgggaccgtgatgctcgacatgcgtgcctccactctggatgagattgcagacatggtgctggacaacatgattgccagcgggcagttagatgagtcaatcagagagaacgtgcgggaagcactcttaaagcgccatcatcatcagaacgagaagcggttcacctctaggattcctctggtaagaagtttcgctgacattggaaagaagcacagcgatccccatcttctggagagaaacggaattttagccagtccccaatccgccccaggcaatctggacaactccaaaagcggagaaatcaagggaaacggcagcggaggttccagggaaaacagcaccgtcgatttctccaaggtagatatgaatttcatgaggaaaattccgaccggcgcagaagccagcaacgttctggtgggggaagttgactttcttgaacgccctatcattgctttcgtgcggctagctcctgctgtgctccttacaggcctgaccgaagtgcccgtccccactcgattcctattcttattactcggccccgctggcaaagctccacagtaccatgaaataggtcgtagtatagctactcttatgaccgatgaaatcttccacgatgtggcctacaaggccaaggatcggaacgacctattgtccggtatcgacgagttcctggatcaggtcacagtgctcccaccaggcgagtgggacccatcgatccggatcgaaccccccaagtccgtgccttcccaggagaagaggaagatccccgtctttcacaatggtagcactcctacactgggggagactcccaaagaagcggcccaccatgcagggccagagctgcagaggaccggtcgcgtgcaatag

SEQ ID NO: 135428 - DNA, 3135 bp, synthetic construct
  misc_feature 1..3135: note = Description of Artificial Sequence: Synthetic coding sequence
  source 1..3135: mol_type = other DNA
atgcccgctgctggaagtaatgagcctgatggggtgctcagttaccaacgccctgacgaagaggccgtcgtcgaccagggcggaacatcaaccatcctgaacatccattacgaaaaagaggagctggaggggcataggacgctctacgtcggtgtgcggatgccacttggtagacagtcccatcggcaccatcggacccatggccagaaacaccgacggagaggcagaggcaaaggagccagtcagggcgaggagggacttgaagcccttgcacacgacaccccatcccaacgtgtccagttcatactcggcaccgaagaggacgaggagcacgtacctcacgagctgttcaccgagctggatgagatatgtatgaaagaaggtgaggacgctgagtggaaggagaccgctagatggctgaaattcgaggaagatgtggaggacggcggagaacgttggtcaaagccctacgtcgctaccctgtcgctacactccttattcgagttaagaagctgccttatcaacggaaccgtgctgctcgacatgcacgccaattctatcgaagaaatcagcgatctgattttggatcagcaagagctttcatctgatctgaatgacagcatgcgagtgaaggttcgggaagctctgctgaagaaacaccatcaccaaaatgaaaagaagcggaataaccttatccccatagtcaggtctttcgcagaagtcgggaaaaagcaatctgacccacacctgatggacaagcacggccagacagtcagtccacaatctgtacctaccacaaacctggaggttaagaacggcgtcaactgtgagcatagccctgtggatctgagtaaagtggacttgcacttcatgaagaagatacctacaggtgccgaagcttctaatgtgctggtcggagaggtggacattttggaccgtccgatcgtcgccttcgtcaggctgagtcctgctgtgctgctgtccggtctgacagaggtaccaattccaaccagatttctgttcatcctattagggcctgtgggaaagggtcagcagtaccacgaaataggcagatcaatggccaccatcatgacggacgaaattttccatgacgtcgcctacaaagccaaggagcgtgacgacttgctggcaggtattgatgagtttctcgatcaggtcaccgtgctccctcccggagagtgggaccctagtatccgaatcgagccccccaagaacgtgcccagtcaggagaaaagaaaaatgccaggagtccctaacgggaacgtttgccacattgaacaggaaccccatgggggacattccgggcccgagctccaacgcacaggacgtttgtttggcgggcttgtcctcgacattaaacgcaaggccccctggtactggtcagactaccgcgacgcgctctccctgcagtgcctggcaagtttcctttttttgtactgtgcgtgtatgtcaccagttatcacatttgggggacttctaggcgaggcaactgaagggcgtatctccgcgattgagagtctattcggggcatctatgacaggaatagcctacagtctgtttgccggccaagctctcacaattctgggatccaccggcccggtgcttgtgtttgagaagatactctttaaattctgcaaagactacgcccttagctatctgagtctgagagcatgcattgggctttggaccgcatttctgtgcatagttctcgtggccacagatgcctcatcccttgtttgttacatcactaggtttacagaagaagcattcgctagcctgatatgcattatctttatatacgaagctatcgagaaacttatccaccttgcagagacataccccatacacatgcactcacagctggatcacctgagcctctattattgccggtgcacactgcccgaaaaccccaacaatcacactcttcagtattggaaagaccataacatcgtcacagcagaagttcattgggccaacctcaccgtgagcgagtgccaggagatgcacggcgaatttatgggcagtgcatgcggccatcacggcccctacaccccggatgtgctcttttggtcctgcatcctattttttaccacattcatcttgagctcgaccctcaaaacatttaaaacttcccgatactttccaacccgagttcgcagcatggtttctgatttcgcggtcttcctcaccatcttcacaatggtcattatcgactttctaatcggcgtcccatcacccaaactgcaggtgcccagcgtttttaagcctacccgcgacgatcgcggatggattatcaaccctatcggaccaaacccgtggtggaccgtgatcgccgctatcatccctgcactgctgtgtacaattttaattttcatggaccagcagattactgctgtaatcattaaccgcaaggagcataagttgaaaaaggggtgcggctatcacctagacctcctcatggtggccatcatgctcggggtttgcagcatcatggggctaccttggtttgtggctgcaaccgtgctttcgattacacacgtaaatagcctaaagctcgagagcgaatgctctgcgccaggggaacaacctaaattcctgggcattagagaacagagggtgacggggttgatgattttcgtgctgatgggttgtagtgtcttcatgactgcgatcctcaagttcatcccaatgcctgtactgtacggcgtttttctctatatgggcgtcagctccctgcagggaatacagtttttcgatagattaaagttatttggcatgcccgctaaacaccagcctgattttatttatcttaggcatgtgcccctgcgcaaagtgcacttgtttaccctaatccaattaacatgtcttgtactgctgtgggtgatcaaagcctcccccgctgctatcgtgtttccgatgatggtactcgctctagtgttcgtaagaaaggtcatggatctgtgtttcagcaaaagggagctgagttggttggacgatctgatgccagagtccaaaaagaagaaactagacgacgccaaaaagaaggccaaagaagaggaggtgatcgtactggctccaacagtttatttaggagcctccaactacagaacctag

SEQ ID NO: 135429 - DNA, 3216 bp, synthetic construct
  misc_feature 1..3216: note = Description of Artificial Sequence: Synthetic coding sequence
  source 1..3216: mol_type = other DNA
atgtttaacaaaaataactctaacaagctgaggagtacacccaggtatcgccgtggggatcccggatacctgaacttcaccgagctgggtcccctgaaacccgaacagaaagatcagtggtctcagcatagaccagacgaggaagccgtggtggaccaggggggaacctctactatcctgaatatccattacgaaaaggaagagctggaagggcatagaaccctgtacgttggagtgaggatgcccctgggccgacagtcacacaggcaccataggacgcacgggcagaaacaccgccgtcgcggccgaggcaagggcgccagccagggcgaagaggggcttgaggcactggcccatgacaccccgtcccagcgagtgcagtttatactcggaacagaggaggatgaggagcatgtaccccacgagctgttcactgagttggacgagatttgcatgaaagagggggaggatgcagagtggaaggaaaccgccagatggctgaagtttgaggaagacgtagaagacggcggggaacgatggagcaaaccctatgttgcgacattgagtctgcacagcctattcgaattacgttcctgcctcatcaacgggacagtgttgcttgatatgcatgcaaactcaatcgaggagattagcgatcttatcctggatcagcaggagctttcttccgatctcaacgacagcatgagggtcaaggtgcgggaggccttactgaagaagcatcaccaccagaatgagaaaaagcggaataatctcatccctattgtgagatcattcgctgaagtgggtaaaaaacagtccgatcctcacctcatggacaagcacggtcagacggtttcaccccagtccgtgccaacaaccaacttggaagttaagaatggcgttaactgtgaacatagcccagtcgacctttctaaagtcgatctccacttcatgaaaaagatccctaccggtgcagaggcctctaacgtcctggtgggggaagtcgacatcctcgaccgacccatcgtagccttcgtaaggctgtcccctgcagtgctcctgagcggtcttacggaagtgccaatccccacaaggttcttgtttatattgcttggcccggtggggaagggccagcagtaccacgagattggacgttccatggctaccatcatgaccgatgaaattttccacgacgttgcttacaaggccaaagagagggatgatctgctggctggcatagatgagttcctagatcaagttacagtactcccgcctggggaatgggacccatcgattaggattgagcctccaaagaatgttccctcacaagagaaaagaaagatgcctggagtgccaaacggaaacgtctgccacattgagcaggaaccccacggagggcactcaggcccagaactccagaggactggtaggctgttcgggggcttagtactggatatcaagcgtaaggctccttggtactggtctgactaccgcgatgctctgtctctacaatgtctggcctcctttctctttctgtactgcgcatgcatgagtccagtgatcacatttgggggcctgctaggagaagctaccgaggggcgcatcagtgcgatcgaatccttatttggggcttcgatgaccggcatagcttattcgctatttgctggtcaagccttgaccatcctcgggagcactgggcccgtgcttgtgtttgagaagattctgttcaaattctgcaaagattacgcactgagctacctgagcctgagagcctgcattggcctgtggactgcctttctgtgcatcgtacttgtagcaaccgacgcttcttctctcgtttgttatatcacacgatttaccgaagaggcgttcgcctccctgatttgcatcatcttcatctacgaggcgatcgaaaagcttatacaccttgcggagacgtatccaattcacatgcattcccagctagaccatctgtcattgtattattgcagatgcactctgcctgagaatcccaataaccacaccttacagtactggaaagaccacaatatagttactgccgaagtccactgggctaacctgaccgtaagcgaatgccaagagatgcatggtgagtttatgggaagcgcgtgtgggcatcacggcccctacacaccggacgtattgttctggtcctgtattctttttttcaccacattcattctctcctctaccttaaagactttcaagacttcaaggtacttcccgacgcgagtccggtccatggtaagtgactttgccgtgtttctcaccatcttcacaatggttataattgatttcctgataggggtcccgtctcccaaactgcaggtgccatcagtctttaaacccaccagggacgatagaggctggatcatcaaccccatcggacctaatccatggtggacagtaatcgcagcaatcatccccgcactcctgtgcactatcttaatttttatggatcaacaaatcacggctgtcatcatcaatcggaaggagcacaagctgaagaaggggtgcggctatcacctggacctgctcatggtggcaatcatgctaggcgtgtgcagcatcatggggttgccctggttcgtggcagctaccgttttaagtattacacacgtgaactccctgaagcttgagagcgagtgttctgcccctggggagcaacctaaattcttggggattcgcgagcaaagggttacagggctaatgatcttcgttctgatgggctgtagcgtttttatgacagccatactgaagtttattcctatgcccgtactgtacggggtgtttctctatatgggggtgtcttctcttcagggcattcagttctttgatcgtctgaaactctttggaatgccggcgaagcatcagcccgacttcatatacctgcgtcatgtaccactccgcaaggttcatctgtttaccctgattcaactgacatgcctggtgctattatgggtgattaaagccagccccgccgctattgtgttccctatgatggtgcttgctctggtctttgttagaaaagtgatggatttgtgctttagcaagcgggaacttagctggctggatgacctaatgccagaatctaagaaaaagaagctggacgacgcaaaaaagaaggccaaggaagaggaagtgatcgtgcttgctcccacagtttacctgggtgcctctaattatcgcacctag

SEQ ID NO: 135430 - DNA, 2244 bp, synthetic construct
  misc_feature 1..2244: note = Description of Artificial Sequence: Synthetic coding sequence
  source 1..2244: mol_type = other DNA
atgccattaggcagacagagtcacagacaccaccgaactcacggtcagaagcacagaagaagaggcaggggcaagggagcgagtcagggagaggagggactggaagccctggcacacgataccccaagtcagcgagtccagtttattctcggcaccgaggaggatgaggaacacgtgccccatgagcttttcaccgagttggacgagatttgtatgaaagaaggcgaggatgcagagtggaaagagaccgcgcgctggctcaagttcgaagaggacgttgaggatggcggcgagagatggtcgaagccctacgtagccaccttatctctgcacagcttgttcgagttgaggtcttgtctcattaacgggacagttctgctggacatgcacgcaaactcaatcgaggagatatctgatttgatcctcgatcaacaagagctttcttcagacctgaatgattcaatgcgggtgaaggtcagagaggccctgctgaagaagcaccatcatcagaatgagaagaagcgaaacaacctgattccaattgtgcgaagctttgccgaagtcggaaaaaagcagtctgacccccatttgatggacaagcacggccagacagtttcacctcagagtgtgccgaccaccaacttggaggtgaaaaacggcgtcaactgtgagcacagtccagttgacctttctaaggtagacctgcatttcatgaagaaaataccaacgggcgctgaagcctcgaacgtcctggtcggagaagtggacattttggaccgtcccattgtggcattcgtgagactgtctcctgccgtccttctctcaggtctgacagaggtccccatcccaacccggtttttgttcatcctgttgggaccagtggggaaggggcagcagtaccatgaaattgggaggagcatggccacaataatgacggacgaaatcttccacgacgtcgcttataaggccaaagaaagagacgacctgctggctggcatcgatgaatttttagaccaagtcaccgtgcttccaccaggtgagtgggatcctagtatcagaatcgagcctcctaaaaatgttccatcccaggaaaaacggaaaatgccaggagttccgaacggaaatgtctgccacattgagcaagaaccacacggagggcacagcggcccagaactccagcgcaccggccgactgtttgggggcctcgtcctcgatatcaagaggaaggctccctggtactggtcagactatcgcgacgctctttcactgcagtgtcttgcctccttcctgtttctgtattgtgcatgtatgtcccccgtgattacctttgggggactgttaggcgaagccaccgaggggcgcattagcgccatcgaaagcttgttcggggcctctatgaccggcattgcatattccctctttgccgggcaggcactcactattctcggttctactgggccggtactggtttttgaaaagatcctgttcaagttttgcaaggactacgcactgagttatttatctctgagagcttgcatcggactgtggaccgccttcctctgtatcgtcctggttgccaccgacgcctcaagcctggtgtgctacatcaccagatttaccgaagaagcttttgcaagtcttatatgtattatcttcatctacgaagctatagaaaaactgattcaccttgctgagacctaccctattcatatgcactcgcaactggaccatctgagcctgtactattgtcgctgcacgttacctgaaaatcccaacaatcataccctgcagtactggaaagaccacaatatagtgaccgctgaagtgcattgggctaacctaacagttagcgaatgtcaggagatgcatggcgagttcatgggaagtgcctgcgggcaccacggtccctataccccagatgtgctgttctggtcttgcattttgtttttcaccacattcattctctcaagtacgctaaagacatttaagactagcagatattttcccactaggatggagtcttgcagcgtcgcatggctcgaatgcggaggggtgatccttgctcactgtaacttgcggctcctcccaagcagttgggattataggcacgctcctccccaaccagccaatttttgtatcttcagccgggatggtgtcagtccttgctggcctggttggagtcaaagcctggacctagtgatctgtctgcctagaccgcccaaaatgctcggcctgcaagcctag

SEQ ID NO: 135431 - DNA, 3282 bp, synthetic construct
  misc_feature 1..3282: note = Description of Artificial Sequence: Synthetic coding sequence
  source 1..3282: mol_type = other DNA
atgcccgcagctggctctaatgagcccgatggcgtcctaagttatcagagaccagacgaagaagccgtggttgatcagggcggcacaagcactatactgaacatccactacgaaaaggaagagctcgaaggccacagaacactgtatgtgggcgtcagaatgccgcttggaaggcagagccataggcaccacagaacccatggccagaagcatcgccgccggggccgcggcaagggggcttcccagggcgaagaaggcctggaggccctggcgcatgacacccctagtcaaagagtgcaatttattcttggcacagaagaggatgaggagcacgtcccccatgagctatttacagagctggatgagatatgtatgaaagagggggaggatgcagaatggaaggagacagcccgttggctcaagtttgaagaagatgtggaggacgggggcgagcgctggtctaaaccttacgtggccactctgtcactgcacagcctttttgaattgcgttcatgcttaattaacggaactgtgctccttgacatgcacgccaattccatcgaagaaatctcagatctgatactggaccagcaagagctaagctccgacctgaatgactctatgcgggtaaaggtgcgagaggcgctcttgaaaaaacatcaccaccaaaatgagaaaaaaagaaataatctgatccccattgtcaggagttttgcagaagtgggcaagaaacaatcagatccccacttaatggataagcacgggcagacagtgagccctcagtcagtccctacaactaacctggaagtcaaaaacggggtgaattgcgagcatagcccggtggacctgagcaaagtagatctgcattttatgaaaaagatacctaccggtgctgaagcgtcaaatgtgctagtcggtgaagtggacatcttagacagaccaatagtggcctttgtcagactctcccctgctgtgctactgagtgggctgaccgaggtccctattccaactaggtttctgtttatcctcctagggccagttggaaagggacaacaataccatgagattggaagatcgatggctaccatcatgactgacgaaatcttccacgatgtggcatataaagcaaaggaacgggacgatttgcttgcaggtattgatgagtttttggatcaggtgacagttcttcctccaggtgagtgggatcccagtattcgtatcgaacctcctaaaaatgttccttcccaggagaaaagaaagatgcctggtgtcccaaatggtaacgtttgccacattgagcaggagccacacggaggccatagcggtcccgagctccagcggactgggaggctgtttggcggtctcgtgttagacataaagcgcaaagccccttggtactggtccgactacagagatgctcttagccttcaatgcttagcctccttcctctttctctactgtgcttgcatgagccctgttatcacatttggcggccttctgggagaggctacagagggaaggatttcagcgattgagtccctgttcggagcctctatgaccggaatcgcatattctctctttgccggtcaggcacttacaatacttgggagtacagggccagttctcgtgttcgaaaagattctgttcaagttctgcaaggattacgcactgagttacctgagtctgcgggcctgtatcggactctggactgcgtttttatgcatcgtactggtggcaactgacgctagcagtctggtctgttacatcacccggtttacagaagaagcgttcgctagcctcatttgcattatctttatttatgaggccatcgagaaactgattcaccttgcagagacttatccaatccacatgcattcgcaactggatcatttgtcactgtattattgccgctgtaccctacctgaaaatcctaataatcataccctccagtactggaaggatcacaatatcgtaacagcagaagtgcactgggccaacctgaccgtatcagagtgccaggaaatgcatggggagtttatggggtctgcatgcggacaccacgggccatatactcctgatgttcttttttggtcctgcatcctgttttttaccacattcattctgtcctctaccctcaagacttttaaaacatccaggtactttccgacacgcgtgcgtagcatggtcagcgactttgccgtgttcctcacaatctttaccatggttatcattgactttctgatcggcgtgcctagcccaaaactgcaagtgccatccgtcttcaagcctacccgagatgacaggggctggatcattaacccaattgggcccaacccatggtggaccgtcatcgctgccattatccctgccctgttgtgtacaatactgattttcatggatcaacagatcacagccgttataatcaacagaaaagagcacaaacttaaaaaagggtgtggctatcacttggacttgctgatggtcgccatcatgctgggggtgtgtagcatcatgggtctgccctggtttgttgcagccacagtacttagcatcacacacgtgaacagtctcaagctggaatccgagtgttctgcgcctggggagcagcctaagttcctcggaataagggaacagcgtgtcacgggcctgatgatttttgttctgatggggtgcagcgtctttatgactgctattctaaaatttatccctatgccagtgttatacggcgtgtttctctatatgggcgtcagttcgctccagggcattcagttctttgaccggctgaagctctttggaatgcctgctaagcaccaacccgactttatttatctgcgacacgttccattgaggaaagtgcatcttttcactctcatacagcttacctgcttagtgctgttgtgggttataaaggcatcaccagccgctatagtcttccccatgatggtactcgctctggtttttgttcggaaagtcatggacttgtgcttcagtaagagagaactgtcctggctggacgacctgatgccagagtctaagaagaaaaagttggacgatgccaaaaaaaaagctaaagaagaggaagaggctgagaagatgctcgagattgggggagataagttcccgttggaaagccggaagctgctttccagccccggaaagaatatttcatgtcgctgtgatccttctgagattaacatttccgatgagatgcccaagacaacagtctggaaggcactttctatgaattctggcaacgccaaggaaaagtcgctgttcaactag

SEQ ID NO: 135432 - DNA, 1917 bp, synthetic construct
  misc_feature 1..1917: note = Description of Artificial Sequence: Synthetic coding sequence
  source 1..1917: mol_type = other DNA
atgcctctggggaggcaaagccatcgccaccatcgcactcacggacagaagcatcggagaagggggcggggtaaaggcgccagccagggagaggaaggcctcgaagccctagcccatgacaccccctcccagagagtgcaatttatcctcggcactgaagaggatgaagagcacgtgccacacgaattgttcaccgaattggacgagatttgcatgaaagagggtgaggatgctgaatggaaagaaactgcccgttggcttaagtttgaggaagacgtcgaagatgggggagagagatggtccaagccatacgtagccactctctccctacattcactgttcgaactccgcagttgcctaattaacgggaccgtgctgctggacatgcacgcgaacagcatagaggaaatatccgacctcatcctggatcagcaggaactttcctccgacttgaatgactccatgcgcgtgaaggtgcgggaggccttgctgaagaagcatcatcaccagaatgaaaagaagcgcaataacctcatccctatcgtcaggtcatttgcagaggtgggcaagaaacagtccgatccccacttaatggataaacatggccagacggtatcccctcagtccgtgcctacaacgaacttggaggtcaagaacggagtcaactgcgagcactccccggtcgatctgagcaaagtggatctccactttatgaaaaaaatacctacgggagcggaagcctccaacgttcttgtcggagaggtggacattctggatcgcccaatcgtggctttcgtgcggctgtcccccgcagtactgctatctgggctgaccgaagtgccaattccgacacgttttctctttatcctgttgggcccagttggcaagggccagcagtatcatgagataggccgtagcatggccacaatcatgaccgatgagatattccatgatgtggcctacaaggcaaaggaacgcgacgatttgttagcaggcatcgatgagttcctcgaccaggttacagtgctcccgccaggagaatgggatccttcgatacgcattgaaccgccaaaaaatgtgccctctcaggagaaacggaaaatgcccggggtcccaaatggaaacgtttgtcacatcgagcaggaacctcacggcggccactccgggccagagctccagcggacaggacgccttttcggtggcctggtgttggatattaaaaggaaagcgccatggtactggtctgattaccgcgatgccctgtccctccagtgtctggcatctttcttgttcctgtattgcgcttgcatgagtccggtgattacattcggagggctgctcggcgaggccacggaagggagaatatccgctattgagagccttttcggcgcaagcatgacaggaatagcttattcactgttcgccggacaggctctcacgatcttgggatccaccggtcctgtccttgtcttcgaaaagatcctttttaaattctgcaaggattacgccctgtcgtacctgagtcttcgagcttgtatcggactgtggacggcctttctgtgtatcgtgctcgttgccaccgatgcaagttctctggtatgttacatcacgcggtttacagaagaggcgtttgcgagcctgatatgcattatcttcatctatgaagcaatcgagaagctcatccacttggcagagacttacccaattcacatgcattcccagctggaccatctgagcctttattactgtcgctgcacccttcctgagaaccccaacaatcatactttacagtactggaaggatcacaacatcgtgactgctgaagtgcattgggctaacctcactgtatcagtaagcctcggcgctgcaagatgcccctctattgttacgaccgggcttggtggcacctcgaagtag

SEQ ID NO: 135433 - DNA, 2976 bp, synthetic construct
  misc_feature 1..2976: note = Description of Artificial Sequence: Synthetic coding sequence
  source 1..2976: mol_type = other DNA
atgccgttaggtcgacagagccacaggcaccacaggacacatgggcagaagcacagacggcgtgggcggggtaaaggagctagccaaggtgaggaagggctggaagctctcgcccacgacaccccaagtcagagagtgcaatttattctgggcactgaggaagatgaagagcacgtgcctcacgaactcttcaccgaattagacgaaatatgcatgaaggaaggcgaggatgcagagtggaaggagaccgctcgttggctgaaatttgaagaagatgtcgaggacgggggcgagaggtggtctaagccctatgtggccactttgagcctgcactcactatttgagcttcgcagctgtttgatcaacggcacagtgttgttggatatgcacgcaaattctatcgaggaaatctctgacttaattctggaccagcaagaattatcaagcgacctcaatgacagcatgcgggtgaaggttagggaggccctactcaaaaagcaccaccatcagaatgagaaaaaacggaacaatcttattcctatagtgagatccttcgctgaggtcgggaagaaacagtccgatccgcacctgatggacaagcatggccagacagtgagcccgcagtccgtaccaaccactaacctggaggttaagaatggcgtgaactgtgaacattctccagtggacctgtctaaggtcgacctgcacttcatgaagaagattcctactggagccgaagcctcaaatgtgctggtgggagaggtggacattctggacagaccgattgtggcattcgtccgtcttagccctgccgtccttctctcaggcctgactgaagtgcctattcccacacgcttcctatttatcttgcttgggcccgtcggcaaagggcagcagtatcacgagattggtaggtctatggcgaccataatgacagacgaaatatttcacgatgtggcttataaggcaaaagaacgagatgacctgctggctggtattgacgagtttcttgaccaggttaccgtgttgccccccggggagtgggatcctagcattcgcatagagccacctaaaaatgtgccttctcaagagaagcggaaaatgccaggcgtcccaaacgggaacgtgtgccacatcgagcaggagccacatggcggacattccgggcctgaactgcagagaaccgggagactttttggtggtctggtcttggatattaagagaaaagccccctggtattggagcgattaccgcgatgctctcagcttgcagtgcctcgcttccttcctttttctgtattgtgcctgtatgagccccgtgatcaccttcggtggtctgttaggagaggcaactgagggccggatttctgccatagagtccctgttcggggccagcatgaccggcatagcatattcactgttcgcaggccaggctctgaccatcctgggcagtacaggtcccgttctggtgttcgagaagattctgttcaagttttgcaaggattacgcactgtcctatctgagcctgagagcgtgcatcggcctgtggactgccttcctgtgcatcgtcctcgtggccactgatgctagttcattggtgtgctatatcacccgatttactgaggaagcttttgcctctctcatttgcatcatatttatttacgaagccatagaaaaactcatccatctggcagaaacatatccgattcacatgcattcacagttggaccacctgagcctttactactgcaggtgtacgctgcccgaaaaccccaataaccatactctccagtactggaaagatcataatatcgtgactgccgaagtgcactgggccaacctgacagtgagcgaatgccaagaaatgcatggggagttcatggggagcgcgtgtggacaccacggcccctatacgcccgatgtcttgttctggagttgtatcctgttctttaccacatttatcctctcctcaaccctaaagacctttaagacatcgagatattttccaactcgtgtgcggtcaatggtttctgattttgcagtttttctgaccattttcacaatggtgattattgacttcctgatcggcgtgcctagcccaaaactccaggtaccgtcagtttttaaaccgacgagggacgacaggggttggatcatcaacccaatcgggcctaatccatggtggactgtcattgctgccatcattcctgccctgctctgtacaatcttaatattcatggatcaacagatcaccgcagtcatcattaaccggaaagagcacaagttgaaaaaaggatgcgggtaccacctggatttgttgatggtggccatcatgctgggcgtgtgctcaatcatgggcctgccatggtttgttgccgcaacagtcttgtctatcactcacgttaactccctgaagcttgaaagcgagtgttccgctccaggcgagcagccaaagtttctgggcattagagagcagagggtgacagggctgatgatcttcgtccttatggggtgctccgtgtttatgacagccattctcaaatttatcccgatgcctgtcctctacggcgtttttctttatatgggcgtgagtagcctacagggcatccagttctttgaccggcttaaactgtttggtatgcccgcaaaacatcagcccgacttcatctacctgcgacatgtcccgttgaggaaggtccatctatttactcttattcagttgacctgcttggtgctcctctgggtcatcaaagcgtctccagccgccatcgtcttcccgatgatggtactagccctggtttttgtacgtaaagtgatggatctgtgtttcagtaagagagaattgtcctggctagacgatttgatgcccgaatctaaaaaaaagaagcttgacgatgctaagaaaaaggccaaggaagaggaagtcattgtactggcgccaacagtttacctgggcgcgagtaactacaggacttag

SEQ ID NO: 135434 - DNA, 3321 bp, synthetic construct
  misc_feature 1..3321: note = Description of Artificial Sequence: Synthetic coding sequence
  source 1..3321: mol_type = other DNA
atggagataaaggaccagggtgctcagatggagcctctgctcccgacaaggaacgatgaagaggctgtggtggaccgtggtggaaccagatcgattcttaaaacccattttgaaaaagaggacctggagggccataggaccctttttatcggagtccacgttcctctgggcggcaggaagagccacaggagacaccggcaccgaggccataaacaccggaagcgagatcgcgagcgagattctggcctggaagacgggcgggaatcaccgtcttttgacacgccgagtcagcgagtacagttcatccttgggaccgaagatgacgatgaggagcacattccccacgatctcttcacagaactagatgagatttgctggcgcgagggtgaagatgccgaatggcgtgagaccgctcgctggctcaagtttgaagaggacgtcgaagatggtggtgaacggtggtccaagccatatgtcgccacgctcagtctgcactctctatttgagttgcgctcttgcatccttaatgggactgtcctcctggacatgcatgctaatacactggaggagattgccgatatggttttggatcagcaggtgtccagcggccaattgaatgaggatgtccgccacagagttcatgaagccctcatgaaacagcaccaccaccagaaccagaagaaactgaccaatagaatccccatagtcaggagctttgcagacataggcaaaaagcaatctgaaccgaattcgatggataagaatgccggacaagtggtctcccctcagtctgcacctgcatgcgtggaaaacaagaatgatgtgtcccgggagaacagcaccgtcgacttttctaaagtcgacctccacttcatgaagaaaatcccacccggagccgaagctagcaatatcctcgttggtgaactggagtttctcgatcgcacagtcgtggcattcgtccgactgtcccccgctgtcctgctgcagggactcgcggaagtgcctatccctacccgcttcctcttcatcctattgggtcctcttggcaaagggcaacagtatcatgaaattggcaggtccattgctaccttaatgaccgacgaggtcttccacgacgtggcatataaggccaaggataggaacgatctcgtgtctggaatcgatgagtttctggaccaggtgaccgttctgccccctggtgaatgggatccctctatacggattgagccacctaagaatgtacccagtcaggagaagcgtaagatccccgcggtgccgaatggaacagcggcacatggcgaggcagagccccatggtggacactcaggccctgagcttcagcgcacgggcaggatctttggcggcctgatcctagatatcaagcgtaaggctccttacttctggagcgattttcgagacgcgttttctctgcagtgtcttgccagttttctatttctgtattgtgcatgcatgagtccagttattacctttggaggtctgctgggcgaggctacggaagggaggattagtgctatcgagtcgcttttcggtgcatctatgactgggatcgcttactcattatttggcggccagcctctcaccatcctggggtccaccggccccgtcctggtgttcgaaaagattttgttcaaattctgtaaagaatacggtctgagttacctctctctgcgagcgtcaattgggttatggactgcaacgttatgcatcatactggtcgctacggacgcatcaagcttggtgtgttacataacgcgattcaccgaagaagcgtttgcatctttgatttgtatcattttcatctacgaagccctagagaagctattcgagctgtcggaggcgtatcccatcaacatgcataatgacttagaactcctgacacagtacagttgtaattgtgtagagcctcacaatccctcgaacggcacactgaaggagtggagagagtccaacatcagcgcctctgacatcatttgggagaacctgacggtgtcggagtgcaagagtctccatggggagtacgtgggccgagcttgcgggcacgatcatccctatgtgcccgatgttttgttttggtctgtgattttattcttctctaccgttaccctgtctgcgacactgaagcaattcaaaacttcccggtatttcccaactaaagtacgtagtatcgtgtctgacttcgctgtgtttctgactatcctgtgcatggtgctgattgactacgccatcggcattcccagtccaaagcttcaggtaccttcagtcttcaaacccacaagagatgacagggggtggtttgtgactcctctgggacctaacccatggtggactgtgatcgccgctatcatacctgcactcctctgtacaattttgatttttatggatcaacaaatcactgcggtaataataaaccggaaggagcacaaattgaaaaagggctgcgggtaccacctggacctgttaatggtggcggttatgctgggagtgtgctcgattatgggcctcccctggtttgtggcagcgactgtcctgtccattacccacgtgaacagtttgaagctcgagagcgagtgtagcgcacccggtgaacagcccaaatttctaggtattcgtgagcagcgagtcacaggactgatgatcttcatcctgatgggttccagcgtattcatgacttctatcctaaagttcatccctatgcctgtactgtacggggtgtttctgtacatgggcgcatcaagcctgaaaggcatccaatttttcgatcggatcaaattattttggatgccagcaaaacaccagccggacttcatctacctgaggcatgtgccccttcggaaagtccatctgtttaccattatacaaatgtcctgcttaggtctgctttggatcatcaaggtgtccagagcagctatcgtgtttcctatgatggtccttgccttagtctttgttcggaagctgatggacctcctcttcactaaacgcgaactctcctggctagatgatttgatgccagaatccaagaagaagaagctcgaggacgccgagaaagaggaggagcaaagtatgctcgccatggaagacgagggaaccgtgcagctaccactggaggggcactatagagatgatccatccgtcattaatatcagtgacgagatgagtaagaccgccctttggagaaacctgcttattaccgccgacaactcaaaagacaaggagtcctccttcccctctaaatccatcgaatcacgtaaggaaaagaaggctgattccggaaagggagtagacagagaaacatgcctctag

SEQ ID NO: 135435 - DNA, 3300 bp, synthetic construct
  misc_feature 1..3300: note = Description of Artificial Sequence: Synthetic coding sequence
  source 1..3300: mol_type = other DNA
atgcagagcctgggcgtcagcggaaataggaaagtgatgcagtcgggcacctgtgagccgtttcaatcactttcacaccagcggaatgatgaagaagccgttgttgatagagggggcactcgctctattcttaagacacacttcgaaaaggaggatctcgagggccaccgcacactgttcataggggtgcacgtgccacttggggggagaaagtcccacagaagacacagacacagaggccacaagcacagaaagcgcgaccgggagagagatagcgggctggaagacggccgcgagtcaccgtcatttgacaccccctcgcagcgggtccagttcatccttggcaccgaagacgatgacgaggagcacatacctcacgatctgttcactgaacttgatgagatttgctggagggaaggcgaggacgcggagtggcgcgagactgctcggtggctgaagttcgaggaagatgtagaagatggtggagagagatggtccaaaccttatgtggctaccctcagcttacactctctgttcgagttgagatcttgcattttgaatggaaccgttctcctggatatgcatgcaaatactctggaagagattgctgacatggtgcttgatcagcaagtcagcagtggtcaacttaacgaggacgtccgccacagagttcatgaggccctgatgaaacaacaccaccaccaaaatcaaaaaaagctgaccaacagaattcctatcgtcaggtcctttgctgatatcggtaaaaaacagtcagagcctaacagtatggataagaacgccgggcaagttgtatccccccagagcgctccagcctgtgtggaaaacaaaaacgacgtttctagagagaactccactgtcgacttcagtaaagtcgacctccatttcatgaagaagattccccctggagctgaagcatctaacattctcgttggtgagctggagttcctagaccgtaccgtcgtggccttcgtccggctgtcaccggcagttctgctacaaggcctagccgaggtcccaatacctaccaggttcctttttattctgctgggccccctggggaagggccagcagtaccatgagatcggtcgttccatcgccactctcatgactgacgaagtgtttcatgacgttgcttataaggccaaagataggaacgatctcgtatcggggatcgatgagttcctggatcaggtgacagtgcttccaccaggggaatgggatccatcaatcagaatagaacccccgaaaaatgttcccagccaggagaaacggaagatcccagcggtccccaatggaactgccgcccacggagaggccgaaccccacggcggacatagcggcccagagctgcaaagaaccggccggatctttggaggattgatcctagatattaaacggaaggctccatatttctggtcagattttcgggatgcattctcactccaatgtctagcgagcttcctgttcctgtattgcgcatgtatgagtccagtgattacctttggcggccttcttggtgaggccacagaaggacgcattagtgcaatcgaatccctgttcggtgcatccatgaccgggattgcatactctctgttcggcggccagcctctgaccattctggggagcacagggcccgtgcttgtgtttgaaaagattctctttaagttctgcaaagagtacgggctctcatacttatcacttcgcgcttccatcggactgtggacagctactctgtgcatcatcctggtagcaaccgacgccagttcactggtgtgctacataacaagatttaccgaagaggctttcgcttctcttatttgtatcatttttatctacgaagccctggagaaactgtttgaactgagcgaggcctacccaataaatatgcataatgacttggaactgcttacccagtacagttgtaactgtgtggagccacataacccctcaaacggaaccctcaaggagtggcgcgagtctaatataagcgccagcgatattatctgggaaaacctaacagtctccgagtgcaagtcactgcacggagagtatgtcggccgggcttgtggacatgatcacccttacgtccctgatgtgttgttctggtccgtcatcctcttcttttctactgttacactcagtgctaccctcaagcagtttaagacctctcgttacttccccacgaaggtccgatcaatcgtgtcagacttcgccgtatttctgaccattctttgtatggttctgatcgactatgcaattggcatcccaagccccaaacttcaggttcctagcgtatttaaacccactcgagatgaccggggatggttcgtgacaccactgggacctaacccttggtggaccgtgattgcggcaatcattcccgccttattgtgcacgattttaattttcatggaccagcagattaccgccgtgatcattaaccggaaggagcacaagctgaagaaaggttgcgggtaccatctggaccttttaatggtggcggtgatgctcggcgtttgcagcatcatgggtctaccctggtttgtcgccgccaccgtgcttagcattacgcatgtcaattccctgaaattggagagtgaatgctccgcacccggtgaacagccaaaatttttgggcatccgcgagcagcgcgtcactggactcatgatatttatcctgatggggtctagtgtattcatgacttccatactgaagtttattcctatgccagtgctctacggcgtatttctgtacatgggagcctcttcgctgaagggcatccagttttttgaccgaatcaagttgttttggatgcctgctaaacaccagcccgatttcatctatctgcgccacgtgccccttaggaaggtgcatctttttaccattatccagatgtcttgtctcgggctgctctggattattaaggtttcccgtgctgccattgtctttccaatgatggtgctggctctcgtatttgtgcgtaaactgatggaccttttgttcactaagcgagagttatcttggctcgatgacctcatgccagagtcaaaaaagaaaaagctggaggacgcagaaaaagaggaggagcagagcatgctagctatggaggacgagggcactgtgcaattgccactcgaaggacactatagagatgatccaagcgtgatcaatatttcagacgaaatgagcaagaccgccctctggcgaaacctcctgataacagccgataactcaaaagataaggaaagctccttcccttctaaatcaagccccagctag

SEQ ID NO: 135436 - DNA, 3354 bp, synthetic construct
  misc_feature 1..3354: note = Description of Artificial Sequence: Synthetic coding sequence
  source 1..3354: mol_type = other DNA
atggaaatcaaagatcagggagcacagatggaacctctcttacctacccgtaacgacgaggaagcagttgtggacagaggagggaccaggtcaatcttaaagacacactttgagaaagaggaccttgagggtcataggactcttttcatcggggtgcacgtcccacttgggggtaggaaaagtcacagaaggcatcgacacaggggccataagcatcggaagcgggatagggagcgcgattccgggctcgaagacggaagggagtcaccaagctttgataccccgtcacagagagtgcagtttattctgggaacagaggatgacgacgaagagcatatccctcacgatctgttcactgaactggatgagatctgctggagagagggcgaggacgctgaatggagggagaccgctcgctggctgaagtttgaagaagacgtcgaggacgggggagagagatggagcaaaccttacgtggcgacactctcactccactccctgtttgaattgcgttcctgtatcctgaatggtactgttcttctcgacatgcacgccaacacacttgaagaaatagcggatatggttctggatcagcaagtcagctctggacagcttaatgaagatgtgaggcaccgggtgcacgaagcattaatgaagcagcaccaccatcagaaccagaaaaagctgacaaatcggatccctatcgtgcggtcttttgcagatataggaaagaaacagagtgagcctaactctatggataaaaacgggcaggtcgttagcccccagagcgcccccgcatgcgtggaaaacaagaatgatgtctcacgggagaattccactgtcgacttctctaaggggctcggcggacaacagaagggacacacctcaccttgcgggatgaaacagcggcacgagaaaggacccccacaccagcaagagcgcgaagtggaccttcactttatgaaaaagatcccccctggtgcagaagcttctaacattctggtgggggagctggaattcttggaccgcaccgtcgtggcatttgtccgcctctcccccgccgtcctgcttcagggcttggctgaagttccgatccccacccgctttctctttattttactgggacccttagggaagggtcagcagtaccatgaaattggacgatccattgccacactcatgactgatgaggtcttccacgatgtggcatacaaagccaaagaccggaacgacctggtgagcggcattgacgagttccttgatcaggtgaccgtgctcccgccaggggaatgggatccaagtattcgcatcgaaccaccaaaaaacgtacccagccaagaaaagaggaaaataccggccgtacctaacggtacagccgcccacggcgaagccgaacctcatggtggacactcagggcctgagttgcagaggaccggcagaattttcggtggtttgattctggatatcaaacgcaaagccccctacttttggtcagatttcagggatgcattcagtctgcagtgtctcgcgtcctttttgttcctgtattgtgcctgcatgagccccgtaattactttcggcgggttgctcggagaggccacagaaggaagaattagcgctattgagagcctcttcggggcctccatgacaggaattgcctacagcctttttggtggccaaccgcttactatcctgggttccaccggtccagtgctcgtcttcgaaaagattctgttcaagttctgtaaagagtatggactgtcttaccttagtctgagagcttcaattgggctttggaccgctacactctgtatcattctggttgccactgacgcaagctctctggtatgctacattactcgctttaccgaggaggccttcgcaagcctgatctgcatcatcttcatatatgaggccctggaaaaactcttcgaactcagtgaagcctacccgatcaatatgcacaatgacctggagctactcacacaatactcttgtaactgcgtggaacctcacaacccctctaatggtaccttaaaggagtggcgcgaatccaacatttctgcatctgacattatttgggagaacctcacggtgtctgaatgtaaatctcttcacggagaatatgtaggccgtgcatgtggccacgaccacccctacgtcccagacgtactcttttggtccgtcatcctgtttttctctactgtgactttgagcgccactctgaagcagttcaaaacatctcggtactttcccaccaaagtcaggtccatcgttagtgatttcgccgtgtttttgactatcttgtgtatggtcttaattgattacgccatcggcatcccttcacccaaactgcaggtgccaagtgtctttaaacccacaagggatgaccgcgggtggtttgttactccactcggtccgaacccttggtggacggtgattgccgcgatcattcccgccctactctgcacaatcctgatcttcatggatcaacagatcacagctgtcattatcaaccgtaaggagcacaaattgaagaaaggctgtggataccacttagatctcctcatggtggccgtcatgctgggggtgtgctctataatggggctgccatggtttgtcgccgcgacagtgctaagtatcacacacgtgaacagtctaaagctggagtctgagtgtagtgctccgggggagcagcccaagttcctcggaatccgggagcagcgcgtcaccggtcttatgatctttatcctcatgggatcttcagtttttatgacgtcgatcttgaaattcatccccatgccagttttgtacggggtttttctgtatatgggcgccagcagtcttaaaggcatacaattttttgaccgcataaagctgttctggatgccggccaaacaccaacctgattttatctacctcagacatgttcctcttcggaaggtgcacctgtttaccatcattcagatgtcttgcctgggccttctctggatcatcaaggtgtcccgagccgctatcgtgtttcctatgatggtgttggccctcgtgtttgtgagaaaactgatggacctgttgtttaccaaaagggaacttagttggctggatgacctgatgcccgagagtaagaaaaagaaacttgaggatgctgaaaaagaggaggaacagtcgatgctcgcaatggaggatgaaggtacggtacaattaccactggaggggcactatagagacgacccctccgtgatcaacatcagcgacgagatgagcaagacagcgctgtggaggaaccttctgataacggcggacaattccaaggataaggagagcagcttcccttctaaatcgtcaccttcttag

SEQ ID NO: 135437 - DNA, 3267 bp, synthetic construct
  misc_feature 1..3267: note = Description of Artificial Sequence: Synthetic coding sequence
  source 1..3267: mol_type = other DNA
atggagattaaagatcaaggggctcagatggagccccttctgcctactcgtaatgatgaagaagcagttgtggatcgcgggggtaccaggtctatcttgaagacacactttgagaaggaggacctggaaggccatcgcacattattcattggcgtacacgtcccactgggcggacgaaagagtcatcggcggcatcgccaccgcgggcacaagcaccgaaagagggatcgcgagcgcgatagcgggcttgaagatggcagagaaagtccatcattcgacacacccagccagcgcgtccagtttattctggggacagaagatgacgacgaggagcacatacctcacgatctgtttacagagctggatgaaatctgctggcgagagggcgaagatgccgagtggagggaaacagcccgttggctgaaatttgaggaggacgttgaggatggaggggaacgctggtccaaaccgtacgttgccaccctatctctgcattctctcttcgaactcagatcctgcatcctcaacggcacggtgctgctggacatgcatgccaacacactggaagaaatcgccgatatggttctggaccagcaagtgagctccgggcagttaaatgaagatgttcggcaccgggttcatgaagccctgatgaagcagcaccaccatcagaatcagaaaaagctgactaaccgcattccaattgtacggtctttcgctgatatcggtaaaaagcagtcggagccaaactccatggataaaaacgccggacaggtcgtgagtcctcagtcggcccctgcttgtgtagagaataaaaacgacgtgtctagagagaatagtactgtggatttttctaaggtagatttgcatttcatgaaaaaaatccccccgggggcggaagcgtctaatatcttggtgggtgagctcgaatttcttgatagaacggtcgtcgcttttgttcgcctttcccctgcagtgttgttgcagggactggccgaggtgcccatccccacccggtttctgtttatcctcctaggccctctgggcaagggccagcaatatcatgaaataggcagatcaatcgccaccctcatgaccgacgaggtgttccacgacgtggcttacaaggcaaaagacagaaacgacctggtgtcaggtatagacgagttcttagatcaggttactgtattaccccctggagagtgggacccaagtatcaggatcgaaccacccaagaacgtcccctcccaagagaaaagaaaaattccagcggtgccaaatggcaccgctgcacacggcgaagccgagcctcatgggggccactcaggtcccgagttgcaaaggacaggccgtatttttggggggctgatcctggatattaaaaggaaggcgccttacttttggagtgacttccgggacgcattctctctgcagtgtctggcctctttcctgttcctgtattgcgcctgtatgtcccctgttataaccttcggtggcttactgggagaagctacggagggaaggatctcagccatcgagtcactgttcggggcatctatgacgggcattgcgtactccctctttggaggccagcctctgacgatactgggcagcacaggtccagtcctggtctttgagaagattctgtttaaattctgtaaggaatacggcctgtcgtaccttagcctgagggcatctattggcctttggacagctacactctgcattattctggtcgctacagacgcctcctccctcgtctgctacataaccagatttacagaggaagcctttgcctcacttatatgtattatttttatctacgaggccctggagaaactttttgagctgagcgaggcgtatccaattaatatgcacaatgacttggaactcctgacccagtactcctgtaattgcgtcgaaccccataatcctagtaatggtactcttaaagagtggcgggagagcaatatcagcgcctctgacatcatctgggagaatctgacggtgagcgagtgcaaatctctacacggcgaatatgtgggacgggcatgtgggcatgatcacccctatgttcctgatgttttattctggtctgtgatactgttcttttccacggtgaccttatcggccaccctgaagcagtttaaaacgtctaggtattttcccaccaaagtcaggtccatagtttccgactttgctgtcttccttaccattttatgcatggtcctgatagattatgccattggaattccttcaccaaagctccaggtgccttctgtgttcaagcctactcgggatgatcgcggctggttcgtcacacccctgggcccaaacccctggtggacagtaatcgccgctataattcccgccttattatgcacaatattaattttcatggatcagcagatcactgctgtgatcattaatcgcaaggagcacaagctcaagaagggttgcgggtatcacctggatttactgatggtggccgtgatgctgggagtgtgctcgattatggggcttccgtggttcgttgctgccacggtgcttagcatcacacatgtcaattcacttaagttggaatccgaatgtagtgccccaggcgagcagcccaagttcctggggatccgcgagcagagggtgacaggcttgatgattttcatcctgatggggtcctccgtgtttatgaccagtattttgaaattcatcccaatgcctgttctctatggggtgtttctttacatgggagccagttcactcaaaggcattcagttttttgataggattaagctcttttggatgccggctaagcatcagccagattttatctacctgaggcacgtgccccttcgcaaagtgcatttgtttactattatccagatgagctgcctcggtttactgtggattataaaggtgagcagagcagccattgtgttccctatgatggtcctcgcgcttgtgtttgtgcggaaattaatggacctgctgttcacaaagagggagctcagctggttggacgatttgatgcccgaatctaagaaaaagaagctggaagatgccgagaaggaagaggaacagagtatgctggcgatggaggacgagggaaccgtccagctgcccctggaaggccattatcgggatgacccctccgtgatcaacataagtgacgagatgtccaaaacagctctgtggcggaacctattgattaccgctgataatagcaaagataaggaatcttccttcccatctaagtccagtccatcttag

SEQ ID NO: 135438 - DNA, 3165 bp, synthetic construct
  misc_feature 1..3165: note = Description of Artificial Sequence: Synthetic coding sequence
  source 1..3165: mol_type = other DNA
atggagattaaagatcagggagcgcagatggaacctctcctacccacaagaaatgatgaagaagccgtcgtcgaccgtggggggacccgcagtatcctaaaaactcacttcgagaaggaagacctcgagggacatcgaacactgttcattggggtgcacgtccctttaggcggacgaaaatcgcatcgcaggcaccggcatagggggcataagcatcgcaagcgggacagagagagggactcaggacttgaggatggtcgtgaatctcccagctttgatacaccgtctcagagagtgcagtttatactgggcactgaagatgatgatgaggaacatatcccccatgacctttttactgagctggacgagatttgttggcgcgaaggcgaagacgccgaatggcgggagacagctcgctggctcaaatttgaggaggatgtggaagacgggggcgagcggtggtccaagccatacgtggccaccctgagccttcactcactgttcgagcttagatcctgtattctgaatggaacggtgctgctcgacatgcatgcgaacactctcgaggagatcgctgacatggtactggatcaacaggtgtcttcaggtcaactaaatgaggatgtcagacacagggtccacgaggccctcatgaagcagcatcaccaccagaaccaaaagaagcttactaaccgtatccctatcgttcgatctttcgccgatattggcaaaaagcagtctgagcccaattctatggacaagaatgccggccaggttgtttccccgcagtccgcacctgcctgcgtggaaaacaaaaacgacgtaagtagagagaacagcacagtggatttttctaagggccttggaggccagcaaaaaggccacaccagcccctgcggtatgaaacagaggcacgaaaaaggccctcctcaccagcaggagagagaagtggacctgcactttatgaagaagatccccccaggagctgaggccagcaacattctcgtgggggaactggagttcctggatcgcacagtagtggcattcgttagactgtcaccagcagtcctgttgcaaggcctggcagaagttccaataccaactagattcctgttcatcctgctgggaccactcggcaagggtcagcagtatcatgagatcgggagatctatcgcaacactgatgactgatgaagtgttccacgatgtagcttacaaggctaaggaccgaaacgacctagtgagcggaatcgacgaattcctcgatcaagtgaccgttctgccccctggtgaatgggatccctccataaggatcgagccccccaaaaatgtgccaagtcaggaaaagcggaaaatccccgctgtccccaacggaacagcagcacatggcgaggctgagccccacggcggacatagtggacctgagctgcaacgaacaggcaggattttcggaggcttgattctggatattaagcgaaaggccccatatttttggtccgatttccgtgacgccttttcccttcagtgtctcgcctcctttctcttcctttattgcgcttgcatgtccccggttatcactttcggggggctcctcggcgaggccacggagggacgcatctcagctatcgagtcactgtttggggcctcaatgacaggcatcgcatactcgctctttggcggccagcccctgaccattctaggatcaacagggcccgttttagtgttcgaaaaaatcttgttcaagttctgcaaggagtacggtctgagttacttatcgctgagggccagtattggtctttggacagccaccctttgtatcatcctcgtggcaaccgacgcgtccagccttgtttgttatataactagatttaccgaagaggcctttgcctcactcatctgtataatcttcatatatgaggcattggaaaagctgtttgagctgtcagaggcatatcctatcaatatgcacaacgacttagaactgctgacccagtactcttgcaactgtgtcgagccgcacaatccctccaatggaacactcaaggaatggagagagagtaatatttccgcctctgacattatctgggaaaatctcacagtgtccgagtgtaagtctttgcatggcgagtacgtcggcagagcttgcggacatgatcacccatacgtgcctgatgttttgttttggtccgtcattctgtttttttctaccgtgacattatcagcaaccctaaagcagtttaaaaccagcaggtattttcccacgaaggtgagatctatagtctccgatttcgcagtgttcctgaccatcttatgtatggtgcttatagactacgcaatagggatacccagtccaaaactgcaggtgccaagcgtattcaaaccgacgcgtgatgatcgcggatggttcgtaactcccttagggccaaatccctggtggaccgtgattgcggccatcattccagccctcttgtgcaccatactcatcttcatggaccagcagattactgccgtaatcattaaccgtaaagagcataagctcaaaaagggttgtggataccacttagatctcctcatggttgccgttatgctgggcgtgtgcagcatcatggggctgccttggttcgtggcggcaaccgtactctcaatcactcacgtcaatagccttaaactggaatccgaatgttccgcccctggggagcagcccaagttcctgggcatcagggaacagcgcgtcaccggcctgatgatttttatcttaatgggctctagtgttttcatgactagtatcctcaaatttattccaatgcccgtactgtatggggtcttcctgtacatgggagcatcgtcattgaaagggatccagttctttgatagaatcaaactattttggatgcctgcaaagcaccagccagacttcatctacctcaggcacgtgccattgcgcaaggtgcacttgtttacaataatacagatgtcttgcttggggctgctctggattattaaggtgagccgggcagcaatcgtgtttccgatgatggtgctggccttggtctttgttcggaagctgatggacctcttattcacaaaaagggagctctcttggctggatgatcttatgccagagagtaagaaaaagaagttagaggacgcggagaaagagcattag

SEQ ID NO: 135439 - DNA, 3357 bp, synthetic construct
  misc_feature 1..3357: note = Description of Artificial Sequence: Synthetic coding sequence
  source 1..3357: mol_type = other DNA
atggagatcaaggaccagggcgcacagatggaacccctgttacccacacgcaatgacgaggaggcggttgtcgataggggaggcacacggagcatccttaagacccacttcgagaaggaggatctggaggggcaccgaacgttgttcataggcgtccacgtcccactgggcggcaggaagtcacatcgccgccaccgccaccgcggacacaaacatcgcaaaagggacagggagagggatagtggccttgaagacggacgtgaatccccatcctttgacaccccatcccagagggtgcagttcatcctgggtacagaggatgatgacgaggagcacatcccacatgacctttttactgagctagacgagatctgctggcgcgaaggggaggatgcggagtggagagagaccgctcgctggttaaagttcgaagaggacgtggaagacggcggtgagcggtggtcaaagccatacgtcgctacgctttccctgcacagccttttcgaattgaggtcgtgcatcctcaacgggacagtcctgctggatatgcacgccaatactttagaggagattgccgacatggtcctggaccagcaggtgtcttctggccaactcaatgaggacgtgcgtcacagagtacacgaggcactcatgaagcaacaccaccaccagaaccaaaagaagctaaccaaccgaatccctatagtgagaagctttgctgacattggcaaaaagcaaagcgagcctaattccatggacaagaacgcaggccaagtggtgagcccgcagagcgcccccgcttgcgttgaaaacaaaaatgacgtcagtagggagaattccaccgtggatttcagtaagggcctgggcggccagcagaaaggacatacgtctccctgcgggatgaaacaacgccatgagaagggccctccccatcagcaggagcgcgaagtagacctccactttatgaaaaaaattcctccaggcgctgaggctagcaatattctggtgggggagcttgaatttctggaccgcaccgtcgttgcctttgtgcgcctgagtccggccgttcttctgcagggccttgccgaggtccccatccccactaggttcctttttatactactgggaccccttggaaaagggcaacagtaccatgaaattggtaggtcaatcgccaccctaatgaccgacgaggtcttccacgacgtcgcatataaagccaaagaccgtaacgacctcgtttcaggcattgatgagttcttggaccaagtcacggttctgccaccgggtgaatgggacccgtcgatacgaatcgagccccctaaaaacgtgccctcccaggagaaaagaaagatccctgctgtgcccaacggaactgctgctcatggcgaagctgagcctcacggaggacacagtggaccagagttacagaggaccgggaggatattcggcgggctgatcctggatatcaagcggaaggcaccttacttctggtcagactttcgggatgccttttcgctgcagtgcctggcgtccttcctgttcctctattgcgcttgtatgtctcccgtcattacttttggaggcctcctcggcgaagccactgaaggccgcattagtgccatagaaagtctatttggtgcgtctatgaccggaattgcctactctctcttcggcggccaacccttgacaattttgggaagcaccggacctgtactggtcttcgaaaagattctgtttaaattttgtaaagagtacggcctgtcttaccttagtttacgcgcatccattggcctttggactgccacactttgcatcattctcgtggctactgatgcaagttcactcgtgtgctatatcacacggtttactgaagaagcgtttgccagcctgatttgcatcatctttatctatgaggcactggagaagctatttgagctttccgaagcttatccaataaacatgcacaatgatctggagctgctcacccagtacagttgcaactgcgtcgaaccacataacccctccaacggtacactcaaggagtggcgggaatcgaatatcagtgcatctgatataatctgggagaatttgactgtgtctgaatgtaagtcgctgcacggtgaatacgtcgggcgagcatgtgggcacgatcacccatacgtgcccgacgttttgttttggtcagtcatcctgtttttttcgacggtgaccttaagcgcaactctgaagcaattcaagaccagccgatattttccaaccaaagtgaggagtatcgtgtccgactttgccgtgtttctcacaattctttgcatggttttaattgattacgcaatcggtatacctagcccaaaactgcaggtaccctcagtcttcaaacccacgcgggatgacagaggctggttcgtgacacctcttggtcccaacccttggtggaccgtcattgcggccataatacctgcgttgctttgtaccatccttatttttatggaccagcagatcacggcagtgatcattaataggaaagagcacaagctaaaaaaaggatgcggttaccatttagacttactcatggttgccgtgatgctaggcgtgtgcagcataatgggtcttccgtggttcgttgcagcaacagtactgagtatcacgcacgttaactctttgaaacttgagagcgagtgcagcgctcctggggaacagccaaagttcttgggaattcgagaacagagagtgaccggtctgatgatttttatattgatgggctctagcgtcttcatgacttctatccttaagttcattccgatgcccgttctgtacggtgtatttctgtatatgggggcctcatccctgaagggcatacagttctttgaccgcatcaaactcttttggatgccagccaagcaccagcctgactttatctacctacgccatgttcctcttcgaaaggtgcacctgttcacaattattcaaatgagttgtctcggcttgctgtggatcatcaaagtgagcagggccgccatcgtgtttccgatgatggtgttggccctcgtatttgttcgcaaactgatggacctgctctttaccaagcgggaacttagctggcttgacgacctaatgccggaatctaaaaaaaagaagttggaggatgccgaaaaagaggaagagcagtctatgctggccatggaggatgagggcaccgtgcagctgcccctggaggggcactacagagatgatcccagcgtcattaacatctcggacgaaatgagcaagaccgcactgtggcgcaacctccttataaccgcagataattcaaaggacaaagagtcgagctttccctcaaagtcttcacccagctag

SEQ ID NO: 135440 - DNA, 3318 bp, synthetic construct
  misc_feature 1..3318: note = Description of Artificial Sequence: Synthetic coding sequence
  source 1..3318: mol_type = other DNA
atggagattaaggatcaaggtgcgcagatggagccgctacttccaactagaaatgatgaagaggcggttgttgacagaggcggtactaggagcattttgaaaacccactttgagaaggaggatctcgaggggcacaggactttatttattggcgttcacgttcctttgggcggcaggaagagccaccggaggcatcggcaccgcgggcataaacaccgcaaaagagaccgcgagagggacagcggattggaggatggcagagagagcccctccttcgatacgccatctcagagggtgcagtttattctgggtactgaagatgacgacgaggaacacatcccgcatgatctgttcacagaactcgacgaaatctgctggcgcgaaggggaggacgctgaatggcgcgagacagcgcggtggctcaagtttgaggaagatgttgaggacgggggagagcggtggtcaaagccatacgtggcaactctgagtctgcacagtctcttcgagcttcgatcttgcatcttgaacgggacagtcctgctagacatgcatgccaacaccttggaagaaattgcggatatggtgctggaccagcaggtctctagtgggcaactgaacgaggacgtgaggcatcgagtgcatgaagctctcatgaaacagcatcaccatcaaaaccagaagaagttgaccaaccgtattccaatcgtaagatcatttgctgacattgggaagaaacaaagcgagcctaactccatggacaaaaatggtcaagtcgtaagtccccagagcgctcccgcatgcgtggagaacaagaacgatgtgagcagggagaactcaacagttgacttttccaaggtcgacctgcacttcatgaagaagattccacccggcgccgaggcatccaatatactggttggcgagttggaatttttggatcgcaccgtggttgctttcgtgagactttcacccgccgtgttactccagggcttagcagaggtgccgattccaactaggttcttgtttatcctcctggggccactgggtaaaggacaacagtaccatgagatcgggagaagtatcgccacactgatgacggacgaagtcttccacgacgttgcatacaaggcgaaggatcgcaacgatctggtctccggaatcgacgaatttctcgatcaagtaactgtcctgccgcccggcgagtgggacccctccataagaattgaaccccctaaaaatgtgccgagtcaggagaagcggaagatccccgccgtccccaacgggactgccgcccatggggaagccgaaccacacggcggccacagcggtccagagctacagagaactggacggatcttcggcggtctgattctcgatatcaaacgcaaagctccctatttttggagcgatttccgtgacgcgtttagtctccagtgtctcgctagtttcctgtttctttactgcgcctgcatgtcccccgtgattaccttcggggggttgcttggggaggcaaccgagggacgaatctcagcaattgaaagcctgttcggcgcctccatgacaggaatagcatacagtctgtttggagggcagccactgacaatactcggctcaacaggacccgtgctagtgtttgagaaaattctgtttaagttctgtaaggaatatggtctatcatacctaagcctgcgagcaagcatcgggctgtggaccgctacactgtgtattatcttggtggcaactgacgcttcatctctagtctgttacatcacccgctttaccgaagaggccttcgcgtctctgatttgcattatcttcatctacgaagcattggaaaagctgtttgagctgtctgaggcataccccattaacatgcataacgacctggagcttctcactcagtatagctgtaattgcgtggaacctcataatccatccaatggtactctcaaggaatggagagaatccaacatctccgcaagcgatatcatatgggaaaatttgacagtctcagagtgtaagagccttcatggggaatacgttgggagggcctgtgggcatgaccacccttacgtcccagacgtcctgttctggagtgtgatcttgttcttctctactgtgactttgagtgctaccctaaagcagttcaaaacttcccggtattttcccaccaaggtcaggtctatcgtgtccgattttgctgttttccttaccatcctctgtatggtgctcatagattatgccatcgggattccgagcccaaagctgcaggtgccctccgtctttaaacccacgcgcgatgatcggggttggtttgtgaccccattggggcctaacccctggtggaccgtcatcgccgcaattatccccgcccttctttgcactatattaatctttatggatcaacagatcacggccgtgataatcaaccgaaaggaacacaagctaaaaaagggctgtggctaccacctcgacctgctgatggtggcggtgatgttaggcgtgtgcagtatcatgggcctgccttggttcgtagccgccaccgtgctctctattactcacgtgaatagcttaaaactcgaatctgagtgcagcgcccccggagaacaaccgaagttcctgggcattagagaacagagggttaccggcttgatgattttcattttaatgggcagtagtgtcttcatgacttctattctcaagttcattcctatgcctgtcttgtacggcgtcttcttgtatatgggggcatccagtctcaaaggtatacagttctttgataggattaagttgttttggatgccagccaaacatcagcccgactttatctacctacggcatgtgcccctgcgaaaagtgcacctattcactattatccagatgtcgtgtcttggactgctgtggattattaaggtgtctcgggccgctattgtctttcctatgatggttctggctcttgtctttgtacgcaagctgatggatttgctgttcacgaaaagggagttaagttggcttgacgatctaatgccggagtccaagaagaaaaagctcgaggacgcggagaaagaagaggagcagtctatgctcgctatggaggacgaaggcaccgttcagctgcccctggaagggcactatcgtgacgatccgagcgttattaacatcagcgatgaaatgagtaaaacagcactgtggcgcaatctactcatcacagctgacaattcaaaggataaggaatctagcttccctagtaaaagtatcgagtcacgaaaggagaaaaaggctgattcaggcaagggcgtcgacagagagacttgcctctag

SEQ ID NO: 135441 - DNA, 1227 bp, synthetic construct
  misc_feature 1..1227: note = Description of Artificial Sequence: Synthetic coding sequence
  source 1..1227: mol_type = other DNA
atggagatcaaggatcagggggcccagatggaacccctactacctactagaaacgacgaagaggcagtcgtggacagaggcggcactaggtcaatcttgaagacgcacttcgagaaggaggacttggagggccacaggaccctgttcattggagttcacgttccgctggggggccgcaaatctcacagacgacaccgccaccggggccataagcaccggaaacgggatagggagagggattctggcctcgaggacgggagggagagtccaagcttcgacactccgtcccagcgtgtgcaattcatcctcgggacagaagacgatgacgaggaacacatcccacacgatctctttacagaattagacgagatttgctggcgggagggggaggacgctgaatggagagagaccgcccgctggttaaaattcgaggaagacgttgaggatggtggcgaacgttggtcaaagccgtatgtcgctaccctaagtttacacagtctattcgagttgcgttcatgcattctcaatggtaccgttctgctggatatgcacgccaacactctggaagagattgctgatatggtcctcgaccagcaggtgagctccggccagctgaatgaagacgtccgtcaccgtgtgcacgaagcccttatgaaacagcatcaccaccagaaccagaagaaactgactaataggattccaatagtgaggtcattcgccgatattgggaagaagcagtccgaaccaaatagcatggataaaaatgccgggcaggttgtgtctccgcagagtgctcccgcctgcgtcgaaaataaaaatgacgtcagccgtgagaattcaactgtagattttagcaaggggcttggcgggcagcagaagggccacaccagcccatgcggcatgaaacagaggcacgagaagggtccaccccaccagcaggaacgggaagtggacctgcattttatgaagaagattcccccaggggccgaggcatcaaacatcctggtgggagagctggaatttctagaccgaacagttgttgccttcgtccgcttaagcccagctgtactgctccagggcctcgcagaggtccctatccccacaagatattttatgatgctgccaatcaaattgaaaattgtgatgacatggtaccaggagttgatgagtttttggatccgtctgctgttctctctccttgagaacgggatccaggctttcgaatag

SEQ ID NO: 135442 - DNA, 2676 bp, synthetic construct
  misc_feature 1..2676: note = Description of Artificial Sequence: Synthetic coding sequence
  source 1..2676: mol_type = other DNA
atgtcacaagttggtgggagaggggatagatgcacccaggaggttcagggcctggtacacggcgccggagatctttccgcttcccttgccgagaattccccaactatgtcccaaaacggctactttgaggactcaagctactataaatgcgatacagacgacacctttgaagcgcgggaagaaatcttgggggatgaggcctttgacacagctaactcatccatcgtgagcggagaatcgattcgctttttcgtcaatgtgaacttggagatgcaggccactaacactgaaaatgaggccacatccggggggtgcgtcctgctccacactagtagaaaatatctgaagctcaaaaacttcaaagaggagattcgtgcccatagagacctggatgggttcctggctcaggcctcaattgtgttaaatgagaccgctacatccttagataatgtcctccgaactatgctcagaaggtttgccagagatcccgacaataacgaacccaattgcaatctggatcttctgatggccatgcttttcactgatgcaggagctcctatgagaggaaaggtgcacctgcttagtgacacgatacagggtgttactgcaactgtaaccggggtcagataccagcaatcctggctttgtattatctgcactatgaaggccctgcagaaaagacatgtttgtatttcccggctggtccggccacagaactggggtgagaacagctgcgaagtgagattcgtcattctggtgctggccccccctaagatgaagtctactaaaaccgctatggaggttgcacgcaccttcgccactatgtttagcgacatcgcttttagacagaaactactggaaaccagaacagaggaggaattcaaagaggccctggttcatcagcgacagctgctaaccatggtcagtcatgggcccgtggcaccacgaacaaaggaaaggtctaccgtgagtctgccagcccatcgccatcccgagccgcctaagtgtaaagattttgtgccattcggtaagggtattcgggaagatattgcacggcgctttccgctgtatcccctcgatttcactgacggtataatcggcaaaaataaggccgttggtaagtatatcacaactaccctgttcctctacttcgcatgtttgcttcccacgattgcattcggaagcctcaatgacgaaaatacagacggagctattgacgttcaaaagactatcgctgggcagagtatcggggggctcctgtatgccctcttttcaggtcagcctttggtcattttgttgacaacagctcctctggcactttatatacaggttatccgagtcatctgtgacgattacgacctggacttcaactcattctatgcttggacaggcctttggaactcttttttcttagctttgtacgccttctttaatcttagcctggtcatgtctctgttcaagcgaagtactgaggagatcatagcactctttattagtatcaccttcgtacttgatgctgtaaaagggaccgtgaaaattttttggaagtactattatggccactacctggacgactaccacactaagaggacctcatcccttgtgagcctgagcggtctaggagcatcccttaacgcgagcctgcacaccgcgctcaatgcctcatttctggcttcacccaccgaacttccttccgcaacacactccgggcaggcgacggcagtcctctcactgctgattatgctcggcacgctttggctgggatacacactctatcagtttaaaaagtcaccttacttgcacccttgcgtcagggaaattctctctgactgcgccttacctatagccgtgctagcatttagtctgattagctcccacggattcagggagattgagatgagtaagttcaggtataacccaagcgagtccccctttgccatggcccaaattcaaagcctgagtctcagggcggtgagtggggcaatggggctggggtttctgctgagcatgttgttcttcatcgaacaaaaccttgtagcagcattggtcaatgctcccgagaaccgcctggtcaagggaaccgcataccattgggaccttctgctgctcgccattataaatactggcctcagtttatttggtttgccatggatccatgcagcatacccacacagccctcttcacgtgcgggctctggctctggtggaagaacgcgttgagaacggacacatctacgatacaatcgtcaatgtgaaagagaccagactgacttcccttggggcctccgtcttggtggggttaagtctcctcctgcttccagttcccctgcagtggattcccaagcctgtgctctatggactcttcctgtatatagccctgacctccctcgatggtaaccagctggtgcagcgcgtagcgctccttctgaaagaacagacagcataccctcctacacactatatccggagggttccacaaaggaagatacactacttcacggggttgcaggtgctacagctattgctcctctgcgcctttggcatgtcctcgctaccctatatgaagatgatcttccccctgatcatgattgccatgatccctatccgttacatcctgttgccacggattattgaagccaaatacctggatgttatggacgccgaacacaggccatag

SEQ ID NO: 135443 - DNA, 2757 bp, synthetic construct
  misc_feature 1..2757: note = Description of Artificial Sequence: Synthetic coding sequence
  source 1..2757: mol_type = other DNA
atgggcgtttacgggcctcaagatagatcagagtccgaaaagagagacgtgcagagggatccacctccgtggcatccccgccgggaaggggaacgcccagcaagggctaggtccctcccgctcgctgcagcagggcaggggtttttaaggaagacctggataagtgaacatgaaaactcccccactatgtctcaaaatgggtatttcgaagacagtagctactacaagtgtgacacggatgatacctttgaagcccgggaggagatccttggggacgaagcctttgatacagccaatagttctatcgtcagcggagaaagtatacggttcttcgtgaatgtgaacctggaaatgcaggccaccaacaccgaaaatgaggccacgtcgggtggctgcgttctgctgcacactagcagaaagtacctaaaacttaagaacttcaaggaggaaataagggcgcacagggaccttgacggtttcctcgctcaggcctctatcgtgctgaacgagactgcaactagcttggataatgtgctaaggaccatgctgcgccgttttgctcgtgacccggataataatgagcccaactgcaacttagatctgctgatggccatgctgttcactgacgcgggggcaccaatgcgaggcaaggttcatttgctctccgacacgatccagggggtcaccgccacagtgacaggagtacggtatcaacaaagctggctctgcattatttgcactatgaaggcgttacagaagagacacgtttgtatctctagactggtgcgaccccaaaattggggagaaaattcctgcgaggtgaggttcgttattctggtcctggctcctcccaaaatgaaatccacgaagacagccatggaggtggctagaaccttcgcaaccatgtttagcgacatcgccttcaggcaaaaactgttagagacgagaacagaggaggaattcaaagaggcccttgtccaccagcggcaactcctaactatggtgagccatggccctgtggctccccgaaccaaggaacggtctacagtgtccctcccagcccatagacatcctgagccgccgaaatgcaaggacttcgtgcccttcggcaagggcattcgagaggacatagccaggagatttcctctctacccattagatttcacagatggcatcataggcaaaaacaaggctgtgggtaagtacataaccaccaccttgttcctttactttgcgtgcctgctccccacaatcgcgttcggatccctgaacgatgaaaataccgacggggctatagatgttcagaagaccattgccggacagagcattgggggcctcctctacgcactcttttcaggacagccactggtgatactactgaccaccgcgccactggcgttatatatccaggtgatccgcgtaatctgtgacgactacgacctggactttaattccttctatgcctggacgggactctggaacagtttctttctggcactgtacgctttctttaatttgagtctggttatgtctctcttcaagaggagcacagaggaaatcattgctctatttatttctattacctttgtactggacgcggtgaaaggcacagttaagattttctggaaatactactatggccactacttagatgattaccacacaaaaaggacctcgtccctcgtgagtctttctggccttggagcctcattgaacgccagcctgcacacagccctgaacgcttctttcctggcctcacctacagagttaccttcagccacacacagcggacaggcaacagcagtgctgtcgctgctcattatgctgggcactttgtggctgggctatacactttatcagtttaaaaagagtccttacctccacccgtgtgtccgggagattctgagcgactgcgccctgccgattgctgtgctggctttttccttgatctcctctcatggatttcgcgaaatcgaaatgtcaaagtttaggtacaatccctccgaaagcccattcgcaatggcccagatccagagcctatcgcttcgcgccgtgtccggcgctatgggacttggctttttgctttccatgcttttttttatcgaacagaacctggtcgctgcactggtaaacgcccctgaaaatcgactcgtcaaaggcaccgcctatcactgggacttacttttactcgcgattataaataccggactgagcctcttcggcctgccttggattcacgccgcatatcctcattcccccttacatgtgcgtgccctcgccttagttgaggaacgggtggaaaacggacacatctacgataccatcgtaaatgtcaaggaaacacgcctgacatccttgggcgccagcgttctggtgggccttagtttgttgctgcttcccgtccctctgcagtggatccccaaacccgtcttgtacggcctatttctgtacatcgctctgacatccttggatggtaatcagttagtccaacgagtggccttacttctgaaggaacagaccgcctaccctccaactcattatatccggagggtccctcagcgcaagatccattatttcactgggcttcaggtgctacagctactgctattgtgcgcctttgggatgtccagtctaccctacatgaagatgattttccctttgataatgattgccatgatcccaatccgatatattctgctcccaagaatcatcgaagccaagtacctcgatgtaatggatgctgaacataggccatag

SEQ ID NO: 135444 - DNA, 951 bp, synthetic construct
  misc_feature 1..951: note = Description of Artificial Sequence: Synthetic coding sequence
  source 1..951: mol_type = other DNA
atggccgctgcgacacgacgggtgttccatctgcaaccttgcgaaaattcccctacaatgagtcagaacggctacttcgaggatagcagttactacaagtgcgatactgacgacactttcgaggccagagaagagatcctcggcgatgaagcatttgacaccgccaacagttctatcgtttctggcgagtccattagattctttgtaaatgtgaatctcgagatgcaagctacaaatacagagaacgaggcaacctctgggggctgcgtattattacatacttcccgcaagtatctcaagcttaagaatttcaaggaagaaataagagcacaccgggatctggacggcttcctggcacaagctagcattgtcctaaacgagactgcgacaagtctcgacaatgtcctgagaactatgctccggcgtttcgcgcgagatccagacaacaacgagccaaactgcaaccttgatttgcttatggcaatgctgtttaccgacgccggtgccccgatgagaggcaaggtgcatctgctctctgataccatccagggtgtgaccgcaacagtaacaggagtgagatatcaacagtcatggctctgcatcatatgcactatgaaggccttgcaaaaaaggcacgtgtgtatatcccgactcgtacgccctcagaactggggagaaaactcttgcgaggtgcgctttgtgatactggttctcgccccccccaagatgaaaagcacaaagactgctatggaagttgcccgtactttcgctaccatgttttcagacatagccttccgccagaaattgttggaaacacgtactgaagaagaattcaaagaggcactcgtgcatcagaggcagctgctcactatggtgtcccatgggcccgtggctccccggaccaaagaaagatctacagttagtttaccagctcatcggcacccagagtag

SEQ ID NO: 135445 - DNA, 2628 bp, synthetic construct
  misc_feature 1..2628: note = Description of Artificial Sequence: Synthetic coding sequence
  source 1..2628: mol_type = other DNA
atggccgcagccactagacgcgtcttccatctgcagccgtgtgagaattctcctacaatgagccagaatggctattttgaggacagcagttattacaagtgtgataccgatgatacattcgaggcgcgagaggaaattctgggtgatgaggcattcgacactgccaacagtagcatcgtttcaggcgagtcgatcagatttttcgtgaatgttaaccttgagatgcaggccaccaatacagaaaacgaggccacctccggtggatgcgtgcttctacatacgtctcgcaagtacctgaagctgaaaaatttcaaggaggaaattcgggcgcatcgagatcttgacggctttttggctcaagcgagtattgtgcttaatgaaacggctacctccttagataatgtcctgaggaccatgttacgcaggtttgctagagatccagataacaacgaacctaattgcaacctggacttacttatggcaatgctgttcacagacgctggcgctcccatgagggggaaagtgcatttgctgagtgacaccatccaaggtgtgactgccaccgtgactggagtcaggtatcagcaaagttggctgtgcatcatctgcacaatgaaagctttacagaagagacacgtctgcatctcaaggctcgtgcgccctcagaactggggggagaatagttgcgaggtccgcttcgtgatactcgtacttgctccaccaaaaatgaaatctacgaaaacagccatggaggtcgcccgcacttttgctactatgttttccgatattgcctttcgacagaaactgttagagacacggaccgaggaagagttcaaagaggccctggtgcaccagagacaacttctgactatggtctcccacggccccgtagcaccccgaacgaaggagcggagcactgtgtccctccccgctcacaggcatccggaaccccctaaatgtaaggacttcgtcccctttggaaaaggtatcagggaggatattgcccggcgctttcccttgtacccgctcgacttcacagacggcataattggtaagaacaaagcagtcggcaaatacatcactacgactctgttcctttactttgcttgcctgctgccaaccatcgcctttggctcgttaaacgatgaaaataccgatggcgccattgacgtccagaagaccatagcaggccagagtatcgggggtttactgtatgcactgttttctggacaacctctggttattctgctaacaacagctcccttggccctgtacattcaggtcatccgtgttatttgtgatgattacgacctggactttaattcgttctacgcgtggactggtctgtggaattccttttttctggcgctatacgctttcttcaacctttcactggtgatgagtttgttcaagcgtagcaccgaagaaatcatcgccttgtttatcagcataacgtttgtgctcgacgctgtgaaaggcactgtgaagatcttttggaaatactattatgggcactacctcgatgattatcatacaaagaggacttcatccctggtttcactctctggccttggtgccagtctaaatgccagccttcatactgcactgaatgcttcttttctggcttcacctaccgagcttccaagtgcaacacactccggccaagcaacagcggtgttgagtcttctcattatgcttgggacgttgtggctgggctacacactttaccagttcaagaagtcaccttatttgcatccatgtgttcgggagattctttcagactgtgcgctacctatcgcagtgctcgccttctccttgatcagttctcatggttttagggaaatcgaaatgtccaaatttaggtacaacccgagcgaaagtcctttcgcaatggcacagatccagagtctgagcttacgagccgtgtcaggtgccatgggactcgggtttcttctgtccatgctattttttatcgagcaaaatctggtggccgcactggtcaacgcccctgagaatagactggtgaagggcaccgcctatcactgggatttgctgcttctcgcaatcattaatacggggctatctttattcgggttgccttggatccatgctgcgtacccgcacagtccactccacgtgagggcactggccctcgtagaggaacgcgtagagaatggccatatatacgacaccattgtgaatgttaaagagacacggctgacctctctcggcgcaagtgtccttgtaggactctcactcttacttctgcctgtcccacttcaatggataccaaagcccgtgctttacggactgtttctgtatattgccctcacttctctcgatgggaatcagctggtacagagggtggcactgctgctcaaggaacagacagcttacccacctacgcattacatccgaagagtgccacagcggaaaatacactacttcaccggtctccaggtacttcagctgctgttgctgtgcgcctttggcatgtccagcctgccatatatgaagatgatctttccgctgatcatgatcgccatgatcccgatcagatatattctgttgcccagaatcattgaagcaaagtacttggacgtcatggacgctgaacaccgcccctag

SEQ ID NO: 135446 - DNA, 1113 bp, synthetic construct
  misc_feature 1..1113: note = Description of Artificial Sequence: Synthetic coding sequence
  source 1..1113: mol_type = other DNA
atgaccctggcttccaggctgtcaacggctgctaacactggacaaattgatgatccccaagaacaacaccgcgtcataagtagcaacctggcgttaattcaggtgcaagcaacagtcgtgggattgctagctgcagtcgctgctctgctgctcggggttgtgagtcgcgaggaagtcgacgtggctaaggtggagctcttatgtgcctcaagcgtgctgactgcctttctggcggcatttgccctgggtgtgctgatggtgtgtattgtgatcggcgcccggaagttaggcgtcaaccctgacaatatagcgaccccaattgcagccagcctgggcgatctgattacactgagcattctcgccctggtgagcagctttttctatcgccacaaggattccagatacctgacgcctttagtgtgtctcagctttgcggccctgaccccagtctgggttctcatagccaagcagtcccctcccatagtcaagattctcaaattcggctggtttcctattattcttgccatggtgatcagtagcttcggtggcctgatactgagcaaaacagtctctaagcaacaatacaaaggtatggcaatcttcactcctgtcatttgcggcgtgggtggaaatcttgtcgccattcaaacctcccgcatttcgacttatttacacatgtggtccgcacctggggtgcttcctctgcagatgaagaaattttggccaaacccctgctcgaccttctgcaccagcgagatcaattcaatgagcgcacgggtactgttattgctcgtggttccaggtcatctcatattcttctacattatctatctcgtcgaaggccagtctgtgatcaactctcagacatttgtggtgctttatctgcttgccggtcttattcaggtcaccatcctgctgtatctagccgaagtgatggtgagacttacttggcatcaggcccttgaccctgacaaccattgtatcccatacctgactggcctgggcgatttgctggggaccggtctgctggcactgtgttttttcacagactggctcctgaagagcaaagcagagcttggaggaatcagcgagctcgccagcggtccaccatag

SEQ ID NO: 135447 - DNA, 1542 bp, synthetic construct
  misc_feature 1..1542: note = Description of Artificial Sequence: Synthetic coding sequence
  source 1..1542: mol_type = other DNA
atgtcaagcaaacccgaacccaaggatgtccaccagcttaatggcacgggtccgagtgctagtccctgtagtagcgacggacctggcagggagccactcgctggcaccagcgaatttttaggccccgatggggctggcgtggaggtcgtcattgaatcgcgggctaatgccaaaggggttcgagaagaggatgccctgctcgaaaacggtagccaatcaaacgagagtgacgacgtttctaccgataggggccccgcccccccttctcctcttaaggaaacctccttcagcataggactacaggttcttttcccattcctgctcgctgggtttggcacggtggcagccggaatggttctcgatattgtgcagcactgggaggtcttccaaaaggtgacagaagtatttatcctggtgcccgccctgctggggttaaagggcaacttggagatgactctcgcctctagactgagtaccgcagccaatattggtcacatggacacacctaaagagttgtggcgtatgatcacaggaaatatggccctgatccaggtacaggctacagttgtgggctttctggcttccatcgctgccgtcgtcttcggatggattcccgatgggcacttcagcattccgcacgcattcctgctctgcgcgtctagtgtcgcaacagcattcattgcatccctggtactgggcatgattatgattggtgtcattattggaagcaggaaaattggaatcaatcccgataacgtggcgacacccatagccgcaagtttgggcgacttgattactctggcattgctgtctggcattagctggggactgtacctggagcttaaccattggcgttacatctaccccctggtgtgtgcctttttcgttgccctacttccggtctgggtcgtgctggcccgccggtctccagctacccgtgaagtgctgtatagcggctgggaacctgtgatcatagctatggctatttctagcgtcggcggcttgattttagataagactgtgagcgaccctaatttcgcaggaatggcagtgtttacacctgtgatcaatggagtggggggtaacctggtggctgtacaggctagtagaatttcaacattcctccacatgaacggcatgcccggagagaattcagaacaggctccgcggcgttgcccttctccctgtaccacattcttttctcccgatgttaatagcaggagcgcacgggttctttttctgctggttgtccccggtcacctggtcttcctgtatacaatttcttgtatgcaagggggtcacacaacgctgacacttatctttattatcttctatatgactgccgccctgctccaagtgctgattctgctgtacatagctgattggatggtccactggatgtggggcaggggtctggaccctgataacttctccatcccttacctgactgctctgggagatttgttgggaaccgggctcctggccctctcatttcacgtgctgtggttgataggcgaccgggacactgacgtgggcgattag

SEQ ID NO: 135448 - DNA, 1722 bp, synthetic construct
  misc_feature 1..1722: note = Description of Artificial Sequence: Synthetic coding sequence
  source 1..1722: mol_type = other DNA
atgaccaatagtaagggcaggtccattaccgataagacctccgggggcccctcaagcggaggaggctttgttgactggaccttgaggttaaacaccatacagagcgacaaattcttgaacctgctgctaagcatggtgcctgttatttatcagaagaaccaagaagaccgccataagaaagctaacggaatttggcaggatggcttaagcactgcggtgcaaactttctccaatcgcagcgagcagcacatggagtatcatagcttctcggagcaatcctttcatgccaataacggccacgccagtagttcatgctcacagaagtatgacgattatgctaactacaattattgtgacggtcgggaaacatcggaaacaaccgccatgctgcaggatgaggatatttccagcgatggagacgaagacgccattgtggaagtgactcctaaacttcctaaggagagctccggtatcatggcactgcagattctggtgccatttctcctagcgggcttcggtactgtctcggccggtatggtgctcgatatcgttcagcattgggaagtttttagaaaggtgactgaagttttcattctggtgcctgccctgctaggtcttaaaggaaatttagagatgacgcttgcctctagactgagtaccgcggtcaatataggtaagatggactcacctatcgagaagtggaatttaatcattgggaacctggcattaaagcaggtgcaggccaccgttgtcggctttctggccgcagtagctgctatcattcttggatggattccagaaggcaagtactatttagatcactccattctactgtgttcaagttccgttgcgacagcttttattgcctcacttctacagggtatcatcatggttggcgtcatcgtggggtctaaaaagactggtatcaatccagacaatgtggccactccgatcgccgccagctttggcgatctgataacactcgctatactagcatggatttcccaggggctgtacagctgcctcgagacttattactacatctcgcccctcgtgggtgtgttcttcttggctctaacccccatttggattatcattgcagctaagcaccctgccacccgtacagtgctccattccggctgggagcctgttattactgctatggtgatatcatccatagggggtttgattcttgacaccacagtatccgatccgaatctcgttggtatcgtggtttacactcctgttatcaatgggattggtggaaacctggtggccattcaagcttccagaatttctacctatctgcacctgcactcaatccctggcgagctccctgacgagccgaagggatgctactacccgtttagaactttcttcggccccggggtgaataacaagagcgctcaagtgctcctcttgttggttatacctgggcacctgattttcctatacactatccaccttatgaagtcagggcacaccagcctcaccattatcttcatcgtggtatacctgttcggtgcggtgcttcaagtattcacattgctttggatagctgattggatggtccaccatttctggaggaaaggaaaagaccccgactctttcagcatcccgtacctgactgctcttggggacctgcttggtacagccctgctagcgctatccttccatttcctgtggttaattggagatcgggatggtgacgtgggggattag

SEQ ID NO: 135449 - DNA, 369 bp, synthetic construct
  misc_feature 1..369: note = Description of Artificial Sequence: Synthetic coding sequence
  source 1..369: mol_type = other DNA
atgacaaactctaaagggcgatcgattaccgacaaaacaagtgggggaccttccagtgggggcgggttcgtcgactggacactcagactcaacactatccagagtgacaagtttctcaatctgctgctcagtatggtgccagtcatttatcagaagaaccaggaggatcggcacaaaaaggccaacggcatctggcaggacggtctttccacagctgtgcagacatttagcaacagatccgaacagcacatggagtaccacagctttagcgagcaatcttttcacgcgaacaatggacatgcttctagctcctgcagccaaaagtatgatgactacgcaaactataactactgcgatggtagagagtag

SEQ ID NO: 135450 - DNA, 432 bp, synthetic construct
  misc_feature 1..432: note = Description of Artificial Sequence: Synthetic coding sequence
  source 1..432: mol_type = other DNA
atgacgaattctaagggccggagtattactgacaaaacctctggaggcccttcgagtggaggcgggtttgtcgattggacactgaggctcaacaccattcagagcgacaaattccttaacctgctgttaagtatggtccccgtgatttaccagaaaaatcaggaggaccgccacaaaaaggcaaatggaatctggcaggatggcctgtccacagccgtgcaaaccttcagcaacaggagtgagcaacatatggaatatcacagctttagcgagcagtccttccacgcgaataatgggcatgcaagtagtagttgtagccagaagtacgacgactatgccaactacaactactgcgacggccgagagacatctgagactaccgctatgctgcaggatgaggacatctcgtctgatggtgacgaggacgcctag

SEQ ID NO: 135451 - DNA, 141 bp, synthetic construct
  misc_feature 1..141: note = Description of Artificial Sequence: Synthetic coding sequence
  source 1..141: mol_type = other DNA
atgaccaactctaagggtagatctataaccgacaaaacaagtggtgggccctcttcaggcggtgggtttgtcgattggaccctgcgcttgaatactatccagagcgacaaatttttaaatcttctacttagcatggtatag

SEQ ID NO: 135452 - DNA, 219 bp, synthetic construct
  misc_feature 1..219: note = Description of Artificial Sequence: Synthetic coding sequence
  source 1..219: mol_type = other DNA
atgaccaactccaaaggccgctcgataacagataaaacatccggaggcccgtcttcaggcggaggatttgtcgactggaccctgagactgaacacaatccagtctgataagtttctgaacttactcttgtccatggtcccagttatttatcaaaaaaaccaggaagacagacataaaaaagcaaatgggatttggcaggacgggctatccacagcatag

SEQ ID NO: 135453 - DNA, 39 bp, synthetic construct
  misc_feature 1..39: note = Description of Artificial Sequence: Synthetic coding sequence
  source 1..39: mol_type = other DNA
atgactaactccaaagggaggtcgattaccgataagtag

SEQ ID NO: 135454 - DNA, 231 bp, synthetic construct
  misc_feature 1..231: note = Description of Artificial Sequence: Synthetic coding sequence
  source 1..231: mol_type = other DNA
atgacgaatagcaagggcagatctatcacagataagacctcgggcggtccttcctcaggcggtggcttcgtggattggactctccgactgaataccatacagagcgacaaattcctgaatctgttgctcagtatggtgcccgttatttaccagaagaaccaggaggaccgacacaaaaaagccaacggaatatggcaagatgggttatcaacagctgtgcagacattctag

SEQ ID NO: 135455 - DNA, 285 bp, synthetic construct
  misc_feature 1..285: note = Description of Artificial Sequence: Synthetic coding sequence
  source 1..285: mol_type = other DNA
atgacaaactccaaaggcaggtccatcaccgataaaacgagtggcggcccgtcttctggcggcggatttgtcgattggacacttcgcctgaacacaattcagtcagataagttcttgaacttactgctgtctatggtccctgtcatataccagaagaatcaggaagatagacataagaaggctaatgggatttggcaagacgggctgagcacggccgtgcagacctttagcaacaggtctgaacagcacatggaataccacagtttttccgaacagtccttttag

SEQ ID NO: 135456 - DNA, 1524 bp, synthetic construct
  misc_feature 1..1524: note = Description of Artificial Sequence: Synthetic coding sequence
  source 1..1524: mol_type = other DNA
atggacgggacagagacacgccagaggagattagactcctgtggtaaacctggggagctgggactgccccaccccctttcaactggaggtctccccgtggcaagcgaggacggcgcattacgagctcccgagtcccagagtgtgaccccaaaaccactggaaaccgagcccagccgcgaaaccacctggtctataggattgcaggtgactgtgccgttcatgtttgccggcctgggcctgtcttgggctggaatgctgctcgattacttccagcattggcccgtcttcgttgaagtgaaagatctgttgacactcgtcccccctctggtcggcctaaaaggaaatctagagatgacattggcgtctcgcctgagcactgcggcgaacaccggccaaatcgacgatccgcaagaacaacaccgcgtaatatcctctaacctggccttaattcaagtccaggccactgtggtggggctcctcgcagccgtggctgcactccttttaggtgtcgtgtctcgcgaagaggtcgacgtcgcaaaggtagagctcctttgcgcaagtagcgtgctgactgctttcctggcagccttcgccttaggggtcctaatggtgtgcatcgtgattggcgcgcgcaaactcggtgtcaaccccgataacatcgcgacccctattgccgctagtctcggggatcttataacactttctatactggccttagtctctagtttcttctaccgccataaagactcccggtaccttacccccctagtgtgcctctctttcgccgctctgactccagtatgggtgctgattgctaaacagtccccacccatagtgaaaatcttgaaattcgggtggtttcctattatcctggctatggtgatcagttcttttggcggtttaattctttccaaaaccgtcagtaagcaacaatacaagggcatggctattttcacacccgtcatatgcggggtggggggaaacttggtggcaattcagacatctcgcatcagcacttacctgcacatgtggtcggcgccaggagtgctaccccttcaaatgaagaagttctggcctaacccctgtagtactttctgtacctcggagataaacagcatgagtgctagggttctcttgctgcttgttgtgcccggccatctgattttcttctatattatctatctcgtggagggtcagagcgtaataaattcacaaacatttgtagtgttatatttgcttgccggactaatccaggtcacaattctgctctatctggccgaggtgatggttagactcacgtggcatcaggcactggatccagacaaccattgtatcccttaccttacagggctaggcgacttactcggcagcagttccgttggccacactgcagctgtccctaggagatgtaccgccagtcctggatgggggctgattcagccatttatctgcacacagcacctcatagtatcccttttgagtttttactttccattctgcttactggccaagactagcatctag

SEQ ID NO: 135457 - DNA, 1416 bp, synthetic construct
  misc_feature 1..1416: note = Description of Artificial Sequence: Synthetic coding sequence
  source 1..1416: mol_type = other DNA
atggatggaacagaaacaagacagcgtaggctggatagctgtggcaaacccggggagctgggactgccgcatcctctgagtaccgggggacttcctgtggctagcgaggacggggccctaagagcccccgaatcacagtctgtcacccctaagcccctagagacagagcctagtcgtgaaaccacatggagcattggactgcaggtaacggtgccctttatgttcgcaggtctgggtctttcatgggcagggatgctgctggactactttcaggctaataccggacagatagacgacccccaggaacagcatagagtcatttcttccaacctggccctgatccaagtacaagctaccgtggtcggactattggcggctgtggcagccctattattgggcgtggtttcacgagaggaggtggacgtagctaaagtggagttgctttgcgcttcttctgtgttaactgcctttctggctgcattcgccctgggtgttctgatggtctgcatcgtgattggagcccggaagttgggagtgaaccccgataatattgctacacccatcgccgcgagcctcggggacttaattactcttagcattctcgctctggtgagttcatttttttacaggcacaaggactccagatatcttacacccctggtctgcctttcattcgctgctttgactccggtttgggtcctgattgccaagcagtctcctccaattgtcaaaattttgaaattcggctggttccctatcatcctggcgatggtgatcagctcttttggtggtcttattctctctaagacagtctccaaacagcagtacaaagggatggcaatcttcacacctgtaatctgtggcgtaggcgggaatctggtggcaatacagaccagccgaatcagtacttacctacacatgtggtcggccccaggggtgctgccactccagatgaagaagttctggcccaacccatgttccactttctgtaccagcgaaatcaattccatgagcgcccgagtcctgctgcttctggtggtacctggacacctcatctttttctacatcatctacctggtcgagggccagtcagtgatcaacagtcagacattcgttgtgctgtacctgctggcaggactcatccaggttacaatccttctttacctcgcagaggttatggtgcggctcacctggcatcaagcgctggatcccgacaatcactgcatcccttatcttacaggtttaggcgacttgctcggctcctcttccgttgggcacacagccgccgtaccacgccggtgtacagcttcgccgggctggggactgatccagcccttcatttgcacacagcacctcattgtcagcctgttgtctttttattttccattctgccttctggccaagacttctatctag

SEQ ID NO: 135458 - DNA, 1464 bp, synthetic construct
  misc_feature 1..1464: note = Description of Artificial Sequence: Synthetic coding sequence
  source 1..1464: mol_type = other DNA
atggacggcacagaaactagacagcgccgcttagacagttgtggcaaacctggggaattaggacttccccatcctttaagcactggtgggctgccagttgccagcgaagacggtgccctaagggcgcccgagtcacagagcgtcaccccaaagcccctcgaaacagaacctagcagagagactacctggtccatcggcctgcaggtcaccgttcccttcatgttcgctgggctgggactgagctgggccggcatgctgcttgattatttccagcactggcccgtatttgttgaagtaaaggatctgctgacactggtcccccctctggtcggactgaaagggaatttagagatgacacttgccagtaggctctctacggctgcgaataccgggcagatcgatgacccacaggagcagcacagggtcataagctcaaaccttgctctcatacaggtgcaagccactgtggttggattgttggctgcagtggccgctctgctgttaggagtggtctccagagaggaggtcgacgtggccaaagtcgaactactgtgcgcctcttccgtgctcacagcgtttctggccgcgtttgcactcggcgtcctgatggtttgtatagttattggggccagaaaattgggtgtcaacccagataacatcgcaacaccaatcgctgcgagcctgggagatttaatcaccctgtctatcctcgctctcgtgtcttcctttttttaccgccacaaggactcccggtacctaacacccctggtttgcctctccttcgcagccctgacccccgtgtgggtgttaatagctaaacagtctccacctatcgtgaagattctgaaatttgggtggtttccaatcatactggcaatggtcatttcatctttcgggggtctgatactgtcgaagacggtaagcaagcaacaatataagggaatggccatcttcacaccagttatctgcggcgtaggcgggaatcttgttgccatacaaacaagccggatttccacctacctgcatatgtggagcgctccgggggtcctacctttgcagatgaaaaaattctggcccaatccatgcagtactttctgtacttcagagataaattctatgtccgcccgggttctgctcctcctcgtggttccaggtcaccttatcttcttctacatcatttacttagtcgagggtcagagtgttataaactcccaaacatttgtcgtgctttatcttttggctggacttattcaggtcacaattcttctgtacctcgctgaagtgatggttcgcttgacatggcaccaggctttggaccctgacaaccattgtatcccctatctgactggactgggggatctcctaggaacaggactgctcgccctgtgttttttcaccgactggctcctcaaaagcaaggccgaactgggaggaatctccgaactcgcttcagggcctccctag

SEQ ID NO: 135459 - DNA, 1386 bp, synthetic construct
  misc_feature 1..1386: note = Description of Artificial Sequence: Synthetic coding sequence
  source 1..1386: mol_type = other DNA
atggtggtcacacaactcaatctcgaattctgcttccagggcaagaagctacgtggattctcatgcgaactgactcgttccccacacggtgtgctccccgagtctttctttaccataatgtgccaggtggtggttcccattctactgagcggcctgtgtatgatgacagctggtctggttatgaacaccatccagcactggccggtcttcgtggaggtgaaggatttgctgactctggttcctccactggttggcttaaagggaaatctcgaaatgactctggcctcccgtctttccacggcagctaataccggtcagatcgatgatccacaggagcagcaccgagttataagttcaaacctagccttaatacaggttcaggccactgtggttggacttctggcagccgtggcagccctacttctcggcgttgtgtcacgagaggaagtcgacgtagcaaaggttgaattattgtgcgcaagctcagtactcacggcatttctggcagctttcgccttaggcgttctgatggtctgtatagtcataggggcccgtaagctgggagtgaatcctgataatattgccacaccaattgccgcaagcttgggggacttaatcaccctgtctatcctggcacttgtgtcatcattcttctacaggcacaaagattcacgctatctcacacctctggtgtgcttgagcttcgccgctttgacacctgtctgggtgctgatcgccaagcagtcaccgcccattgttaagatactgaaattcgggtggtttccaatcatcctggccatggttatcagtagctttggaggcttgatcttatcgaagacagtgagtaagcagcaatacaaaggcatggctattttcacacccgttatttgtggcgtgggggggaacctggtggctattcagacctcgagaatttctacttacctgcacatgtggtctgctcccggggttcttccactgcagatgaaaaagttttggcccaacccttgctccaccttttgcacgagtgaaattaacagcatgtctgcccgcgttctccttctacttgtggtgcctgggcaccttatttttttctacatcatatacctggtcgaaggccagagtgtgataaacagtcagacatttgtcgtgctgtatctcttagccggcttaattcaggtgactatcctgctgtatctggctgaggttatggtaagactcacttggcatcaggcgttggacccggacaaccattgcattccatacttgacaggccttggcgacctcctgggtactgggcttctggccttatgcttctttacagattggttgctgaaatctaaggctgaattaggcggaataagtgagctggcatctggtccaccctag

SEQ ID NO: 135460 - DNA, 1437 bp, synthetic construct
  misc_feature 1..1437: note = Description of Artificial Sequence: Synthetic coding sequence
  source 1..1437: mol_type = other DNA
atggatggtaccgagacgcgacagcgccggctggattcgtgcggtaaacccggcgagctgggattgccacatcccttgagtacagggggcctccctgtggcatccgaagatggtgccctccgggcccctgaaagtcagtccgtcactccaaagccactggaaacagaaccgtctcgggtgacagttcccttcatgttcgccggactggggctttcctgggccggtatgctgctggactacttccagcattggccggtgttcgtagaggttaaagacttgctgaccttagtgcccccgttggtagggctcaagggcaatcttgaaatgaccctggcttcgaggctgtctactgcggcaaacacagggcagatcgacgatccccaggagcagcatcgggtcatttcgtccaatctcgctctgatccaagttcaggccaccgttgtgggcctcctcgccgcggtagcagccctgttgcttggcgtcgtatcaagggaagaggtggacgtcgctaaggttgagctcctgtgtgcttcttctgtgcttactgcctttttggcggctttcgctctgggtgtactgatggtatgtatcgtcatcggggcacggaagttaggcgtgaaccctgacaacatcgcgacacctatagcagcatcactgggggatttgattacactgtccatcctcgccctggtgtccagcttcttctaccggcacaaggatagtcgatacctcacccctttggtctgtctctcctttgctgccctcactcctgtgtgggtcctgattgccaagcagagtcccccgattgtcaaaatcttgaagtttggatggttccccattatcctggccatggtaatctcttcgtttgggggcttgattctcagcaagaccgtctccaagcagcagtataagggcatggccattttcacccctgtgatttgcggcgtcgggggaaatcttgtggcgattcagacaagccggattagtacttacctgcatatgtggtctgcacccggagtgttgcccctgcaaatgaagaagttctggccaaatccatgtagtacattttgtacctctgaaattaactctatgagtgctcgggttttgttactgttggtggtgccgggtcacctaatatttttctatatcatatatctcgtggaaggccagtcagtgatcaatagccagacattcgtggttctctaccttctcgcagggcttatccaggttaccattctcctctatttggctgaggtgatggttcgactaacttggcaccaggctcttgaccctgataatcattgtatcccttatctgaccggattgggggacctgctggggacaggtctcctggctctgtgtttctttaccgattggttgctcaaatcgaaagctgaattgggtggtattagcgagctcgccagcgggcctccatag

SEQ ID NO: 135461 - DNA, 459 bp, synthetic construct
  misc_feature 1..459: note = Description of Artificial Sequence: Synthetic coding sequence
  source 1..459: mol_type = other DNA
atggatggcacagagacacggcagcggcgtttggacagctgtggtaagccaggagagctaggcttgccccaccctctgtcaactgggggtcttcctgtcgcctcagaagacggggctctgcgggctcccgagtcacaatctgtgacccccaagcccttggagacagagcccagccgagagacgacatggtcaattggcctgcaggtcacagtcccattcatgttcgctggcctgggactgagctgggctggcatgctcctggattattttcagcactggccagtgttcgtggaggtaaaagatctgttaaccctggtcccccccttagtggggctcaagggcaatttggagatgaccctggcatcgagactgtccaccgccgccaatacagggcagatcgatgatccgcaggagcagcatcgagtgatcagctcaaaccttgcactcatacaagtctag

SEQ ID NO: 135462 - DNA, 459 bp, synthetic construct
  misc_feature 1..459: note = Description of Artificial Sequence: Synthetic coding sequence
  source 1..459: mol_type = other DNA
atggacggcacagagacacgccaaaggaggttggactcgtgtggtaaacccggggaattgggactaccgcatcccctttccactggcggcctgcccgtggcgagcgaagacggagccctaagagcaccggagagtcagtcggttactccgaagccacttgaaaccgagcctagtcgtgagaccacgtggtctattggcctccaggtcaccgtgccattcatgttcgcgggcctgggcttatcctgggccggcatgctactcgactatttccagcactggccggtttttgttgaggttaaggaccttctcaccttagtgccaccgctcgtgggtctgaaggggaacttggagatgacgcttgcgtcacgcctcagcaccgctgcgaacacaggacagatcgacgaccctcaggagcagcatcgagtgatttcctcaaacctcgcactgattcaggtttag

SEQ ID NO: 135463 - DNA, 261 bp, synthetic construct
  misc_feature 1..261: note = Description of Artificial Sequence: Synthetic coding sequence
  source 1..261: mol_type = other DNA
atggacggaacagaaaccagacaacgcagactcgactcctgtggaaagcctggggaactggggctgccacacccattgagcactggagggctgcccgtcgctagcgaggatggggctctaagggccccagaaagccaaagcgtaaccccaaagcctctcgagacagaaccatccagagaaactacatggtcgataggattacaagtgacggtcccttttatgtttgccggactgggactatcatgggccggcatgctatag

SEQ ID NO: 135464 - DNA, 606 bp, synthetic construct
  misc_feature 1..606: note = Description of Artificial Sequence: Synthetic coding sequence
  source 1..606: mol_type = other DNA
atggatgggacagaaacacggcagaggcggcttgactcatgtggcaagcccggtgaactgggtctgccccacccattaagtaccgggggcctcccagtcgcttccgaggacggagctctgagggcccctgaatcccagtccgtcactccgaaaccgctcgaaactgagcctagtcgggaaacaacctggtctatcggcctgcaggtcaccgtgccgttcatgtttgctggactgggcctgtcttgggccggcatgctgcttgattactttcagcactggcctgtgtttgttgaggtgaaggatctgctgactctggtgccacccctggttggcctgaaaggcaatctggaaatgacgctggcctctcgtttgagcacagctgccaataccggacaaattgatgatccacaggaacaacatcgggttatctcttccaatctggctctcatccaagtgcaggccaccgtggtgggcctactggctgctgtcgccgcgctcctgttaggagtggtgagtcgagaagaggtcgatgtggccaaagtcgagttgctctgcgccagcagtgtgcttaccgcattcttggccgcttttgcactcggagaatag

SEQ ID NO: 135465 - DNA, 414 bp, synthetic construct
  misc_feature 1..414: note = Description of Artificial Sequence: Synthetic coding sequence
  source 1..414: mol_type = other DNA
atggatggcaccgaaactagacagaggagactcgatagctgcggcaaaccaggggagctgggcctcccacatcccctgagcactggtggcctccccgtagcgagcgaggatggggctctgcgggcccccgaaagccagagcgtgactcctaagccactcgagactgaaccatcacgcgagactacttggagcattggcctgcaggtgactgtcccttttatgttcgctggattaggcctgtcctgggcaggcatgctcctcgattactttcaagcgaacaccgggcaaatcgatgacccccaggagcagcacagggttatctcctcaaacctcgcattgatccaagtacaggccactgtggtaggtctgttggcagccgtggccgccctactgttaggggtggtgagcagatag

SEQ ID NO: 135466 - DNA, 459 bp, synthetic construct
  misc_feature 1..459: note = Description of Artificial Sequence: Synthetic coding sequence
  source 1..459: mol_type = other DNA
atggacggcaccgagacgaggcagcggcggctggactcctgtggcaaacctggggagctcggactgcctcaccctttgtcaacaggcgggcttcctgtcgccagcgaagacggcgccctcagggcgcctgaaagccagagcgttacacccaagcccttagagaccgaaccgtccagagagactacctggagcattgggttgcaggtcacagtacctttcatgttcgcgggcctgggattatcctgggcaggcatgctgctagattacttccagcactggcctgtgtttgtagaggttaaggacctactgacactagtgcctcccctggtgggtctcaaaggaaatttagaaatgactctcgcttcacgactttccacagctgccaacacagggcagatcgacgatccacaagagcagcacagagtgatctcctcaaacttagcgctgatccaggtgtag

SEQ ID NO: 135467 - DNA, 1680 bp, synthetic construct
  misc_feature 1..1680: note = Description of Artificial Sequence: Synthetic coding sequence
  source 1..1680: mol_type = other DNA
atggcccctaccctgcagcaagcatatcgtcgccggtggtggatggcctgtacagcagtgcttgagaacctgttcttcagcgcggtgcttctgggctggggcagtctgctgatcatccttaaaaatgaaggcttttattcttctacctgtcccgcagaatccagcacgaacaccacccaggacgagcaacgcaggtggccggggtgcgaccagcaagacgagatgctgaatctaggatttactattgggagctttgttctgtcagccacgactttgccattaggaattctgatggacaggttcggtccacgacccgtgaggcttgtaggatctgcctgtttcacggccagctgcaccctgatggctctggcctccagggacgtggaggccctttctccactcattttcctggcactatccctgaacggtttcggcggtatatgcttgacttttacaagtctgaccttgcctaatatgtttgggaacctgaggtccaccctgatggcacttatgattggctcctacgcaagttccgccattacctttcctggtatcaaactcatatacgatgccggtgttgctttcgtcgtgatcatgtttacatggagcggcttggcctgcctaatttttctcaactgcacccttaattggcccatcgaagcatttcctgctccagaagaggttaattacacaaagaaaattaaactgtcggggctggcgctggatcacaaagtgaccggcgatctcttttacacccatgtgaccacgatggggcagcggctctctcagaaggcaccgtccctcgaggacggcagcgatgcctttatgagcccacaggacgtgaggggtacatccgaaaaccttcccgagcgcagcgtccctctgagaaagtccctgtgcagtcctaccttcctgtggtcactgttaaccatgggtatgacgcagctgcggatcatcttctacatggccgccgtaaacaagatgctggaatacctggtcacaggcggtcaggaacacgagacaaatgagcagcagcagaaggttgcagaaaccgtgggattctacagcagcgtcttcggggcaatgcagctgttatgtctccttacttgccctctcattggatacataatggattggagaatcaaagactgcgtggatgcccctacacagggtaccgtactgggcgacgcgcgcgacggagtcgccacgaaatccataaggccgcgctattgcaagattcagaaactgacgaacgcaatttctgcctttacacttaccaatcttcttttagtgggtttcggaattacgtgccttatcaacaacttacatctccaatttgtgacctttgtactgcacaccatagtaagaggttttttccatagcgcctgtggtagcctgtatgcagctgtttttcccagcaaccatttcggaaccttgacgggactgcagagccttatatcggccgtcttcgccctattgcaacagccactttttatggccatggtgggacctttgaagggcgaaccattctgggtgaatctggggctgctgctcttttcacttctgggttttttgctaccctcctacctgttctactatcgggcacgactgcagcaggagtatgccgctaacggcatggggccccttaaggtgttgagcgggtctgaggtcaccgcgtag

SEQ ID NO: 135468 - DNA, 1680 bp, synthetic construct
  misc_feature 1..1680: note = Description of Artificial Sequence: Synthetic coding sequence
  source 1..1680: mol_type = other DNA
atggcccctacacttcagcaggcatatagaaggcgctggtggatggcctgcaccgctgtgctggaaaacctgtttttcagtgcagtcctgctgggttggggttcgttattgatcatccttaaaaacgaagggttctactcctccacctgtcccgcagaatcatcgacaaataccacacaagacgagcaacggaggtggccaggctgtgaccagcaggatgagatgctgaatttaggcttcacaattgggagtttcgtccttagtgccacgacgctgcccctggggatcctgatggaccgcttcgggcctagacctgtgagattagtagggtctgcctgttttaccgcgtcttgtacgctgatggctctcgcctcccgggacgtggaagctctcagccctctcatttttctggcgctcagcctgaacggttttggcgggatctgcctgacgttcacctcactgaccttgccgaacatgtttggtaacctgcgcagcacattaatggcgcttatgatcgggagctacgcttcatcggctatcaccttcccaggcattaaactcatttacgacgctggggtggcgttcgtggtcattatgttcacttggtctggactcgcatgtttgatctttttgaactgcacccttaactggccaattgaggcatttcctgctccggaagaggtgaattacaccaagaaaatcaaattatcagggttagctctagaccataaggtcactggtgaccttttctatacacatgttacgacaatgggtcagcgtctctctcagaaggcaccatctctggaggatggtagcgatgccttcatgtccccccaggacgtgcgggggacctctgaaaatttacccgaacgttctgtccccttgcggaaatcactttgctcgcctacttttctttggtccttgctaacaatggggatgacgcagttgcggatcatattttatatggccgctgtcaacaaaatgctggagtacctggtcactgggggccaagagcacgaaactaacgaacaacaacagaaagttgcggagaccgtggggttctattctagtgtcttcggagctatgcagctgttgtgtcttttgacatgcccgctgatcggctacatcatggattggcgtattaaagactgcgtggatgcccccacccagggaaccgtcttgggcgacgcaagggatggggtagccacaaagtcaatacggcccaggtattgcaagatccagaagctgacaaacgccatatccgccttcaccctcaccaatttgcttttagtcggcttcgggatcacatgcttgattaacaaccttcatctgcagttcgtgacatttgttttacatacaatagtaagagggttcttccattctgcttgtgggagtctctatgccgccgtcttcccttctaatcacttcggcacacttaccggccttcagtcactcataagtgccgtgtttgccctgttgcagcaacctctgtttatggcgatggtgggcccccttaagggtgaaccgttttgggtaaacctgggtcttctccttttctctctgctgggattccttctgcctagctatctgttttattaccgggcaagactccagcaagaatacgccgccaacggcatgggacctttaaaagtcttgtctggaagcgaagtcacagcttag

SEQ ID NO: 135469 - DNA, 333 bp, synthetic construct
  misc_feature 1..333: note = Description of Artificial Sequence: Synthetic coding sequence
  source 1..333: mol_type = other DNA
atggccccaacattacaacaggcctaccggcgccgatggtggatggcgtgtaccgctgtgttagagaacctctttttctctgcggtgttgctgggctggggtagcctattgataatactgaaaaatgaggggttctattcctccacctgtccagcagagtccagcactaacacaacacaggatgagcagaggcgttggcctggttgtgaccagcaggacgaaatgttgaacttgggcttcacaataggtagctttgtgctatctgcgactaccctacccttaggaatccttatggaccgctttgggccccgccctgtgaggctggttggttag

SEQ ID NO: 135470 - DNA, 1710 bp, synthetic construct
  misc_feature 1..1710: note = Description of Artificial Sequence: Synthetic coding sequence
  source 1..1710: mol_type = other DNA
atggcccccaccctagccaccgctcaccggcgccgatggtggatggcttgcaccgcagtactggaaaatctgttgttcagtgcggtgctgctcggttggggttcacttctcattatgctcaagtcggagggtttctacagctacctgtgtacagagcccgagaatgtcacaaatgggacagtgggcgggaccgctgagcctggccacgaagaggtgtcatggatgaatggatggctctcatgccaagctcaggatgaaatgttgaacttggcctttactgtcggatccttcctgctcagcgccatcacccttccacttggaatcgttatggataaatacggccctagaaagctgaggctcctgggctcagcatgttttgccgtgtcttgtctcctcattgcttacggagccagcaaacccaacgctctctctgttctgattttcattgcactggcactgaatggctttgggggtatgtgcatgacgttcacgagcctgacgctgcccaacatgttcggcgatctacggagcaccttcattgccctgatgatcgggtcttatgcgtccagtgccgtcaccttcccaggtatcaaactcatttacgacgctggcgtctccttcatcgttgttctggtggtgtgggccggctgttccggtctggtctttctgaactgtttcttcaactggcctcttgaaccatttccaggcccggaagatatggactacagtgtcaaaattaagtttagctggttgggctttgaccacaagattacaggtaaacagttctacaaacaagtaaccaccgttggccgaaggctgtccgtgggtagttccatgagatctgctaaggagcaagtagccttacaagagggccacaagctgtgccttagcactgtggacctggaagtgaaatgccaacccgacgccgcggtagctccttccttcatgcattcggtattcagccccatcctcctgcttagccttgtgaccatgtgcgtgacccagctgagattaatcttctacatgggcgcgatgaataatattctgaagttcctggtgtccggtgatcaaaaaacagttggactgtatacttccattttcggggtcctgcaactcctttgcttattgactgcccccgtgattggatatataatggattggaggttgaaggaatgcgaggacgcaagcgaagaaccagaggagaaagatgccaatcagggagagaaaaaaaaaaagaaacgcgacaggcagatccaaaagatcacaaacgccatgcgagcattcgcattcactaacctgctgctcgtcggattcggcgtaacctgtctgattccaaacctgccccttcagatcctctctttcatcctgcacacaattgtccgaggattcattcattcagctgtggggggcctgtacgccgcagtgtacccatcaacccagtttggttctctgactgggcttcagtccttgatcagcgctcttttcgcactgctgcaacagccgttgtttctggccatgatgggtccactgcagggcgatccgctgtgggtgaacgtgggccttttgttactgtcgctcctcggcttctgcctgcctctctatttaatctgttaccgcaggcagttggaacgccagctgcaacaaaggcaggaggacgataagctgttcctgaaaattaacggatcctcaaaccaggaggctttcgtgtag

SEQ ID NO: 135471 - DNA, 1722 bp, synthetic construct
  misc_feature 1..1722: note = Description of Artificial Sequence: Synthetic coding sequence
  source 1..1722: mol_type = other DNA
atggcacccaccctggccactgcgcaccgaagacgatggtggatggcctgtacagctgtactggagaacctgttattctccgctgtcctcctgggatggggtagcctcttaatcatgttgaagtccgagggattctacagctatttgtgcacagagcctgagaatgtgaccaacggaaccgttggcgggactgccgaacctggacatgaagaggtgtcttggatgaatggatggttgtcatgccaggcacaagacgagatgctgaacctggccttcaccgttggcagtttcctactcagtgcaatcacactgcctctagggatcgtgatggataagtacggtcctcggaaactgcgtctcttaggctctgcttgcttcgccgtgtcctgcctgctgatcgcatacggcgctagcaaacctaacgccctctccgtgctgatttttattgctttggccctgaacggctttggcggcatgtgcatgacattcaccagcttgactctgcccaatatgttcggtgatttacgcagtacttttatcgcgctcatgatagggagctacgcctccagtgctgtgacttttcctggcattaagttgatctacgacgccggagtgtccttcatagtagtcttagttgtctgggctgggtgcagcggccttgttttcttgaattgtttttttaattggcctcttgaaccctttcccgggccagaggatatggattactctgtgaaaatcaaatttagttggctggggtttgatcacaaaattaccgggaagcagttctacaagcaggttaccacagtggggagaaggttaagcgtgggtagctctatgagaagtgccaaagagcaggtcgctctccaggaagggcacaagctatgcctgagtacagtcgacctggaagtcaagtgccagccggacgctgctgtagctcccagttttatgcactcagtgtttagccccattcttctcctgtcactcgttactatgtgcgtcacacagttgcgactgattttctatatgggcgcgatgaataatattctgaagttcctggtgtcaggtgaccagaaaacagcatcctctactgtggggctgtatacaagtattttcggcgtactgcagttgctttgcttgttgaccgcccccgtaattggttacatcatggattggcgcctgaaagaatgtgaggacgcgtctgaggagccagaagaaaaggatgctaaccagggggaaaagaaaaagaagaaacgcgaccgccagatccagaagatcaccaacgcgatgcgagcttttgcatttacaaatctgcttctcgtggggtttggggtgacctgccttatccctaaccttccactgcagattctctcatttatattgcacactattgtccgcggattcatccacagcgcagtgggcggtctgtatgccgccgtttacccctcaactcagttcggtagccttaccgggctgcagagtcttatttcagcccttttcgccctgctccaacaacccttgtttctggccatgatggggcctcttcagggggatcctctttgggttaatgttggcctcctgttattgtcccttttgggtttctgcctgccactataccttatatgctataggcggcagctcgaaaggcaactgcagcaaaggcaggaggatgacaaactgtttctgaaaataaacggctcaagcaatcaggaagcatttgtctag

SEQ ID NO: 135472 - DNA, 1299 bp, synthetic construct
  misc_feature 1..1299: note = Description of Artificial Sequence: Synthetic coding sequence
  source 1..1299: mol_type = other DNA
atgacctatggctctccacaggccaatgcttctccctcggacgctgtagccttggatcacggggaggtatctcgcaggcagcagcaagaactgccgaatatgttcggtgacttgaggtctacctttattgccctaatgattggctcctacgccagttctgcagttacctttcccggtatcaagctgatatatgatgccggcgtgagcttcatcgtagtcctcgttgtgtgggccggatgctcaggccttgtgtttctgaactgttttttcaattggccgctagaacctttccctggcccagaagatatggactactcggtcaaaataaaatttagttggctcggctttgaccataagatcaccgggaagcagttctacaagcaggttacgaccgtgggccggcggctgtcggttggatcttccatgcgaagtgctaaagagcaggttgcccttcaagaagggcataaactttgtctctccactgttgacctggaagttaaatgccaacctgacgccgcagtggcccctagtttcatgcatagcgtgttctctcctatcctcctgttgagcctcgtgaccatgtgtgtgacgcagcttaggcttatcttttacatgggagccatgaataatattttaaaatttctcgtgagcggggatcagaagactgtggggctctacacctcaattttcggagttctgcagctgctgtgcctcctcactgctccagtcattggatatattatggattggcgactgaaagagtgcgaagacgcctcagaggaacctgaggagaaagacgcgaatcagggtgagaagaagaagaagaagagagatcgacaaatacagaaaattaccaacgctatgcgggcctttgccttcaccaacctgttactggtcggatttggtgtgacctgcctgattcctaatctccccctgcagatcctgtcattcattttgcataccattgtgcgcggctttatccattccgccgttggtggactctacgctgcagtctacccctcaactcagttcgggtcactgaccggcttgcagagtttaatcagcgcattatttgccctgcttcaacagccacttttcctcgctatgatgggccctttgcagggagatccactttgggtaaacgtggggttactgctgctatccctgctgggattctgcctccctctctaccttatctgctatcgtcgccagctagaaagacagctgcagcagcgtcaagaagatgacaagctgtttttaaagatcaacggcagctctaaccaagaagcctttgtatag

SEQ ID NO: 135473 - DNA, 1341 bp, synthetic construct
  misc_feature 1..1341: note = Description of Artificial Sequence: Synthetic coding sequence
  source 1..1341: mol_type = other DNA
atgactagcaaggagattatcctgggcctgtgcctccttagcctggtgctttcaatgatattaatggtgattattcgctacatttctcgcgtgctcgtgtggattctgacaatccttgtgatcctcggttccttggggggtactggagtactctggtggctgtatgcgaaacaacggaggtcccccaaggaaactgttactccggagcagttacagattgcagaagacaatctgagggcgctactcatctacgccattagtgccaccgtctttacagtgatcctgtttcttattatgctcgtcatgcgcaagagagtggccttgactattgcactgttccatgtggcaggcaaggtgtttatccacctcccgctgctggtgtttcagccattctggacctttttcgctcttgtattgttctgggtgtactggattatgaccttgcttttcctgggcacaaccggttcccccgtacagaatgaacaaggctttgtggaattcaaaatctccgggcctcttcagtacatgtggtggtatcacgtagtgggcctgatctggataagcgagttcattcttgcctgtcaacagatgactgttgctggggccgtcgtgacctattattttactagagacaaacggaacctgcctttcacccctattcttgccagcgtaaatcggctgataagatatcacctcggaaccgtcgctaagggctccttcattattaccttagtgaaaatcccgagaatgatcttgatgtacatccactctcagctgaaaggaaaagagaacgcctgcgctaggtgcgttctgaaatcctgcatctgctgcctatggtgcttagaaaaatgtctaaattacctgaatcaaaacgcttatactgccaccgcaatcaattccacaaatttctgcacaagtgcaaaggacgctttcgttattttggtggagaacgctctgcgtgtggcaacgatcaatacagtcggagattttatgctgtttcttggcaaggtcttgattgtatgcagtacaggtcttgccggtatcatgttgctgaattaccagcaggactataccgtgtgggtgctgcccctgataattgtctgtctgtttgctttcttggttgcacattgttttctgtccatttacgagatggtggtggatgttctgttcctgtgtttcgctatcgacacaaaatataatgacggaagtcctggaagggaattctacatggacaaagtcctgatggaatttgtggagaactcaaggaaggccatgaaggaggccggcaagggcggcgtggcggattccagggagctcaaacccatgcttaagaaacgctag

SEQ ID NO: 135474 - DNA, 1974 bp, synthetic construct
  misc_feature 1..1974: note = Description of Artificial Sequence: Synthetic coding sequence
  source 1..1974: mol_type = other DNA
atgggctgctgtagttctgcctctagcgcagcccagagctccaagcgagagtggaagcctttggaagacagaagctgtaccgatattccctggctgctgctgttcatcctgttttgtatcggaatgggattcatttgcggttttagcatagccactggtgcggctgccagactggttagcggctacgacagctatggcaacatttgcgggcaaaagaacaccaagctggaagcaatccctaacagcgggatggatcacacacagcgcaagtacgtctttttccttgatccttgtaacctggacctgattaaccggaagattaagagtgtggccctctgcgtcgccgcatgcccacggcaggagctaaaaaccctctctgacgtccagaaatttgctgaaataaatggctctgccctatgttcttataatcttaagccaagcgagtacaccacttctcccaaaagctccgttctgtgccctaagttgccggtgccagctagcgcacctattcccttctttcaccgttgtgcacccgtgaacattagttgctacgctaagttcgccgaagcgctgatcacgttcgtctctgacaatagtgtcctgcaccggctgatttcaggcgtgatgacatcaaaggagatcatcttggggctttgcctgcttagtctggtcctgtcaatgatcctgatggtgatcatccgatatataagcagagtgctagtgtggattctcaccattctcgtcattctcggaagtttaggcggtacaggcgtgctgtggtggctgtacgcgaaacaacgcagatcccccaaagagactgtcacacccgagcagctccagattgccgaggataatctgagagctctgctgatttatgccatttctgccacagtcttcacggttatcttgttccttataatgctggtgatgcgtaaaagagttgctctgacaatcgccctattccacgtggccgggaaggttttcatccatctacctctcctggtctttcagcccttttggactttttttgccttggtactcttctgggtgtattggatcatgacgctgttgttccttggcaccaccggttctcctgtccagaacgagcaggggttcgtagaatttaagatttccgggcccctgcagtacatgtggtggtaccacgtggttggcttgatttggattagcgagttcatcctcgcttgtcagcaaatgacggtggccggggcggtggtcacgtactacttcaccagagataagaggaacctcccctttactcccatcctcgccagtgtcaatcggctgatcaggtaccatctcggcacggtggcaaagggcagctttatcatcactctcgttaaaatccccagaatgatcctgatgtacattcattcccagctgaagggcaaggagaacgcttgcgcaaggtgtgtcttaaaaagttgcatctgttgcttgtggtgtctggagaagtgtctgaattacttgaatcagaacgcatatacagctactgccataaattctaccaacttctgcaccagcgccaaggacgcatttgttatcctggtggaaaacgccttgcgtgttgccaccatcaatactgtgggtgatttcatgctgttcctcgggaaagtcctgatcgtctgtagcacaggtctagccggcatcatgctgctgaactaccagcaggactacaccgtttgggttttacccctcataatcgtttgcctcttcgctttcctggtagcacactgcttcctcagcatctatgagatggtggtggacgttcttttcttatgcttcgctatagataccaagtataatgatgggtcgccgggacgggagttctatatggacaaggtgctgatggaattcgtagagaattcccggaaggctatgaaggaggccggaaaggggggagtagccgattcccgggaactgaaacctatggccagcggtgcctcaagcgcctag

SEQ ID NO: 135475 - DNA, 1959 bp, synthetic construct
  misc_feature 1..1959: note = Description of Artificial Sequence: Synthetic coding sequence
  source 1..1959: mol_type = other DNA
atgggttgctgctccagcgcaagctccgccgcacagagcagtaaaagggagtggaaacccctggaagacaggtcctgtacagatatcccctggttgttgttgttcatcttattctgcatcggcatgggctttatctgcggctttagtattgctaccggcgctgccgctcgcctggtgtccggatacgacagttacggcaacatctgcggacaaaagaatacgaaactagaggcgatcccgaactcaggcatggaccacacccagcggaagtatgtctttttcctggatccatgcaatctagatttgataaatagaaagataaagagcgttgcactgtgcgttgctgcatgtcctcggcaggagttaaaaactctgtcagacgtgcaaaagtttgcagagataaatggctctgcactgtgcagttacaatctgaagccctccgaatatacaacaagccctaagtcgagtgtgctgtgcccaaaacttcccgtgccagcgtctgcccccataccatttttccaccgatgcgcgccagttaatatttcctgctacgcaaagttcgccgaggctctcatcaccttcgtgtcggacaacagcgtcctgcatcgtctcatatctggcgttatgacaagcaaagagatcattctgggtttgtgtctactctccctcgtgctctcaatgatcctaatggtgataattcgctacatctccagggtccttgtgtggatcctcacaatcctggtcatcctgggatcattgggcgggacgggggtactatggtggctctatgccaagcagagaaggagccccaaggaaacagtgaccccagagcagttacagattgctgaggacaacctcagggcactgcttatatacgccataagcgccaccgtctttaccgtgatactgttcctcatcatgctggttatgaggaaacgggtggctcttactatagcattgttccacgtggccggaaaagtgtttatccatttgcccttgttagtgtttcagcctttttggacattcttcgcgctggtcttattctgggtgtactggataatgaccctcctcttcctggggacaacaggctcgcctgtccagaacgagcaggggttcgtggaatttaaaataagtgggccactgcaatatatgtggtggtatcatgtggtgggtttaatctggatttcggaatttatactcgcctgccagcagatgaccgtagccggagccgtggttacctattattttactagggacaaacggaatcttccatttacacctatcctggccagcgtgaatagactgattaggtaccatctgggtaccgtcgctaaaggcagctttattataacgcttgtaaaaatcccgcgtatgatcctgatgtatatccatagccagctgaagggcaaagagaatgcttgtgctaggtgcgtgctgaaaagttgcatctgttgtctttggtgtttggaaaaatgtttgaactaccttaaccaaaatgcatatactgcgacggcaataaactccactaatttttgtacctccgctaaagacgccttcgtaatcttggtggaaaacgccttaagggtggcgacaattaacacagtcggtgattttatgctcttcctcggcaaagtcctgatcgtctgctccactggattggccggtatcatgcttttgaattatcagcaggattatacagtgtgggtcctcccattgatcattgtctgcctcttcgcgtttctagttgcccattgcttcttatcgatatatgaaatggtggttgacgtactctttctgtgcttcgccatcgacaccaagtacaatgacggcagcccaggaagggagttttatatggacaaagttttgatggaattcgtggagaattcgagaaaagccatgaaagaggctggaaaaggcggtgttgctgactcacgtgaattgaaacctatgatcaaatag

SEQ ID NO: 135476 - DNA, 1965 bp, synthetic construct
  misc_feature 1..1965: note = Description of Artificial Sequence: Synthetic coding sequence
  source 1..1965: mol_type = other DNA
atgggctgttgtagctctgcttcgtccgctgcacagagctcgaaaagagagtggaaaccattggaagatcggtcttgcactgacatcccatggctgctgctgtttattttgttctgcatcggaatgggttttatctgcggattctctatcgccaccggagctgcggcaagactcgtaagcggctatgattcctacggtaacatctgcggtcagaaaaatacaaagctcgaggctattcccaattcaggaatggatcatacccagagaaaatatgtgttttttttagatccctgcaacctggacctgattaatagaaagatcaaaagcgtggccctgtgtgttgccgcttgtcccagacaagaattgaaaacacttagcgatgtacagaagtttgcggagattaacggctctgctctttgttcatataatctcaaacccagcgagtatacaacttctccaaaaagttccgtactctgccctaaactgcccgtgcctgcgtctgcacccattcccttttttcataggtgcgctcccgtaaatatctcatgttacgccaagtttgccgaggctttgattactttcgtctccgataatagtgtcttgcatcgcctcatcagtggagtcatgacgtccaaagaaatcatccttgggctgtgtctgctcagcctagtcctttcaatgattctgatggtgattattcgctacatcagtcgtgtgctggtttggatcttgactatcctggtgattttggggagccttggcggcactggtgtgctctggtggctgtatgctaagcagcggcgttctccaaaagaaacagtgacacctgagcaactgcagatcgccgaggacaatctgagagccctcctgatctatgcaatatcagccactgttttcaccgtgatcttattccttatcatgctggttatgcgaaagcgggtcgcccttaccatcgccttgttccatgttgccggtaaggtgttcattcacctgcccctcctggtcttccagcccttctggaccttcttcgccctagtgttgttttgggtgtattggattatgaccttgctattcttgggaaccaccggaagtcctgttcagaatgaacaaggattcgttgagttcaaaatttcgggacctttgcaatacatgtggtggtatcacgtggtcggcctgatctggatttctgagttcatcttggcttgtcagcaaatgacagtagctggagcagtcgtaacgtattactttacccgggacaagcggaatttgccatttaccccaatactggccagtgtgaacagactcatcaggtatcatcttgggacagtcgccaaaggcagtttcattattaccctcgtcaaaatacccaggatgatactgatgtacatccattcccagctcaaaggtaaagagaacgcgtgtgctcggtgcgtactgaagtcctgtatctgttgcctgtggtgcctggagaaatgcctcaactatctgaatcagaatgcctacacagcgaccgcgattaactccacaaatttttgcacgagtgcaaaggacgcattcgtgatcctcgtcgagaacgccttgcgcgttgctacaatcaatacggtgggagacttcatgctgttcctgggaaaggtcctcatagtgtgctctaccggcctcgccggcattatgctgctgaactaccagcaggattacactgtttgggtgctcccacttataatagtgtgtttatttgcttttctcgtggctcactgttttctgagcatctacgaaatggtggtagatgtcctgtttctttgctttgctatcgacacaaaatacaatgatggtagtccaggccgggagttttatatggacaaagtgcttatggaattcgtggagaattctcgaaaagctatgaaggaggccggcaaagggggtgtcgcggattctcgggagctcaaacctatgctgaaaaagagatag

SEQ ID NO: 135477 - DNA, 1974 bp, synthetic construct
  misc_feature 1..1974: note = Description of Artificial Sequence: Synthetic coding sequence
  source 1..1974: mol_type = other DNA
atgggttgctgctcaagcgccagtagcgctgcccagagttcgaaacgtgagtggaagcctctcgaagacagaagctgtacagacataccttggttactgctgttcatcttattttgtattgggatgggctttatttgcgggttttccatcgcaacaggcgcggctgctcgtctggtctcaggttatgacagctacggtaatatctgcggacagaaaaataccaagctggaagcaatcccaaacagcgggatggaccatacccagagaaagtatgtgttctttttagacccctgtaatcttgacctcattaacagaaagatcaagagtgtcgccttatgtgtcgctgcctgcccacggcaggagctgaagaccctgtcggatgtccagaaatttgcggaaatcaatggaagtgccctatgctcctataatctgaagccctccgaatacacaacttcccccaaatcgagtgttctatgtcccaagttaccagttcctgctagtgccccaataccattcttccaccgctgcgcacctgtcaatatttcctgctacgccaagtttgctgaagccttgatcactttcgtgtctgataactcagtgctccataggctcatcagcggcgttatgacgagtaaggagattatcctgggtctgtgtctcttaagccttgtgctcagcatgatcttgatggtaataatacggtacatctctagagtcctggtgtggatcttgaccatattggtcatcttgggtagtctggggggtacgggcgtcctgtggtggttgtacgcaaagcagagaagatcgcctaaagaaactgtgaccccagagcagctgcaaattgccgaggataatctccgggcactcctgatttacgccatctccgctactgtgtttactgttatcctgtttctaatcatgctggtgatgagaaagcgtgtagctttaacaatagctctttttcatgtcgctggcaaagtattcatccacctacccctcctcgtgtttcagcccttctggacgttttttgccctcgttcttttttgggtctattggattatgacgctcctgttccttggcacaaccggcagtcctgtgcagaatgagcagggtttcgtggaattcaagattagtggcccattacagtatatgtggtggtaccatgtggtgggactgatctggatcagcgagttcatcctggcttgccagcaaatgaccgtggcaggtgccgtggtgacgtattacttcaccagggacaagcgcaatctgccctttacgccaatactggcttctgttaatcggctgatccggtatcatctgggcacagtggctaagggttccttcattatcaccctcgtgaagatcccacgcatgattctcatgtacatacactctcagctgaaaggcaaggagaacgcttgtgcgagatgcgttttgaagagctgcatctgctgtctgtggtgcctggagaagtgcctgaactaccttaatcaaaacgcctatactgctaccgccattaattcaactaatttttgtacaagtgctaaggacgcattcgtgatactggtggaaaatgcacttcgcgtggctaccatcaacactgtgggtgatttcatgctctttctgggaaaagtgcttattgtgtgttccacaggactggccggcattatgcttctgaattatcagcaagactacactgtttgggtgctccctttgattattgtctgcctcttcgcgtttctggttgcacattgcttcctgtctatttacgaaatggtcgttgacgtgctgttcttatgttttgccattgacaccaagtataatgacggcagcccaggcagagagttctatatggacaaggttctgatggagtttgtcgagaactcaagaaaagccatgaaagaggccgggaaggggggtgtcgctgacagcagagagcttaaacctatggccagtggggcaagttcagcctag

SEQ ID NO: 135478 - DNA, 2121 bp, synthetic construct
  misc_feature 1..2121: note = Description of Artificial Sequence: Synthetic coding sequence
  source 1..2121: mol_type = other DNA
atgggcgacgagaggccccattactatggtaagcacgggacaccccagaagtacgacccgaccttcaagggccctatctacaatcggggatgcaccgacataatctgttgcgtgttcttgttgctagccatagtgggctacgtggcagtaggcatcatagcttggacgcatggcgatccgagaaaggtgatttatccaactgactcaagaggcgagttttgcgggcagaagggcacaaaaaatgaaaataagccttatctgttttactttaacatagtgaagtgtgcttcacccctggtgctgctcgagtttcagtgccctaccccccaaatctgcgtagaaaaatgcccagacaggtacctcacctatcttaacgcccgtagttcccgcgattttgagtattacaagcaattctgtgtgccaggttttaagaataataagggcgtagcagaggtcctgcaagacggagattgtcctgccgtgcttatcccctccaagccgcttgcaagaaggtgttttcccgccatccacgcatacaagggtgtgctgatggtgggcaatgagacaacctacgaagatggccacgggtcccgcaagaatatcaccgacctggtcgagggagccaaaaaagcgaatggggtcctcgaggcgcgccagctggcaatgcgaattttcgaagattacacggtgagctggtattggattattatcggccttgtcattgcgatggccatgtcactgctctttataattctgcttcgattcctggcaggcattatggtctgggtgatgattatcatggtgatcttggtgctaggctatgggatctttcactgctatatggagtacagcagacttcggggagaagccggctcagacgtgtccctggtggacctgggctttcagacagacttcagagtgtatcttcatctgcggcagacatggctcgcatttatgatcattctctcaattctggaagtcatcatcatactccttttgatttttctgcgcaagagaatcctaatcgctattgcacttatcaaggaggcctctcgcgctgttggttatgtgatgtgcagcctgctttatccccttgtgacttttttcctcctgtgtctttgtatcgcttactgggcatccactgccgtctttctcagcacatctaacgaagctgtgtataaaatcttcgatgatagcccttgtccattcactgcaaaaacatgtaatcctgagacatttcctagtagtaacgaatcaaggcaatgccctaacgcacgctgtcagtttgccttctatgggggcgaaagcggttaccatagggccctgctcggtctgcagatcttcaacgctttcatgttcttttggctggccaacttcgtgctagccctagggcaagtgaccctggccggagctttcgcgagctattactgggccttgaggaagcctgacgatctgcctgccttcccgcttttctcagcgttcggacgtgcacttcgatatcataccgggtctctggcgtttggcgctctgatactggctatcgtccaaataattcgagtgatccttgaatatctggatcagcgcttgaaagcagcggagaacaaattcgccaagtgcctgatgacttgcctcaaatgttgtttctggtgcctggagaaatttattaaatttctgaaccgaaacgcatacataatgatcgccatttacggcaccaatttctgcacctcggccaggaacgctttttttctgcttatgaggaatataataagagtcgcagttttggacaaagtcactgacttccttttccttctcggtaaactgctcatcgttggctccgtcgggattctggcttttttcttttttacacaccgcatacgcatcgtacaggataccgcccccccactcaattattactgggttcctatcttgactgttatcgtgggcagctacctaatagcccacggatttttctctgtctacggtatgtgcgtcgacactcttttcctctgctttctggaagatttggaaagaaacgatggctcggcagagcgcccttactttatgtctagcactttgaagaagctcctgaacaagacaaacaaaaaggccgctgagagttag

SEQ ID NO: 135479 - DNA, 2121 bp, synthetic construct
  misc_feature 1..2121: note = Description of Artificial Sequence: Synthetic coding sequence
  source 1..2121: mol_type = other DNA
atgggggatgagaggccacattactacggcaagcacggaacccctcagaaatacgaccccaccttcaagggtcccatctataaccgcggctgcactgacatcatttgctgcgtttttcttctgctggctatcgttgggtatgtggccgtgggtataatagcatggactcatggcgatcctcgcaaggtgatataccccacggattctaggggcgaattctgtggccaaaagggaacaaagaatgaaaacaaaccatatttgttctacttcaacatcgtgaaatgcgcgagccccctcgtgctgttagaattccagtgtcccactccacaaatctgcgttgaaaagtgcccggacaggtaccttacttacctcaacgcaaggagttcccgagactttgaatattataagcagttctgtgtccccgggtttaagaataacaagggcgttgccgaagttctccaagacggggactgcccggccgttctcatccctagcaagcctcttgcccgaagatgttttcccgcgatccatgcttacaagggggtcctgatggttgggaatgaaacaacctacgaggatggacacggaagccggaagaacatcaccgacctggtagagggtgccaaaaaggctaacggagtgcttgaagcccggcaactggcgatgagaatcttcgaagactataccgtcagctggtactggatcattataggcttggtgattgcaatggctatgtctctcctgtttattatcctgctgcgcttcctggctggtatcatggtttgggtcatgataatcatggttatcctcgtactgggatacgggatctttcactgctacatggaatattctaggctgcgtggcgaagccggcagcgacgtatccctggtggacttgggcttccaaacggattttcgggtgtaccttcacttgcgccagacctggctggcttttatgatcattttgtccatcttagaggtgatcatcattctacttcttatctttctgagaaagaggattcttatcgccatcgcactcattaaggaagccagcagggctgttggctatgtgatgtgttccctcttgtaccctctcgtcaccttctttcttctgtgtctctgcatcgcctactgggcctccaccgccgtttttctctctacctctaatgaagccgtctataagatttttgatgatagtccctgcccattcaccgcaaagacatgtaatcccgagacattcccgtcaagcaacgaatctcgccagtgcccaaatgcccggtgccagtttgccttttacgggggtgagtccggctatcacagagctttgctaggcctccagattttcaatgcttttatgttcttttggctggctaactttgttttggctctaggccaggtaacactggctggcgcatttgctagctattattgggcgctgaggaagccagatgatcttcccgcttttcctctcttttcggcctttggccgcgccttgcgataccacacaggatctttggcctttggggccctcatactggccatcgttcagatcataagagtaattctggagtatcttgaccaacgcttgaaggccgcagagaataagtttgctaagtgccttatgacttgtctgaaatgttgtttttggtgcttagagaaattcataaagttcctgaacagaaatgcttacatcatgatcgctatatacggcacaaacttttgcacttccgccagaaacgcgttctttctgctgatgcggaatattatcagagtcgccgtgctggacaaggttactgacttcctctttcttcttgggaagctcctcatcgtgggatccgtgggcatcctagcatttttttttttcacacaccggatcagaatcgtgcaggataccgcgccacccctcaactactattgggtccccatcctcacagtcatcgttggcagctacctaatagcgcatgggtttttctccgtctacggaatgtgcgttgatacactgttcctctgcttctgtgaggacctagagagaaacgacggatctcaggagcgaccatattttatgtcaccagaactgcgtgatatcctcttaaagggctccgcagaagaggggaagcggtag

SEQ ID NO: 135480 - DNA, 2115 bp, synthetic construct
  misc_feature 1..2115: note = Description of Artificial Sequence: Synthetic coding sequence
  source 1..2115: mol_type = other DNA
atggaagatgaaaggaagaatggtgcctatggcactccacagaagtatgacccaacattcaagggacccatttacaaccgcggctgtacagacatcatttgctgtgtcttcctgcttctggccatcgtaggctacgtggcagtgggaatcatcgcctggactcacggggacccaagaaaggtgatatatcctacagactctcgaggcgagttttgtggacaaaagggaactaaaaacgagaataagccatatctgttttacttcaatatcgtgaaatgtgcatcacctctcgtcctgctggagttccaatgccctactccccagatctgcgttgagaaatgccccgacaggtatcttacctacctgaacgctcgttcctccagggactttgagtactataagcagttttgtgtgccaggcttcaaaaacaacaagggagtggcagaagttcttcaggatggcgattgtccagcggtgttgattccctctaagccacttgctaggcgttgtttcccagccatccatgcatacaagggggtcctaatggttggcaatgagaccacctacgaagatggccatgggagcaggaagaatataaccgatctcgtcgagggcgcgaaaaaggccaacggtgttcttgaggcccggcagttggcaatgcggatctttgaagactataccgtttcctggtactggataattatcggactggtgattgccatggcaatgtcgctcttatttattatccttcttcggttccttgctggaatcatggtgtgggtcatgatcataatggtcatcttggtgcttggctatggtatcttccattgttatatggaatacagcaggctgaggggagaggccggcagtgacgtgtcacttgtggatctggggttccagaccgattttagagtgtacttgcacttgcggcagacttggttagccttcatgataatattgtctatcctcgaggtgatcatcattctgctgctgattttcctccgcaagcggatcttaattgctatcgccctaattaaagaggcaagcagggccgtcggatacgtcatgtgttcactgctgtatcctttggtcactttctttttactctgtctgtgtatcgcgtattgggcgtctactgctgtatttctcagtacctctaacgaagcagtgtacaagatatttgacgatagcccctgcccatttactgccaagacctgtaacccggaaacatttcctagtagtaacgagtctcggcagtgccccaacgcgaggtgccagtttgccttctacgggggcgaaagcggataccacagagctttactggggctgcagatctttaacgccttcatgtttttctggctggccaacttcgttttagcactgggacaggtcactctggccggcgcctttgcttcatactactgggcactgcggaaaccggatgatctcccagcttttccactgttttcagcgttcgggcgagcactcagataccatacgggtagcctcgcctttggtgcactgattcttgccatcgtccagattatccgcgtgattctggagtatctggaccagcggcttaaagccgcagaaaataagttcgctaaatgcctcatgacatgcttgaaatgttgtttttggtgcttggagaagtttatcaagttcctgaatagaaatgcttacataatgattgccatttatggcactaacttttgtacatctgcccggaacgcattcttcctccttatgcgcaacattatcagggtcgctgttctggacaaggtaaccgattttttgtttttacttgggaagctgttgatcgtggggtccgtaggtatactggccttcttcttctttacccacagaatccgcatagtgcaagacaccgcccctccgttgaattactactgggtccccattttgaccgtgatagtagggtcctatctgattgcacacggctttttttctgtctatggcatgtgtgtggacacgctcttcctatgcttcctggaggacttggagcggaatgacggatccgccgaacgcccatacttcatgtctagtactctgaagaagctcctgaacaaaactaataagaaggccgccgagagttag

SEQ ID NO: 135481 - DNA, 1248 bp, synthetic construct
  misc_feature 1..1248: note = Description of Artificial Sequence: Synthetic coding sequence
  source 1..1248: mol_type = other DNA
atgaccggagaacgaccctctaccgccctacccgatcggcgctggggaccccggatcttggggttttggggaggatgccgcgtctgggtctttgcagctatttttcttttgctgtccctggcagcgagttggagcaaagcagagaacgattttggtctggtccagcctctcgtaactatggaacaactgctctgggtgtcaggaagacagatcggttctgtggatacgttccgcatcccattaattaccgccacgccccgaggaacactcctggcatttgccgaagcgagaaagatgtcctcctccgatgagggagctaagttcatcgccctgagacggagcatggatcagggctcaacttggtcacccaccgctttcattgtgaacgacggtgatgtccccgacgggttgaacctgggcgcagtggtgagcgatgtcgagacaggtgtcgtgtttctcttttactcactctgtgcccataaagcaggctgccaagtagctagcaccatgctggtgtggtcaaaggatgacggcgtcagttggagcacccctcggaacctgagccttgatatcgggacggaggtcttcgcccccggcccagggtccggcattcaaaaacagagggagcctagaaaggggcgcctgatcgtgtgtgggcatgggacccttgaaagagacggagttttctgtctcctcagcgatgatcatggggcgtcctggaggtacggctctggcgtgtctggaatcccatacgggcagcccaaacaggagaacgatttcaaccctgacgaatgccagccgtacgagctccccgacggcagcgtagtgataaatgcacggaaccaaaacaactaccactgccactgccggattgtcttgcggtcatacgatgcctgcgataccctgaggcctcgggacgtgacctttgacccagagctggttgaccccgtagtcgcagctggagccgttgtgacaagctcaggaatcgtcttcttctcaaacccagcacatcctgaatttcgggtcaacctgactcttcgctggagtttttccaatgggaccagctggcgaaaggagaccgtgcaactatggcccggaccgagcggttactcctccctcgctacattggaagggagtatggatggtgaggagcaggccccgcagctgtatgtcctttacgaaaagggacggaaccattacacggaatccatatctgtcgccaagatttcagtgtatgggaccttatag

SEQ ID NO: 135482 - DNA, 2007 bp, synthetic construct
  misc_feature 1..2007: note = Description of Artificial Sequence: Synthetic coding sequence
  source 1..2007: mol_type = other DNA
atgggcggtaagcagcgggatgaggatgatgaagcttacggcaaaccagtgaagtacgatcctagttttcggggccctatcaagaaccggtcttgcacagatgtgatatgctgtgttcttttcctgttgttcatactaggctatattgtggtgggtatcgtcgcttggctgtatggcgaccctaggcaggtcctgtatccgagaaacagcactggtgcctactgtgggatgggagaaaataaagacaagccgtacctcttatattttaacatattctcgtgcatcctcagctctaatatcatatccgtggctgagaatgggcttcagtgtcccacccctcagacagtgattacttcgctgcagcaggagctctgtcctagtttcttgctcccttctgctccagctttggggcgctgttttccttggactaacgtcactccaccggctctcccgggcataaccaatgacacaactatccagcaaggaatctccggtcttatcgactcacttaatgcaagggatattagcgtcaaaatattcgaggatttcgcgcagagctggtactggatcctggtagctctgggagtagcgctggttctctctctgctattcatcctgctgctcaggctggtggccggaccactggttctggtcctgatcctcggcgtgttaggcgtattagcttatggaatctactattgctgggaagaatatagagttctgcgcgataaaggcgcctcaatctctcagctgggtttcaccaccaacctgtctgcgtatcagtctgtgcaagaaacctggttggcggctctgattgtcctcgcagtgctggaggctatactgctgctcatgctgatctttctccgccagaggatacggattgctatcgctcttctgaaggaggcaagcaaggccgtcggccagatgatgagcaccatgttttaccccctcgttacctttgtgctgctgctcatttgtatagcgtactgggctatgaccgctctatatctggccacatctggccagccccaatacgtcttgtgggccagcaatattagttcccccggctgtgagaaagtgccaattaacactagttgcaatcccacagcccatttagtaaacagctcttgcccaggcctgatgtgcgtttttcagggatacagttccaagggtcttatccagcgcagcgtgtttaatctgcaaatctacggggtgttgggcctgttctggacattgaactgggtccttgcgctcggacagtgtgtgttggctggagcattcgcgagcttctattgggccttccataagccacaagatatacccacattccctcttatcagtgcttttattcggaccttacggtaccacactgggtcgttagcatttggggcactcatattaacgctagtacagattgctcgagttatactcgaatatattgaccataagctgcgtggggtccagaacccagttgcccgttgcatcatgtgctgttttaagtgttgtctgtggtgcctcgaaaaattcattaaattcctgaaccgaaatgcatacattatgatcgccatttacggaaagaacttctgtgtgtcagccaaaaacgcattcatgctgctcatgaggaacatcgtgagggtggtggtccttgacaaggtaactgacttgctgctgttcttcggtaagctcctcgtggtgggtggggtgggagtactctcattcttttttttcagtggccggattcccggattaggcaaggacttcaagtctcctcaccttaactattactggctgcccatcatgacctctatcctcggtgcgtacgtgatagcctcggggttcttctccgtctttggcatgtgcgttgacaccttgtttctgtgttttctcgaagatctcgagcgcaataacggcagcctagacaggccctactacatgagcaaatcacttctcaaaatactcgggaaaaagaacgaagcccctcccgataataagaagagaaagaaatag

SEQ ID NO: 135483 - DNA, 2133 bp, synthetic construct
  misc_feature 1..2133: note = Description of Artificial Sequence: Synthetic coding sequence
  source 1..2133: mol_type = other DNA
atgggaggcaaacaaagagacgaggacgatgaggcctatggcaaacccgtgaaatatgacccatcctttcgcggcccgatcaagaacaggtcctgtaccgatgttatctgttgcgttttgttcttgctcttcattctgggatacatcgtcgttgggatcgtggcatggctgtatggtgacccacggcaggtcctctatcctaggaactcaacaggggcgtattgcggcatgggtgagaacaaggataaaccatatttgctgtacttcaacatattctcatgcatcctttcgtcaaacattattagcgtggctgaaaatgggttacagtgtcccacaccacaggtgtgcgttagcagctgtccagaggacccttggaccgtaggtaagaacgagttttcccaaacagtgggcgaggtgttctataccaaaaaccgtaatttctgcctccctggcgtgccctggaacatgacagtgattactagcctgcagcaggaattatgtccttctttcttgctgccaagcgcgccggccctcggacgatgctttccctggaccaacgtgacccctccagccctgccaggcatcacaaacgacaccacaattcagcaaggcatcagcggattgatcgatagtctgaatgcgagggatatctctgtcaagattttcgaggactttgcccagagctggtactggatccttgtcgctctaggagttgccctcgttctttccttgctgttcatccttttattacgactggtcgccggtccattagtgctggtgttgatcctgggggtcttgggagtgctcgcatacggaatctattattgctgggaggagtacagagtactgcgggacaaaggcgcctccatctcacaactcggatttacaacgaacctgtcagcctatcagtccgtgcaagaaacctggctggctgccctgatcgtcctggccgtgctggaagctattctactcttgatgttgattttccttcggcaaagaattcggatcgcaatagccctcctgaaggaggcttccaaggcggtcggacagatgatgtcaactatgttttacccactggttacttttgtgctgctactgatttgcatcgcctattgggccatgacagccctctacctggcaacctccggtcagccccagtatgtcctctgggctagtaacatcagctccccggggtgtgaaaaggttcccattaatacgagctgcaatcccacagctcaccttgtcaattccagctgtccgggccttatgtgcgtgtttcagggctattcaagtaagggattgatccagagaagcgtctttaacctgcaaatttatggagtgttggggctcttctggacactgaattgggttctggctctgggacaatgtgtactcgcaggcgccttcgcaagcttctattgggcttttcataagccacaggacatcccaactttcccccttatcagcgccttcattcgaactctccgataccataccggaagtctcgctttcggggccctcattttgacactggtgcagatcgctagagtgattctcgagtatattgatcataagctgcgtggtgttcagaaccctgtggctcgatgcataatgtgttgcttcaagtgttgcctttggtgcttagagaaatttatcaagttcctgaaccggaacgcttatattatgatcgcgatctacggaaaaaatttctgtgtgtcagccaaaaatgcgttcatgttactgatgagaaacatagtccgagttgtagttttagataaggtcactgatctcctcctctttttcggtaaactgctggtcgtggggggcgttggggtcctgagcttcttctttttttctggtagaatacctgggctgggcaaggatttcaagtcaccacacttaaattactattggttgccaatcatgacatctattctcggcgcctatgtgatcgcgtcaggatttttttctgtgttcggaatgtgcgtggatactttgttcctgtgttttctcgaggacctggagcgcaataatgggtcactagatagaccatattacatgagcaagtccctgctgaagattttgggaaagaagaacgaggctccacccgacaacaagaaaagaaaaaaatag

SEQ ID NO: 135484 - DNA, 1236 bp, synthetic construct
  misc_feature 1..1236: note = Description of Artificial Sequence: Synthetic coding sequence
  source 1..1236: mol_type = other DNA
tagagagacgaagatgacgaggcttacgggaaaccagttaagtatgacccatcctttaggggccccattaagaaccggagctgtacggatgtgatctgctgtgtcttatttctgctcttcatactcggctatatcgtggtgggaatagtggcgtggctctacggagacccccggcaggttctctaccccaggaattctaccggtgcatattgtgggatgggtgaaaacaaggacaagccctatctgttgtattttaatatcttctcctgtatcctctcttctaacataattagcgtagctgagaatggcttgcagtgccctactccacaggtgtgcgtgtcatcatgcccggaggacccttggacggtgggcaagaacgagtttagccagacagttggagaggtcttttacacgaagaacagaaacttttgtctccctggggtcccatggaatatgacagttatcacatcactgcagcaggagctctgtccttcgttcttgctgccaagcgcgccagctctaggccgatgtttcccatggacaaacgttactcctcctgccctccctggcattacgaatgataccaccattcaacaaggtatctcagggttgatcgattccctcaacgcccgcgacatatccgtgaagatctttgaagacttcgcgcagtcctggtattggatcctcgtcgctgttggccagatgatgagcacaatgttttacccccttgtgacattcgtgttgctgcttatatgcatcgcctattgggcaatgacagctctgtacctcgccactagcgggcagccccagtatgtattatgggctagtaatatttctagccctggatgtgaaaaggtgcccatcaacacatcctgcaacccgactgcccacctggtgaatagctcctgtcctggtctcatgtgcgtttttcaaggatactcatccaaaggcctaatccagaggtcagtgtttaatctccagatctacggcgtgctgggactgttttggactcttaattgggtcctggcacttggccagtgcgtgttggcaggcgcattcgccagcttttactgggcttttcacaagcctcaggacattccgactttcccactcatcagtgccttcataaggacactccggtaccatacaggtagcttggccttcggcgctctgattcttacgctagtccaaattgctcgtgtgattcttgagtatattgatcataaactgaggtag

SEQ ID NO: 135485 - DNA, 1236 bp, synthetic construct
  misc_feature 1..1236: note = Description of Artificial Sequence: Synthetic coding sequence
  source 1..1236: mol_type = other DNA
tagagagacgaggacgacgaagcctacgggaagcccgtaaagtatgatccaagctttaggggcccaattaaaaaccggtcttgcaccgacgtgatttgctgcgtgctatttttgctctttatcttggggtatatcgtggtgggcatcgtcgcctggctgtacggagatccgcgtcaagttctgtatcctcgtaattctactggcgcctactgcggaatgggcgagaacaaggacaagccttatttactttatttcaacatcttttcatgcatcctgtcctctaatatcatttcagtggcggaaaatggtttgcaatgtccaactccccaggtctgtgtgtcctcatgccccgaggacccttggaccgtcggcaagaatgagttcagccagactgtgggagaggtgttttacactaagaaccgaaacttctgcttgccgggagtcccttggaacatgaccgtgatcacgagcctgcagcaggaattgtgcccctctttcttgttgccgagcgcccctgctctggggcggtgctttccctggaccaatatcactccacccgccctcccaggaatcaccaatgatactacgatccagcaaggcatttctggcctcatcgacagtctcaacgcgagggatatttctgtgaaaatctttgaggattttgcgcagtcttggtattggattcttgtcgctgtcggtcagatgatgtccaccatgttctatccccttgtgaccttcgtcctgctcctaatatgcatcgcttattgggcaatgaccgcactctatttagctacaagcggccagcctcagtacgtcctttgggctagcaacatttccagccctggttgcgaaaaggtccctatcaacaccagctgcaatcccacagcccacttggtgaatagcagttgtccgggcctgatgtgtgtcttccagggctactcatccaagggtctcatacaacggagcgtttttaacctgcagatttacggcgtcctgggtctgttttggaccctcaattgggtgttggctctgggtcaatgcgtgcttgccggtgccttcgccagtttttactgggcatttcacaaacctcaggatattcccaccttcccgttgatatctgcgttcattaggactctgcggtatcatactggtagcttagcatttggagcccttattctgactcttgtccagattgcacgagttattcttgagtatattgaccacaagctgcgctag

SEQ ID NO: 135486 - DNA, 2133 bp, synthetic construct
  misc_feature 1..2133: note = Description of Artificial Sequence: Synthetic coding sequence
  source 1..2133: mol_type = other DNA
atgggaggaaagcaacgagacgaagacgacgaagcatatggtaaacccgtgaagtatgacccctccttcagggggcctattaaaaatagatcttgcaccgacgtcatctgctgtgttttgttcctcctgtttatccttggctacatcgtcgtggggatcgttgcctggctttatggagatcccagacaagtgctgtacccccgcaactccaccggagcttactgtggcatgggtgaaaacaaggataagccttaccttctgtattttaacatcttttcttgtatcctgtcttctaatattatttcagtcgccgagaatggtctgcaatgccctactccgcaggtctgcgtgagcagctgtcccgaagacccctggactgtgggcaagaacgaatttagccagactgtcggtgaggtgttttacactaaaaatcgcaacttctgtctgcccggtgttccatggaacatgaccgtcataaccagtctgcagcaggagctgtgcccttctttcctgctgccatcagctcccgcgctgggccggtgctttccatggactaatattacccctcccgcacttcccgggataaccaacgacaccacaatacagcagggaattagtgggttaattgacagcctgaatgcgcgcgatataagcgtcaagatattcgaggactttgcgcagtcctggtactggattttggtggcactgggagtagcccttgtgctgtcgctgttgttcatcttactgctgcggctggtggctggacccctggttctggtgttaattctcggtgtcctgggagttctggcctacggcatctactattgctgggaggagtatagggttcttcgcgataagggcgcgtcaatcagtcaactcggattcacaactaacctgtccgcttatcagagcgtgcaggaaacatggctggctgctctgatcgtgctggccgtcttagaagcaatcctgctgttagtgctgatcttcctccgccaaaggattaggatcgcaattgcactcctcaaggaggcatctaaagcagtgggccagatgatgtccaccatgttctaccctttagtgactttcgttctcctgctaatctgtatcgcatattgggccatgactgcactgtatctcgctacttctgggcagccccagtatgttctctgggcatcaaacatttccagccccgggtgcgagaaagtacccattaacactagttgcaacccgacggcccatcttgtgaatagcagttgcccgggcctgatgtgcgtttttcagggatattctagcaaaggcctgattcagcggtcagtattcaaccttcaaatctatggcgtccttggtctgttctggacactgaattgggtgctcgccctggggcagtgcgtccttgctggagcatttgcctccttctactgggcgtttcataagccacaggatatccctacattcccacttatctccgcgtttatcaggacactccggtaccataccggcagcttagcttttggggctttgattcttactctcgtccagattgcacgcgtaatcctcgaatatatcgatcacaaacttcgaggcgttcagaatcccgtggcccgttgtatcatgtgttgcttcaagtgctgtctatggtgcctggaaaagtttataaagttcctcaatcgaaacgcatacattatgatcgctatctacggaaagaatttctgcgtgagcgccaaaaacgcattcatgttgctcatgcggaatatcgtcagagtcgtggtcctcgataaggttacagaccttctcctcttctttggcaagctgctggttgtggggggcgtcggggttttaagcttttttttcttttccggtcggattcccgggctaggaaaggactttaagtccccccacctcaattattactggttgccaatcatgaccagcattctgggtgcctacgtcatcgcaagtggcttcttctcagtgttcggaatgtgcgtggacaccctgtttctctgttttttggaggacttagaacgcaataacgggagccttgatcggccatactatatgtctaagagtctgcttaagatcttgggaaagaagaacgaagcacctcccgataacaaaaagaggaagaagtag

SEQ ID NO: 135487 - DNA, 2133 bp, synthetic construct
  misc_feature 1..2133: note = Description of Artificial Sequence: Synthetic coding sequence
  source 1..2133: mol_type = other DNA
atgggcgggaaacaaagggacgaagatgacgaggcctacgggaaacccgtgaagtacgaccctagctttcggggccctatcaagaaccggagttgcaccgatgtcatatgctgcgtcttattcctgttatttatcctcggttacatagtggttggtatcgtcgcatggctgtatggtgatcccaggcaggttctctatcctcgtaatagcaccggcgcgtattgcggaatgggcgagaacaaggacaagccttatttactgtacttcaatatcttctcctgcatattaagctcaaacattatttctgtagcagagaatggactccagtgtccgacaccccaagtttgtgtctcctcttgcccagaagacccttggacagttggaaaaaatgagtttagtcagacggtgggggaagttttttacacaaagaaccggaacttctgtctgccgggcgtgccatggaatatgaccgtgattaccagcctgcaacaggagctgtgtccaagttttctcttgcccagcgctcctgcccttggacgttgctttccctggaccaatattacccccccagctctgccagggattaccaatgacacaacgatccagcaggggataagcgggttaatagatagcctaaacgcacgcgatatctccgtaaagatctttgaggattttgcacagagctggtactggattctggtggcactgggcgtagctcttgtgttatcacttctattcattctgctcctaagattagtggccggtccgctggtgctagttctcattcttggggtgctgggggtgctcgcttacggaatctattactgttgggaggaataccgggttctacgagataagggcgccagtatcagtcagctgggctttactaccaacctgtccgcatatcaaagtgttcaagagacctggttagcagccctcatcgtcttagcagtgctagaagccattcttctgttagttttgatcttccttagacagagaatcagaatcgccatcgccctcctcaaggaggcgtccaaagccgtgggccagatgatgagcactatgttttatcctctggtcacattcgtattattactgatatgcatcgcttactgggctatgaccgccttgtatctggctacctcggggcagccccagtacgtgctctgggcctccaacatcagctctcctggatgcgaaaaagtccctatcaataccagctgcaacccgaccgcccatctggtgaactcttcctgtcctggcctaatgtgtgtgtttcaggggtatagctcaaaagggctaatccagcgctctgtcttcaaccttcagatatacggcgttttaggtctcttctggaccctaaattgggtgcttgcgcttggacagtgtgtgttggcaggagcctttgctagtttctattgggccttccacaaaccacaggacatacccaccttcccactgatttccgcatttattaggaccctgaggtaccacactgggtctttggccttcggagcccttattctaactctggtgcaaatcgcgcgcgtaattctagaatacatcgatcacaaattacgcggcgtacagaaccctgtcgccagatgtatcatgtgctgtttcaaatgttgcttatggtgcctggagaagtttattaagttcctgaatcgaaatgcgtacatcatgatcgccatctacggaaaaaatttctgtgtctcagccaagaacgcctttatgctcctgatgaggaatattgtgcgggttgtcgtgcttgacaaggttacagatctcctgctgtttttcggaaaactgctcgtggtggggggcgtcggagtgctgtccttctttttcttttctggcaggatacccggcctcgggaaagactttaaaagcccacacctcaactactactggttgccaataatgacatctatcctcggagcatatgtgattgcctccggctttttttctgtgtttggtatgtgtgtggacaccttattcctgtgctttctggaagatcttgaacggaacaatggctccttagaccggccatactacatgtctaaaagtctgctcaagatcctcgggaaaaagaacgaggcaccaccggacaataaaaaaagaaaaaagtag

SEQ ID NO: 135488 - DNA, 2133 bp, synthetic construct
  misc_feature 1..2133: note = Description of Artificial Sequence: Synthetic coding sequence
  source 1..2133: mol_type = other DNA
atgggcggtaagcagagggacgaagatgatgaagcttacggaaagcccgtcaagtacgacccatccttcaggggtcctataaagaaccgaagttgcacagacgttatttgttgtgtactctttctcctatttatcttgggttacattgtggtaggtattgtcgcatggctgtatggcgatcctcggcaggtgctctatccgaggaactccaccggggcctactgtggcatgggcgaaaataaagataagccatacctgctatatttcaacatcttctcgtgcatcttgagctccaacatcatctccgtggccgaaaacggtcttcaatgtccaactccccaggtttgtgtttcctcttgccctgaggatccctggacagtgggcaaaaatgagttttcccaaaccgtaggtgaggtgttttataccaaaaaccgcaatttttgtttgcctggcgtgccatggaacatgacggtgattaccagtctccagcaggagctgtgcccttcatttttgctcccatccgcccccgctctgggacggtgcttcccttggaccaacgttactccccccgccttgcctggaattaccaatgacactaccattcaacaaggcatctctggactgatcgatagcctgaatgcccgcgatatctcagtgaagatatttgaagattttgctcagagctggtactggatcctggtcgctctgggggtggcattggtgttatctctgctgttcattcttttgcttagactagtggccggaccccttgtgctggtgcttattctgggagtgctcggagttctggcatacgggatctactactgttgggaagagtaccgagtgcttagggataagggcgctagtatctctcagttggggtttacgacgaatctaagcgcataccagtcagttcaagaaacctggctggctgccctgatcgtgttagccgtactggaagccatactgctgctgatgctcatctttttgcgccagagaatccgcattgctattgctctgttgaaagaggcctctaaagctgtgggacagatgatgagcaccatgttttacccgctcgttacatttgtcttgcttcttatttgcattgcttattgggcgatgactgcattgtatctagcaacctccggccagcctcagtatgtactgtgggctagcaatatatccagtcctggttgtgagaaagtgcccattaacaccagttgcaatcccacagcacatttggtgaactcatcctgtcccggccttatgtgtgtcttccagggatactcgagtaaaggcctgattcagagatcagtttttaacttgcagatttatggtgtactcggtctcttctggacccttaactgggtgttggctctggggcagtgcgtgcttgctggagccttcgcgagtttctattgggcctttcataaaccacaggatatacctacattccctctgatttctgcttttatccgcactctgcggtatcacaccgggtcactggctttcggcgctctgattctcaccttggtgcagatcgcacgggtgatcctcgagtatattgaccacaagctgaggggtgtgcaaaaccctgtggccagatgcatcatgtgctgttttaagtgttgtctatggtgtctcgagaagttcattaaattcttgaacagaaacgcgtatatcatgattgcgatttacggcaagaatttttgcgtttcagccaaaaatgcctttatgctgctaatgcgaaacatcgttagagtggtcgtactggacaaagtgaccgacctgctcctcttctttggaaagctcttggtcgtgggaggcgtaggtgtgttatcttttttctttttctctggaagaatcccgggcctcggaaaagatttcaaatcaccccacctgaactactattggctaccgatcatgacctccattctgggagcttacgttattgcctctggcttcttcagtgtgttcgggatgtgcgtagatactctctttctgtgctttttagaggatctggaacgaaataacggatccctcgacagaccatactacatgtccaagtcattgctgaaaatcttaggcaaaaagaacgaggcaccaccggacaacaaaaagaggaagaagtag

SEQ ID NO: 135489 - DNA, 1236 bp, synthetic construct
  misc_feature 1..1236: note = Description of Artificial Sequence: Synthetic coding sequence
  source 1..1236: mol_type = other DNA
tgacgcgacgaagacgacgaagcctatggaaaaccggtgaaatacgaccctagcttccggggccctatcaaaaataggagctgcacagatgtgatttgttgcgtgctgttcctgctgttcatactcggatacatagtcgtgggcattgtcgcctggctgtatggagatcccagacaggtcctgtaccccaggaactccactggtgcatactgtggtatgggagagaataaagataaaccctacctgctttactttaatatattcagctgcatcctgagcagcaatattatctcagttgccgagaatggactgcagtgtcccacccctcaggtgtgtgtatctagttgtccagaggacccctggaccgtgggtaagaacgagtttagccaaacagtcggagaagtgttctacactaagaatcgtaacttctgcctgccaggagtgccatggaacatgacagtgattacaagcctgcagcaggagctgtgtcccagcttcctcctgccctcagcacccgcactcggacggtgtttcccgtggacaaacgtaacgccccctgcgttgcctggtattacaaatgatactaccattcagcaaggcattagtggactgatcgactcgctgaatgcccgcgacattagcgtcaagatctttgaggattttgcacaatcctggtattggatcctggtggctgtcggccagatgatgagtaccatgttttaccctctagtaactttcgtactgcttctcatttgcattgcctactgggctatgactgccctgtacctcgcaaccagtggtcagccgcagtacgtactttgggcttcaaacatatcctcaccaggctgtgaaaaggtgccgatcaatacgtcttgtaacccgactgcccaccttgtgaattcctcttgtccgggtctgatgtgtgtctttcaggggtactcctctaagggattgatccagagatcagtgttcaacctgcagatctacggggtgcttggactgttctggaccctgaactgggttctggccctgggccagtgtgtgctggctggcgcatttgccagcttttactgggccttccataaaccccaggacatcccaaccttccccctgatcagcgcatttatcaggacattacgttaccacacagggtccctggcctttggggcgctcatcttaaccctggtgcagattgctagggtgatcctggagtatatagaccataagctgcgctag

SEQ ID NO: 135490 - DNA, 1236 bp, synthetic construct
  misc_feature 1..1236: note = Description of Artificial Sequence: Synthetic coding sequence
  source 1..1236: mol_type = other DNA
tgacgcgatgaggatgatgaggcatacggcaaaccggtaaagtatgacccttcttttagaggacccataaagaatagatcttgcaccgatgtgatctgctgcgttctgtttcttctttttattctgggctacatcgtggtcggtattgtggcttggctctatggagaccccaggcaggtgctgtaccctcgaaattcaaccggcgcgtactgcggtatgggagaaaataaagacaagccctaccttctttactttaacattttttcttgcatcctgtccagtaatatcatctctgtggcggaaaacggcctgcagtgtccaactccccaggtatgcgtgagtagctgtcccgaggatccatggactgttggaaagaatgaattctcccagacagtgggcgaagttttctacaccaagaacagaaacttttgcctgccaggcgtcccctggaatatgactgtgatcacatcactacaacaggagctgtgtccctcatttttgctgccctccgcccctgcccttggacgttgcttcccgtggacaaacgtaactccgcctgcattgcctgggattacaaatgacaccaccatccagcagggcatctctggactgattgattctctcaacgctagggatatttccgtgaagatttttgaggactttgcccagtcttggtattggatcctcgtggccgttggtcagatgatgtcaaccatgttctacccgttggtgacctttgtgctgctccttatctgtattgcttattgggccatgactgctctgtatctcgctacatcaggccaaccacagtatgtcctttgggcgagcaacatctccagccccggatgcgagaaagtgccgattaacacctcatgtaaccccaccgcacacctggtgaacagcagctgccccggtctgatgtgtgtgtttcaggggtattcatcaaagggactaatacaaaggtcagtgtttaacctacaaatctatggcgtcctggggttattctggactctcaattgggttctggccctaggtcagtgtgttttggcgggggcattcgcctccttttactgggctttccacaagccgcaggacataccgactttccctctcatcagcgcctttatccgcaccctgaggtaccatacaggatcgctggcttttggagccttgattctcacacttgtgcaaatcgccagggtaattctggagtacatcgaccataagctccgttag

SEQ ID NO: 135491 - DNA, 1236 bp, synthetic construct
  misc_feature 1..1236: note = Description of Artificial Sequence: Synthetic coding sequence
  source 1..1236: mol_type = other DNA
tgaagagacgaggatgacgaagcttacggtaagccagtgaaatacgacccaagctttcgcgggccaattaagaatagaagctgcaccgacgtgatttgctgcgtactgttcctactttttattctgggctatatcgtggttggaatagtggcctggctatacggcgaccccaggcaggtgctgtacccacggaatagcacgggggcctattgtggcatgggggaaaacaaggacaagccttatcttctctatttcaatatcttctcctgcatcttgtcatccaatatcatctcagtggccgagaacggactccagtgccctactccacaggtatgcgtttctagctgtccggaggatccctggacagtgggaaagaacgagttctcccaaaccgtgggcgaggttttttatactaagaatcggaacttctgccttcccggggttccgtggaacatgaccgtgattacaagcctccagcaagagctctgtccttcctttctgttaccttcggcgcctgcactggggcggtgcttcccctggacaaacattacccctcctgccctgccaggcataactaatgacacaactattcaacagggcatctcaggtctcattgatagtctcaacgcaagagatatttctgttaagatcttcgaggactttgctcagtcttggtactggatcctcgtggctgttggccagatgatgtcaaccatgttttatccactggtcacctttgtgttgctgctgatttgcattgcttactgggccatgacagctttatacctagccacctccgggcagcctcagtatgtgctgtgggccagtaatatctctagcccgggttgtgaaaaggttccgattaatacgagttgtaaccccacggcccatctggttaatagctcctgtcccggcctgatgtgcgtgttccaaggttatagctcaaaggggttaatccagcgcagtgtgttcaacctacagatctacggtgtcctcggccttttttggactcttaactgggtgcttgctctgggccagtgtgtcttggccggagccttcgctagtttttactgggcatttcacaagccacaggatattccaacctttcctctcatttccgccttcatcagaacattaaggtaccacaccggatcccttgcattcggcgcactgatcctaacactggtgcagattgcccgcgtgattctggagtatatagaccataagctgcggtag

SEQ ID NO: 135492 - DNA, 2133 bp, synthetic construct
  misc_feature 1..2133: note = Description of Artificial Sequence: Synthetic coding sequence
  source 1..2133: mol_type = other DNA
atgggcgggaagcagagagacgaagatgacgaggcatatggaaaacccgtcaagtacgacccttcctttcgcgggccgatcaagaaccgtagctgtacagatgtgatttgctgcgtgctgttcctgcttttcatactcgggtacattgttgtcggcatcgtagcatggctctacggtgacccccgtcaggtgctgtacccaagaaatagtacaggggcatattgtggaatgggcgagaataaagacaaaccttacctgctatactttaacatcttctcttgcatcttgtcctctaatattatctcagttgctgaaaacggactgcagtgtccaacgccacaggtttgtgtttccagttgccccgaagacccgtggacagttggtaagaatgaatttagccagactgtgggggaagtattctacacgaagaatcgcaatttctgtctgccaggagtgccttggaatatgaccgtaattacttccctgcaacaagagctttgtccctcctttctgctgccgagtgcacccgcccttggcaggtgcttcccttggactaatattacccctccggccctccctgggattactaatgacaccaccatacaacaaggaataagtggcctgatagactctttgaacgcccgtgatatctccgttaagatctttgaggacttcgctcagtcttggtattggattctggtggcattaggggtagcactggtcctgtccctccttttcatcttgctcttgcgattagtggccggccctctggtcctcgttctaattctgggtgtgcttggtgtcctggcttacggtatttattactgttgggaggaataccgagtgctgcgtgacaagggtgccagcattagccagctaggcttcacaaccaacttatcagcctatcagagcgtacaggagacatggctggccgcactgattgtcttggctgtcctggaagccattctcttactcgtgctaatattcttgcgtcagaggattaggattgccatcgcgctgctgaaagaagcttcgaaggcagtggggcaaatgatgagtactatgttttaccccctcgtgacattcgtcctgctgttgatatgtatcgcatattgggcgatgaccgccctatacttggcaacatcagggcagccccagtatgttctctgggccagcaatatttctagcccggggtgcgaaaaagtgcccattaacactagctgtaaccctactgcccaccttgtgaattcgtcctgtccgggactcatgtgcgtttttcaggggtacagcagtaaaggactcatccagaggtcagtctttaatcttcaaatatacggcgttctcggcctcttctggacgttgaattgggtgttagcactggggcagtgtgtactagccggtgcatttgccagcttttactgggccttccacaaacctcaggacatccccaccttccccttaatcagcgcttttatccggaccctccgctatcacactggatcccttgcgttcggcgcattgattctcacactagtccagattgctcgtgttatcttggagtacatcgatcacaaactccggggcgtgcagaatcctgtcgctaggtgtatcatgtgttgcttcaaatgttgcctttggtgtctagaaaagttcatcaagtttctgaaccgaaacgcttacatcatgatcgccatctatgggaaaaacttctgcgtgtctgcaaaaaacgcttttatgctgcttatgcgaaacattgtcagggttgtagttctggataaagtgacggacctgctgcttttttttggcaaattgctggtggtggggggcgtcggagtgttgtcattcttctttttcagcgggcgcatcccaggcctcggtaaagactttaagagtcctcatctgaactattattggctgcctatcatgacatctatcctcggggcctacgtcattgcctccggcttttttagcgtgtttgggatgtgcgtcgatacactcttcctgtgttttctggaagatctggaacgaaataatggaagtctggatagaccgtactatatgagcaaaagcctgttgaagattctgggcaaaaaaaacgaagcaccacctgataacaagaaacgcaaaaaatag

SEQ ID NO: 135493 - DNA, 1236 bp, synthetic construct
  misc_feature 1..1236: note = Description of Artificial Sequence: Synthetic coding sequence
  source 1..1236: mol_type = other DNA
tagcgcgacgaagatgatgaagcatatggaaaacccgtcaagtatgacccatcgttcagaggtccaattaagaatagatcttgtacagatgtaatatgttgtgtgttgttcctcctcttcatcctgggatacatcgtggtgggcattgtggcttggctgtatggagatccacggcaggtgctttatcccagaaattcaacaggggcatattgcggcatgggggagaacaaggacaagccttatctgctgtactttaacattttctcctgcatcctgtcatccaacatcatatctgtggccgaaaatgggttgcagtgcccaacccctcaagtttgcgtatcttcctgccccgaggatccttggaccgtgggcaaaaacgagtttagccaaaccgttggtgaggtgttctacaccaaaaatcggaatttctgcttacccggcgtgccttggaacatgacagtgataacttctctgcagcaagagctgtgcccaagcttcctgctgccgtcagctcctgccctgggtagatgtttcccatggaccaacatcactcccccggccctgccaggaattacaaacgataccactattcagcagggaatctccggtttgattgacagtctgaacgctagggacatttctgtcaaaatattcgaggacttcgctcagtcctggtattggattctggtggcggtgggccagatgatgtcgacgatgttttatccccttgttacatttgtcctgctcctgatctgtatcgcatactgggctatgaccgcattatacctggcgactagtgggcaaccgcaatatgtgttatgggcctccaacatttcttctccaggttgcgagaaagtgcctataaacacgtcatgcaatcccacagctcatctagttaattccagttgccccggcctgatgtgcgtttttcagggctacagctccaaagggttaattcagaggagcgtgttcaatttacagatttatggggtgcttggcctgttttggactctgaattgggtgctggcactggggcaatgcgtgctagccggcgcgttcgccagtttttactgggctttccacaagcctcaggacatcccaacctttcccctaatcagcgcattcatccgaaccctcagataccacacgggatcactggctttcggggctttaattctaactcttgtgcaaatcgctagggttattctggagtacattgatcataagttgagatag

SEQ ID NO: 135494 - DNA, 2133 bp, synthetic construct
  misc_feature 1..2133: note = Description of Artificial Sequence: Synthetic coding sequence
  source 1..2133: mol_type = other DNA
atgggaggaaagcagagagacgaggatgacgaggcctacggaaagccggtgaaatacgatccaagtttcagaggcccgattaaaaacaggtcctgtacagacgtaatttgctgtgtactgttcctgctctttatcctgggatacatcgtggttgggatcgtcgcttggttatacggtgatccgcgccaggttttataccccagaaactccaccggtgcttactgcggcatgggtgagaataaggacaagccctacttactttattttaacatcttcagctgcattcttagcagcaatattataagtgtcgccgagaacgggctccagtgtcccaccccccaggtctgcgttagttcctgtcccgaggacccctggacagtgggcaaaaacgaattctctcagactgtcggagaggtcttctacacaaaaaatcgtaacttttgcctccccggagtgccttggaacatgacagttattaccagtctccagcaggagctgtgtccctcctttctactgcctagcgctccagctctgggacggtgctttccctggaccaatgtaacgccccctgctctgcccggaatcacaaatgacaccaccatccagcagggtatcagcgggctgattgattcactaaacgcgagggatatatctgtaaagatttttgaggactttgctcagtcatggtattggatactggtggcccttggtgtcgctttggtgctgtcacttctgtttatcctactcctaaggctggtcgctggaccgttagttcttgtcctcatccttggcgtcctgggtgtcttggcctatggcatctactactgttgggaggaatatcgtgtactacgcgataagggtgccagcatttcacaattgggattcaccaccaatctgtcagcgtaccagagcgttcaggaaacttggctggcagccctcatcgtcctcgccgtgttggaggcaatcctgctcctgatgttaattttcttacggcaaagaatccgcatcgcgatcgctctactgaaggaagcttcaaaggccgtgggtcagatgatgagtactatgttctatcctttggtaacatttgtcctgctcctgatttgcattgcctattgggccatgaccgcattgtatctggcaacgtctggccagccccagtacgtgttgtgggcatccaatatctcttccccgggctgcgagaaggtccctataaataccagctgcaatcccaccgctcatctggtaaattccagttgccccgggctgatgtgcgtattccagggctactcttcaaagggactcatccagagaagtgtgttcaacctgcagatctacggtgtgcttggcctcttttggaccctgaactgggtgctcgcactaggtcagtgcgtgctcgcgggtgcctttgcaagtttttactgggcctttcacaagccccaagacattcctacttttcccctgattagtgcctttatccgcacacttagataccatactggtagtctcgcctttggtgccctgatcctgactcttgtccagatcgcccgagttatcctggagtatatcgaccataagctgcgaggggtgcaaaaccctgtggccaggtgtatcatgtgttgctttaaatgctgcctatggtgtcttgaaaagttcattaagttcttgaacaggaatgcctatatcatgatcgccatctacggtaagaacttctgcgtgtctgctaaaaatgcattcatgttactgatgcggaatatcgtacgagttgttgtcctggacaaggtgactgacctgctgcttttcttcggaaaattgcttgtcgtaggcggtgtgggagtgctgtctttcttctttttctcgggccggatacctggtctcggtaaggacttcaaaagcccacacctgaattattattggctacctattatgacaagtatcttgggcgcctatgtgattgcaagtgggttctttagtgtattcggaatgtgcgtcgatactctgttcctatgtttcctggaggatctggaacgcaacaacggatctctggacagaccttattacatgtccaaatctttgctgaaaatcctcggtaagaaaaatgaagccccccctgataacaaaaaaagaaaaaaatag

SEQ ID NO: 135495 - DNA, 1236 bp, synthetic construct
  misc_feature 1..1236: note = Description of Artificial Sequence: Synthetic coding sequence
  source 1..1236: mol_type = other DNA
tgaagggacgaagatgacgaagcctacggcaaacctgtaaaatacgatccaagctttcgcggcccaattaaaaacagatcttgtacagatgtgatatgctgcgtgctgtttctcctctttatcttgggatacatcgtggtaggtattgtggcttggctgtacggtgatcctcgccaggtcctctatcctaggaactcgactggcgcatattgcggcatgggcgagaataaggacaagccctaccttctttatttcaatatatttagttgcatcctgagcagtaacattatctcagtggccgaaaacggattacagtgccctacgccacaggtgtgcgtgtctagttgcccggaagatccttggaccgtcggcaagaacgaatttagccagacggttggggaagtgttttacacgaagaatagaaatttttgcctccccggcgtgccctggaacatgaccgtcataaccagtttgcagcaagaactgtgtccatcattcttgctcccaagtgcaccggccctgggaagatgttttccctggactaatgtgaccccccctgccctgcccggcatcacaaacgacactacgattcagcagggcattagtggcctgattgactcactgaatgcgcgggacatttccgttaagatatttgaagactttgcgcagtcgtggtactggatacttgtggcagtcggccagatgatgtccaccatgttttacccccttgtcacgttcgtgctgctcctcatctgcatagcttattgggccatgactgccctgtatcttgccacttccgggcaaccccagtacgtgttgtgggctagcaacatttcctctcccggctgtgagaaagtgcctatcaacacttcttgcaatccaacagcgcatctagttaacagcagctgtcctggtctgatgtgtgtgttccagggctatagctccaaaggcctgatacagcgctctgtattcaacctacagatctatggggtcctcggactcttttggacactcaattgggtgctagcacttgggcagtgcgtcttggctggagcctttgcttccttttactgggcttttcataaaccgcaggacattcccactttcccactgatatcggctttcatccgtacactaaggtatcacacaggctctttggcgtttggcgccctgatactgactctcgtgcagatagccagggtaattttagagtatatcgaccacaagcttaggtag

SEQ ID NO: 135496 - DNA, 1905 bp, synthetic construct
  misc_feature 1..1905: note = Description of Artificial Sequence: Synthetic coding sequence
  source 1..1905: mol_type = other DNA
atgggtgagaacaaggacaagccttaccttctgtattttaatatctttagttgcatattatcatcaaatatcatttctgtagccgaaaatggactccagtgccccaccccacaggtgtgcgtctccagttgtcccgaagacccttggactgtggggaagaatgaattcagccagacagttggtgaagttttctacacaaagaatcgaaatttctgcctgcctggcgtgccatggaacatgacagtgattacatccctgcagcaggaactctgccctagcttcttgctgccgtctgctccagctctggggagatgctttccatggaccaacgtaactcctcccgcactgcctggcatcacaaacgatacgactattcagcagggcatctccggccttattgattccctaaatgccagggacattagcgtcaagatcttcgaggacttcgcgcagtcttggtactggattctggttgccctgggggtcgctttggttctgtctctgctctttatactgctgctgagactggtggctggtcccctggtactggtgttgatcctcggtgtgcttggagtgctcgcttatggcatctactattgctgggaagaatatcgggtactgcgtgacaagggggcttctatatcccagcttgggttcaccacaaacctgtcagcctaccagtccgttcaggagacttggttggcggcacttatagttttggccgttctggaagctattttgttactgatgcttatcttccttcggcagcggatacggattgccatcgctctacttaaggaagctagcaaagcagtaggtcagatgatgtcgacgatgttctatcccctggtgaccttcgttctgctgttgatctgtatagcctattgggctatgacggccctgtacctggctacaagcggacagcctcagtacgttctgtgggcctcaaatatttcttcacctggctgtgagaaggtgcctattaatacctcctgcaatccaaccgctcatctggtgaatagctcatgtccgggattgatgtgcgtgttccagggctacagctccaaagggttaattcagcggtcagtgttcaacttgcagatctatggcgtgctgggactcttctggacgttaaattgggttctcgcactgggtcagtgcgtgttggctggcgcctttgcttcattctactgggcatttcacaaaccgcaagatatccccacatttcccctgatcagcgcttttattcgcacactacgataccataccggatctcttgcatttggtgcactcatcttaactctggttcagatcgcaagagtaatcctggaatacattgatcataagctgaggggcgtgcaaaacccagtggcccgttgcattatgtgttgttttaagtgctgtctttggtgtctggagaaattcattaaattcctgaataggaacgcctatattatgattgcaatttatggcaaaaacttttgtgtttctgcgaaaaacgcttttatgctgctgatgcggaacatcgtccgggtcgtggtcctagacaaagtgaccgacctgctcctgttttttgggaagctgctcgtggtcgggggggttggagtcctctctttttttttcttctctggcaggattcctggtctgggtaaggacttcaaaagccctcacctgaactattactggctgcctattatgacaagtatcttaggtgcctacgtgatcgcatccggcttcttctcagtctttggaatgtgcgtggacactctgttcttgtgttttctggaggatctggaaaggaataacggaagccttgaccgtccatactatatgtccaaatctctgctgaaaatccttggcaaaaagaacgaggcgcctcccgacaacaagaagcgaaaaaagtag

SEQ ID NO: 135497 - DNA, 1905 bp, synthetic construct
  misc_feature 1..1905: note = Description of Artificial Sequence: Synthetic coding sequence
  source 1..1905: mol_type = other DNA
atgggagaaaacaaagataaaccctatctcttgtattttaatatcttctcctgcatcctatcgtccaatatcatctccgtcgctgagaatggtcttcagtgcccaactccccaggtttgcgtatcctcctgtcctgaagacccttggacggtgggcaaaaacgaatttagccagacagtgggcgaggtcttttacacgaagaataggaacttctgcctgcctggggtcccatggaatatgacggtgatcacaagccttcagcaggagttgtgtcctagctttcttctcccaagcgcacccgccttagggagatgctttccatggactaacgtaaccccccctgcacttcctggcatcaccaacgatactaccatccagcaggggatatcaggattgatcgacagcctcaatgctcgcgatattagcgttaagattttcgaagattttgcccaatcttggtattggatactggtcgctctgggggttgctttggtgctttctctgctgttcattcttctcctgcggctggtagctggtcccctcgttctggtgctgattctcggggttctgggagttctggcttacggcatttactattgctgggaagagtaccgcgtgctgcgcgacaaaggagcatctatctctcagctcggatttaccactaatctgtctgcttatcagtccgttcaggaaacatggctagcagcccttatcgtgctcgctgtcctcgaagctatcctcttgctgatgctgattttcctgagacagcggatccgtatcgccattgcactgcttaaagaggcatcgaaagcagtgggtcagatgatgtctaccatgttttaccctcttgtgacatttgtgcttcttctcatttgcatagcttactgggcgatgactgccctgtacttggccacgtcgggacagcctcagtacgtgctctgggctagcaatatttcctccccaggatgcgaaaaagtgccaattaatacatcttgcaaccccactgcacacctggtgaactcaagctgccctggtctcatgtgcgtcttccagggatatagctcaaaggggctcatccagcgctctgtctttaatctgcagatctacggtgtacttggtttgttttggacattaaactgggtcctagccctggggcagtgcgtgctggccggggccttcgcaagcttctactgggcctttcataagccacaagatattccgactttcccactgatttccgcttttatccgaacactccggtaccataccgggagccttgcattcggggctctgattttgaccctcgttcagatcgctcgcgtaatcctggagtacattgatcataaactgcgaggcgtgcagaacccagtcgcccgctgtattatgtgctgctttaaatgttgcctttggtgtttagagaaattcattaaattcctgaaccgcaacgcctacatcatgatcgccatttacggcaaaaatttctgtgtcagtgccaagaatgccttcatgctgctaatgcgcaatatagtcagagtcgtagtcttagacaaagtgactgacctgctgctcttttttggaaaactcctcgtggttggcggcgttggtgtcctttccttctttttttttagcggtcggattcctggcttaggtaaggatttcaagtctccccatctgaactactactggctgcctattatgacctccatcctgggggcttatgtgatagccagcgggttttttagcgttttcggaatgtgtgtagacactctgtttctgtgcttccttgaagacctggaacggaacaacggttccttggatcgtccctactatatgtcaaagagcctgctgaaaatcctcgggaagaagaacgaagcacctccagacaacaagaagagaaagaagtag

SEQ ID NO: 135498 - DNA, 1905 bp, synthetic construct
  misc_feature 1..1905: note = Description of Artificial Sequence: Synthetic coding sequence
  source 1..1905: mol_type = other DNA
atgggggagaataaagacaagccttaccttctgtacttcaacattttcagttgcattttgagtagcaatattatcagcgtcgctgagaatggactccagtgtccaaccccacaggtgtgcgtgtcttcgtgtcccgaagatccttggacagtggggaagaacgagttctcgcagactgtcggagaggtattctatacaaaaaatagaaacttctgcttgcccggtgtaccttggaacatgacggtcatcacgagcctgcagcaggagctgtgtccgagctttctcttgccctccgctcccgccctggggcggtgtttcccctggaccaacattacaccaccggctttgcctggcatcactaacgacactaccatacagcaaggcatttccggactcattgatagcctgaatgctagggacatctccgtaaagatctttgaggacttcgctcaaagttggtattggatcctggtagccctgggggtggctctagtgctgtccctactgtttattctgctgctcagacttgtagctggcccattggtgcttgtacttattctgggagtactcggcgtgctggcttacgggatctactattgttgggaggagtaccgggtgctgagggataagggggcgtctattagtcagctgggtttcaccacaaacctttctgcataccagagcgtgcaggagacatggctcgccgctttaatagtactagcagttttagaagctatcctactgctcgtgttaatttttctcagacagcgtatcagaattgccatcgccctgctaaaggaggcttctaaagcagtcggccaaatgatgtctaccatgttttatcctcttgtgactttcgtcctacttctcatctgtattgcctactgggctatgactgcattatatctggccacgagcggtcaacctcagtatgtgctgtgggcttcgaatatctcaagtccaggatgcgagaaagtgccaattaacaccagctgtaatcctactgcccaccttgtcaattcctcttgcccagggctgatgtgcgtctttcagggatattcaagcaaaggactgattcagagaagcgtttttaacctgcaaatatacggggtgctagggctgttttggaccctgaactgggtgctggccctgggtcagtgcgtgctggctggtgcctttgcctctttctactgggcatttcataagcctcaagatattcctacttttccccttatctccgctttcatacgaaccctgcggtaccacaccggctctctggcctttggtgcactgatactgacactagttcagatcgccagagtgatcctggaatacatcgaccacaagctgagaggggtgcaaaacccagtagctcgatgtattatgtgctgcttcaagtgctgcctgtggtgtcttgaaaagttcatcaagtttttaaatagaaacgcatacattatgattgcgatatacgggaagaacttctgtgtctccgctaagaacgcttttatgctgctgatgcgcaatatcgtacgcgtcgtggtgttggataaggttaccgacttgctgctgttcttcggtaaactgcttgtggtgggaggagtcggggtcctgtctttcttcttcttcagcggtaggatccccgggctaggaaaagactttaaatctccccatctaaattactactggctccccatcatgacttccatcctcggcgcgtacgtgatcgctagcggattcttttccgtgttcggcatgtgcgtcgacacactattcttatgttttctggaggatctcgaacgcaacaatggatctttagataggccctactacatgagcaagtccctgctgaagattctgggaaagaaaaacgaagcacctcccgacaataagaagcgcaaaaaatag

SEQ ID NO: 135499 - DNA, 2007 bp, synthetic construct
  misc_feature 1..2007: note = Description of Artificial Sequence: Synthetic coding sequence
  source 1..2007: mol_type = other DNA
atgggagggaagcagcgggacgaggatgatgaggcatacggcaagccagtcaagtatgacccgagcttccgcggccccatcaaaaacagatcatgtaccgatgtaatatgttgcgttctcttcttacttttcatactgggatatatcgtggtggggatcgtggcctggctctacggggacccgaggcaggtgctgtaccctcgaaatagcacaggagcctattgcgggatgggggaaaacaaagacaaaccttacctgctatactttaacatcttttcttgcatcttgagcagtaacatcatcagcgtggccgagaatggtctccagtgtcctacaccccaaacagtgattacctccctccagcaagagctttgtccaagtttcttattacctagcgcgccagccctaggacgttgtttcccttggactaacatcacaccgcccgccttgcccggaatcacaaatgatactactatccaacaagggatttcaggattgattgattctctgaacgctcgggatattagcgtgaagatctttgaagacttcgcccagtcgtggtattggattctagtcgcgctgggcgttgccctggtgctgagcctcctcttcattcttttgctccggttggtagccggcccgttggttttagtgctgatactcggagtcctgggggtgctggcctatggaatttattactgttgggaggagtacagagttctccgcgataagggcgcctctatatctcaactcggattcaccacaaatttgtccgcctaccaatctgtgcaggagacctggctggccgccctgattgtgctggctgtgttagaagccattctcctgctggttctgatcttcctcagacagcgcatacgtatcgccattgccctgctgaaggaagcatcaaaggcggtcggccaaatgatgagtacaatgttttatcctctggtcaccttcgtgctcttgctgatatgtatagcctattgggcgatgaccgccctatacctggctacctccggtcagccccaatatgtattgtgggctagcaatatcagcagcccagggtgcgaaaaagtgcccatcaacacctcatgcaatcccactgctcacctcgtgaactcgagctgtccaggattaatgtgcgtttttcaagggtattcttccaaaggtctcattcaacggtccgtcttcaaccttcagatttacggtgtcctggggctattctggaccttgaactgggtgctcgctttggggcagtgtgtgctggcaggagcattcgcgagcttctactgggcttttcacaagccccaagacatcccaaccttccccctaattagcgcatttatccggaccctccgctaccacacaggatcactggcttttggagctctcattctcacactagttcagatcgctagggtcatcctggaatatatagatcacaagttaagaggggtgcagaatcccgtggctaggtgcataatgtgctgtttcaagtgctgtctttggtgtctagagaagtttatcaagtttcttaatcgaaacgcgtacatcatgattgccatatacggtaaaaacttctgtgtgtccgcaaaaaatgcttttatgttactgatgagaaacatagtgcgtgtggtggtgttggataaggtgaccgaccttctactgttcttcgggaaattgcttgtggtgggtggggttggggtcctctcctttttcttcttcagcggccggattcccggccttggtaaggacttcaagtcaccccatctcaattattattggctccctatcatgacatctatcctcggcgcttatgtgattgccagtggattcttcagcgtgtttggcatgtgtgtcgacactctttttctctgttttctggaagacctcgagaggaataacggcagcttggaccgtccgtattatatgagtaaatccctcttgaaaatattaggcaaaaagaacgaggctcctccggacaataagaaacgcaagaaatag

SEQ ID NO: 135500 - DNA, 1905 bp, synthetic construct
  misc_feature 1..1905: note = Description of Artificial Sequence: Synthetic coding sequence
  source 1..1905: mol_type = other DNA
atgggggaaaacaaggataagccctatctgctctattttaatatcttctcttgtatcctgagtagcaatatcattagcgtggccgaaaatgggctgcaatgccctacacctcaagtctgtgtgagttcatgcccggaggacccttggaccgtaggcaaaaatgaattttcccagacggtcggcgaggtgttctacaccaagaaccgtaatttttgtctgcctggagttccttggaacatgacggtcatcactagtctgcagcaagagttgtgccctagcttcctgctccctagtgccccggctctcggccgatgttttccctggactaacgtgactccgcctgccttacccggcataaccaatgatacaacgatccagcaaggaatttccggcctaattgacagtttaaacgccagagacatcagcgtgaaaattttcgaggactttgcacagtcgtggtactggatcctggtggcgctgggagtcgctctggttctcagtttgctctttattctcctgctccggcttgtcgcaggtcccctggtgttggtcctgatactgggcgtgttaggagtgctcgcctatgggatctactattgttgggaggagtacagggtactgcgggacaaaggtgcgagtatctcccagctgggctttacaacaaacctcagcgcataccagtctgtgcaggaaacttggctggccgcactgattgttctcgccgttttagaagctattctgcttctcatgttgatttttttgcgtcaacgcatcagaattgccattgctctgcttaaagaagcttctaaggccgttggacaaatgatgagtactatgttttatcccctggtgacttttgtcctgctgctgatatgcatcgcctactgggccatgacggccctgtatctggctacaagcggccagcctcagtacgttctgtgggcctccaacatctcgtctcctggctgcgaaaaagttcctatcaatactagttgcaaccctactgctcatcttgtgaacagctcctgcccagggttgatgtgcgtgtttcaggggtactcatccaagggactgatacaacggtctgtattcaacctccaaatctacggagtgctcggtctcttttggaccctcaattgggtgcttgcgcttggacaatgcgtattagccggcgctttcgccagcttctattgggctttccacaaaccgcaggatataccaacctttccacttatctcggcatttatcagaacattaagataccacaccgggagcttggcttttggcgctctcatactgaccctcgtgcagattgccagggttattctagaatatatcgatcacaagctccgtggtgtgcaaaatcctgttgcaaggtgtatcatgtgttgcttcaaatgttgtctgtggtgccttgagaagttcattaaatttttgaatcgcaatgcatacatcatgatcgcgatttatggcaaaaacttctgcgtttctgccaaaaatgccttcatgctcctcatgcggaacattgtgagagtagtggtacttgataaagttaccgacttactgctgttctttggcaaactgctcgtggtggggggtgtcggggtgctctccttcttcttcttctctggccgtattcccggcctgggaaaagactttaaatcgccccatctgaattattactggctccccattatgaccagcatcttgggagcatatgtcatagcctccgggtttttctcggttttcggaatgtgcgtcgataccttgtttctctgtttcttagaagacttagagagaaataacggttctctcgaccgaccctactatatgtctaagtctctcctgaagatcctcggcaaaaaaaacgaagccccgccagataacaagaagaggaagaaatag

SEQ ID NO: 135501 - DNA, 1905 bp, synthetic construct
  misc_feature 1..1905: note = Description of Artificial Sequence: Synthetic coding sequence
  source 1..1905: mol_type = other DNA
atgggagagaacaaagataagccatatcttctgtactttaatatcttctcttgtatcctgtctagcaatatcatttcagttgccgagaatggactccaatgccccacaccacaagtctgtgtctcttcatgccccgaagacccgtggacggttggcaaaaacgagttctcgcagaccgtgggtgaggtgttctacacgaagaacagaaacttctgtctacctggcgttccctggaacatgacggtgataacctcgcttcagcaggaactgtgcccctcctttctgctcccaagtgcacccgctcttgggagatgttttccttggacaaacgttacacctcccgcactcccaggcatcaccaacgacactacaatacagcagggaatatctggacttattgactcactcaacgccagggacatttcagtcaagatattcgaagatttcgctcagtcttggtactggatcctggtggctctaggcgtggctctggtcctttctttgctctttatactgttacttcggctagtcgcaggtccactggttctcgttctgatcctcggcgttctcggagttctggcgtacggtatctactattgttgggaagaatacagagtgctgcgcgacaagggtgcgtcaatcagccagctgggatttactactaatttaagcgcctaccagtccgtgcaggaaacatggcttgctgcgcttattgtgctggccgtcctggaggcaatactgttgctcatgcttatctttttaaggcagcgtatccgtattgcgatcgccctgctcaaagaagcaagcaaagccgtgggccagatgatgtccaccatgttctacccgcttgtcacattcgtgctgctgctcatctgtatcgcatactgggctatgaccgcactgtacctcgcgacgtctggtcagccccagtatgtcctgtgggcaagcaatattagctcacccgggtgtgaaaaggttccgatcaatacatcgtgcaatccgaccgctcatttggtcaattcttcctgccctggcttaatgtgcgtttttcaggggtattcttcaaaagggcttatccagaggagcgtgtttaacttacagatctatggagtgttaggcctgttctggacacttaattgggtactcgccttagggcagtgtgtgctcgccggggccttcgctagcttctattgggccttccacaagcctcaggacatcccaactttccccctcatcagcgcttttatcagaactctgaggtatcacacaggatcccttgctttcggcgccctcattcttacacttgtgcagatagcacgcgtgatcttggagtacatagaccataagttacgcggcgtgcagaatccggtggcccgctgcatcatgtgctgcttcaaatgctgtttatggtgcctggagaaatttatcaagtttctgaaccgtaatgcctatatcatgattgccatttatggtaagaacttttgtgtgtccgctaaaaatgctttcatgttgctcatgaggaatatcgtgagagtagtcgtcctggacaaggtcacagacttactcctgttcttcggaaaactgttggtggtcggcggggttggtgtactcagtttcttttttttttcaggccgtatccccgggctgggaaaagatttcaaatccccacatcttaattactattggctgcccattatgacgtccattctgggggcctacgtgatcgcctccggatttttttctgttttcggaatgtgtgtggacactttattcctgtgtttcttggaagacctagaacgcaacaatggttcccttgatcgcccctactatatgtctaagagcctactgaagattctggggaagaagaacgaggcgccccccgacaataagaagagaaagaagtag

SEQ ID NO: 135502 - DNA, 2007 bp, synthetic construct
  misc_feature 1..2007: note = Description of Artificial Sequence: Synthetic coding sequence
  source 1..2007: mol_type = other DNA
atgggaggaaagcagagagacgaggatgacgaggcctacgggaaacctgtgaagtatgaccctagcttccggggccctatcaagaatcgttcctgcactgacgtcatctgctgtgttcttttcctccttttcatattgggttatatcgtcgtgggaatagtagcctggctttatggggaccctcgtcaagtcctatatcctcgaaactcaactggcgcatattgcggcatgggagagaataaggacaagccatacttactatacttcaatattttctcctgcatcctttctagcaatattatatcagtcgcggaaaatggcctacagtgccccactccacaaaccgtgattacttctctccagcaggagctgtgccctagcttcctcctaccgtccgcccctgcattgggtcggtgcttcccgtggactaatgtgaccccgccggcactcccagggatcacgaacgatacgacaatccaacagggtatcagtggcctgattgacagcctcaacgctagggatatttctgtcaaaatctttgaggatttcgcccagtcgtggtactggatattggtcgccttaggggttgccctggtattgtcattgctcttcatactgctcttaagactggttgcagggccactggtgttagtgctgattctgggtgttctaggggtcctggcttatggaatttactattgctgggaggagtatagagtccttagagacaaaggtgcttccattagccaactcggctttactacgaacttgtcagcttatcagtcagtccaggaaacttggctcgctgccctcattgtgctggccgtacttgaagctatcctattgctcatgctgatattcctgcggcagcgaataaggatcgctattgcactgctgaaggaggcatctaaggcagtgggccagatgatgagcacaatgttctacccacttgtgacttttgtactgctgcttatctgcatagcttattgggctatgacagccttgtatctcgctaccagcgggcaaccacagtacgtactgtgggcctccaatatttcctctccaggatgcgagaaagtaccgatcaatacttcttgtaatcccactgcacatcttgtaaacagttcctgtccaggattgatgtgtgtatttcaagggtatagttcaaaaggcctcatacagagatccgtgttcaaccttcagatttacggcgttctggggctcttttggaccctgaactgggttctggctctgggacagtgcgtgctggctggagccttcgccagtttctactgggcatttcacaaaccacaagacataccaacttttcccctgatttctgcttttatacgcactttgagatatcacaccggctcactcgctttcggggctctgattctgactcttgtgcagatcgcccgtgtgattttggagtacatcgatcacaaactgaggggcgtgcagaatcccgtggcgagatgcataatgtgctgttttaaatgctgtttgtggtgtctggagaaattcataaaattcttgaaccgtaatgcatacatcatgattgcaatttatggaaaaaacttctgtgtaagcgcaaagaacgcattcatgctccttatgaggaatatcgtaagggtggtggtgttggataaggtcaccgatttgctgctctttttcgggaaactattggtggtcggaggggtgggagtgctgagttttttcttcttctcaggccgtattccaggtctggggaaggatttcaaaagccctcacctgaactattattggttgcctatcatgacaagcatcctgggcgcctatgtcattgcatcgggcttctttagcgtattcggtatgtgtgtggacactctgttcctgtgcttcctcgaagacctcgaacgtaataacggctctctagaccgcccctattacatgtcgaagtcacttttgaagattctcggaaaaaaaaatgaagcaccgcctgataacaaaaagcgcaaaaaatag

SEQ ID NO: 135503 - DNA, 2007 bp, synthetic construct
  misc_feature 1..2007: note = Description of Artificial Sequence: Synthetic coding sequence
  source 1..2007: mol_type = other DNA
atgggcgggaaacagagagacgaggacgatgaagcctatggcaaacctgtaaagtatgatccttcgtttagggggcccatcaaaaatcggtcgtgcacggacgtcatctgttgcgtcctctttctgctctttattcttggctatattgtcgttggcatcgtggcttggctgtacggagacccccgccaagtgctatatccacggaacagcactggggcctattgcggtatgggggaaaataaggataaaccttacttactgtattttaacattttttcctgcatactgtcctcaaacatcattagtgtggctgagaatggtttgcagtgcccaaccccccagaccgtgattactagtctgcaacaagagctgtgtccgagcttcctgctgccctctgcccctgctctgggaaggtgtttcccatggacaaatgttaccccacccgccttacctggcataacaaatgacacaaccatccaacaaggcattagcggtctcatagattctttgaacgcacgcgatattagcgtcaagatttttgaggattttgcccagtcctggtattggatactggtcgcgctcggggttgccctggttctgagtctgctctttatcctgctgctgagactggttgccggcccactggtgctagttctcatcctcggggtgctaggtgtgctagcatatggtatatattattgctgggaggaataccgcgttttgagggacaagggggcgagtatctcccagctcgggttcactacgaacttgtctgcataccagagtgtgcaggaaacatggctagccgcactgatagtcctggcggttctggaggccattttgctgcttatgctcatctttctgaggcagaggatccgtatcgcgatcgcactccttaaagaggctagtaaagccgtcggccaaatgatgtcgacaatgttttatcccctggtcaccttcgtattgctacttatttgcattgcctattgggccatgaccgcactctatcttgcaacaagcggccagccacagtacgttttgtgggcgtccaatatctcaagcccagggtgtgagaaggtacccatcaacaccagctgtaatcctactgctcaccttgtcaacagctcttgccccgggctgatgtgcgtcttccaagggtacagcagtaaaggcctgatacagaggtctgtgttcaatcttcagatttacggtgtgctcggattgttctggacattgaactgggtgctggcactgggccaatgcgtgcttgccggcgcatttgccagcttttactgggcgttccataagccacaggatattccaacctttcccctgatcagtgctttcataagaacactgcgttaccataccggttccctggctttcggggctctgatcctgactctggttcaaatcgcccgggttatcctggagtacatcgaccacaagctgcggggggtgcagaaccccgtagccagatgcattatgtgctgttttaagtgctgtctttggtgcctggagaaattcataaagttccttaacagaaatgcctacataatgatagcaatctatggtaaaaacttttgtgtctcggccaaaaacgcctttatgctcctgatgagaaatattgtcagagtcgtcgtgctcgacaaggttaccgatctactcctcttttttggaaaactgttggttgtaggaggagtgggggttttatcatttttcttcttctcaggaaggatccctggtctcggaaaagatttcaagtcccctcacttgaactattattggttgcctatcatgacaagtattctgggcgcatatgtgattgctagtggtttcttctcggtcttcggaatgtgcgtggatacactgttcctgtgtttcctggaggatctagaacggaataatggcagccttgatcggccctactatatgtcaaagagcttattaaaaatccttggaaagaagaacgaagcaccccccgacaacaaaaaacggaagaaatag

SEQ ID NO: 135504 - DNA, 2007 bp, synthetic construct
  misc_feature 1..2007: note = Description of Artificial Sequence: Synthetic coding sequence
  source 1..2007: mol_type = other DNA
atgggtggaaagcaacgtgatgaggacgatgaagcctacggcaaacccgtgaagtacgatccctccttccgagggcccattaaaaatcggtcctgcacagatgtcatctgctgtgtcctcttcttattgtttattctagggtacatcgtggtaggtatagttgcatggctgtacggtgacccacggcaggtgctttaccctagaaactccactggagcttattgcggcatgggcgagaataaggataagccttacctgttgtatttcaatatatttagctgtatcctgtctagcaacataatctccgtggcagaaaatggcttacagtgccccaccccacaaactgtcataactagcctgcagcaagagctctgcccctcctttctgctcccatccgctcccgcattggggcgttgcttcccttggactaatattacccctcccgctttgccggggattacaaacgataccaccatacagcaaggaatctccggacttattgattcacttaacgctcgcgatatctctgttaaaatatttgaggatttcgcccaatcttggtattggattttggttgcactgggcgtggctcttgtgctgtctttactctttatacttcttctgagattggtggcgggcccactggtgttggtcttaatactcggcgtccttggggtgttagcgtatggaatctactactgttgggaggaataccgagtgttgcgagataagggagcaagcatcagccagcttgggttcaccacaaatctatctgcctatcagtcagtccaggagacctggctggcagccctcatcgtgctggccgtcctcgaagctatacttctactggttctgatttttttgcgacagagaattaggatcgcaattgccctgctgaaagaggcttcaaaggcggtcggacagatgatgtccaccatgttttaccctcttgtgaccttcgtcttacttctgatctgcatcgcttattgggccatgacggctctctatctggcaacatctggtcagccccaatacgtcctttgggcctctaatatcagctcacccggatgtgagaaggtccccatcaatacttcctgcaaccccactgcccatctcgttaattcttcctgtcctggattaatgtgcgtcttccaagggtatagcagcaaggggctgatccaacgctctgttttcaacttacagatctacggtgtgcttggtcttttctggacactgaactgggtgctggcgctcggccagtgtgtgcttgcaggcgccttcgcttccttttactgggccttccacaagccacaggatatcccaaccttccctcttatctccgcattcattaggaccctccgatatcatacagggtccctggcatttggggctctgatacttacccttgtgcagatagcccgggtcattctggagtatatcgaccacaagctgaggggcgtgcagaacccagtggcccgttgcatcatgtgctgcttcaagtgttgcttgtggtgccttgagaagttcattaagtttctaaaccgtaatgcatatatcatgattgcaatctatggcaagaacttttgcgtgagcgccaagaacgcctttatgcttctgatgagaaatattgtcagagttgttgtgttagataaagttacagatctgctgctgttcttcgggaagcttcttgtggtgggcggtgtgggcgtcctgagcttcttttttttttccggccggattcccggattaggtaaggattttaaatctcctcaccttaattattactggcttccaatcatgacatcaatcctcggggcgtacgtgattgccagtggattttttagtgtctttggaatgtgtgtcgacaccttgttcctgtgcttcctggaagatttagaaagaaacaacggctcactggaccgaccatactatatgagtaagagtttgcttaagattctcggtaaaaagaatgaggccccacctgataacaaaaaaaggaagaaatag

SEQ ID NO: 135505 - DNA, 1905 bp, synthetic construct
  misc_feature 1..1905: note = Description of Artificial Sequence: Synthetic coding sequence
  source 1..1905: mol_type = other DNA
atgggagagaataaggacaagccatacctactgtattttaacattttctcatgtatcctttcatcaaatatcatatccgtggctgagaatggcttgcagtgtccaacaccacaggtttgtgttagctcttgccccgaagacccatggaccgtgggcaaaaacgaattttcgcagaccgtaggcgaggtcttttacaccaagaatagaaacttctgcctgcctggggtgccttggaacatgactgtgatcacatcactccagcaggaactgtgtccttcatttctgctgcccagcgcaccagcattgggacgatgctttccttggaccaacattactcctccagcgctccctggcattacgaacgacacaacaatccaacagggtatttctggcctgattgattccttgaacgctcgcgatatttccgtgaagattttcgaagatttcgcccaatcttggtactggatactcgtcgctctgggggtggccctggttctgtcattgttgtttatactgttgttgcgcttagttgccggccctttggtgcttgtgttaatcctcggtgtgctgggtgtattagcttacgggatctactattgttgggaagagtaccgagttctgagggataagggcgcgtccatcagccagctcggtttcaccaccaatcttagtgcataccaatctgtccaggaaacctggctggctgcccttattgttctcgccgttcttgaggccatcctcctgctggtcctcatttttctgaggcagagaattagaattgcaattgccctcttgaaagaagcgagcaaagccgtcggccagatgatgagcaccatgttttatcccctggtgacatttgtcctcctattaatctgcattgcatactgggccatgaccgccctgtacctggcaacatccggacagccgcagtatgtgttgtgggcctccaatatttcatctcccggctgcgagaaggtaccgatcaacacaagctgtaatcctaccgcccacctggtcaacagtagttgccctggcttaatgtgtgtgtttcaggggtatagctccaaaggtctgattcaacgtagcgtttttaacctccagatttacggggtgctcggcttgttttggaccctgaattgggtgttagccctggggcaatgcgtgttagcgggagcgtttgctagtttctactgggccttccataagccacaggatattccaacatttcccctgatctcagccttcatcagaaccctgcgttatcacaccggcagcttagctttcggcgcactaatcctgactctggtgcagattgctcgcgtcatattggagtacatcgaccacaaactgcgcggtgtgcagaatcccgttgcccggtgtatcatgtgttgtttcaagtgctgcctgtggtgcctcgagaagtttatcaaatttctcaatagaaatgcatatattatgattgccatctacggcaagaacttctgcgtttccgcaaagaacgcattcatgcttctgatgaggaatatcgtgcgggtggtggtcctggataaagtgacagacctgctactgttttttgggaagctcctggttgtggggggggtgggggtgctttcctttttctttttttctggacgtatcccagggctgggaaaggattttaagtccccccaccttaactattactggctccctattatgactagtatcctcggtgcctatgtaatagcttcaggcttcttcagcgttttcggtatgtgtgtggatacgttatttctctgctttttagaggatctcgagaggaataatggctccctcgaccgaccatactatatgtccaaatctctgctgaagattctcgggaagaagaacgaagctcctccagacaacaaaaaacgtaaaaaatag

SEQ ID NO: 135506 - DNA, 2007 bp, synthetic construct
  misc_feature 1..2007: note = Description of Artificial Sequence: Synthetic coding sequence
  source 1..2007: mol_type = other DNA
atgggtggaaaacagagggacgaagacgacgaggcctacggtaagccagtgaaatacgatccctcttttcggggcccaattaagaatcgcagttgcacagatgttatctgctgtgtgttatttctcctcttcattcttggctatatcgtggtggggatcgttgcttggctttatggcgatccccggcaagttctgtatcctcgcaacagcactggggcttattgcggaatgggtgagaacaaagataagccttatttgctttatttcaacattttctcttgtatcctgtcctcaaacattattagtgtagctgagaacgggttgcaatgccctactccacagacagttatcacatccctgcaacaggaactgtgtccaagctttctcttacctagcgcgcctgccttaggccggtgctttccttggaccaatgtcacccctcctgcccttccagggattaccaatgacaccaccatccagcagggcatcagcggtctcatagattctctcaatgcaagagacatcagtgttaagatttttgaggacttcgcccaatcctggtactggatccttgtcgctctgggtgtagccctggtgctgtcactgctgtttatcctgctgctgagactggtagctggacctctcgttctcgttttaattctgggagtactcggagttctggcatatggaatttactactgttgggaagaatacagggtactgcgggacaaaggcgcatccataagccaattaggcttcactacaaatctctcagcttaccagagtgtgcaggaaacctggctggccgcactgatagtcctggccgtattagaggccattctcctgctaatgctgatctttctgcggcagaggattcgcatcgccatagccttattaaaggaggccagcaaagctgtcggccagatgatgagtactatgttttatccgctggttacattcgtcctcttactcatctgtattgcctattgggcaatgacagccctctatctcgccacgtctggccagcctcagtacgtgctgtgggctagcaatatctcaagcccaggatgtgaaaaagtgccgatcaacacttcatgtaaccctacagcccacctggtgaatagtagctgccctggtttgatgtgtgtgtttcagggctactcttccaagggcctcatccaacgttccgtttttaacctgcagatctatggggtcctgggtttattctggaccctcaactgggtgttggctctgggacagtgcgtattggccggggcattcgcatctttttattgggctttccataagccacaggacattccaacgttcccacttatttcagcctttataaggaccctgcgctaccataccgggtcattggcctttggggccctcatcttgacactcgtccagatcgccagagtgatacttgaatacatcgatcataaattacggggagtgcagaacccagtggcccgatgcattatgtgctgtttcaaatgctgcctctggtgccttgaaaagttcataaaattcctgaaccggaatgcctacattatgatagctatttatgggaagaacttctgcgtgtctgcaaagaatgctttcatgctgctcatgagaaatattgtgagagtagttgtacttgacaaggtgacagacttgctcctcttctttggaaagctgctcgtggttggcggagtgggtgttctgtctttcttctttttctcaggcaggattccagggctgggaaaagactttaaaagtccacacctcaattattactggttacctatcatgacctccatactgggcgcttacgttattgcttcaggtttcttctccgttttcggcatgtgtgttgatacccttttcctgtgctttctggaggatctggagagaaacaacggcagcttagatcggccctattatatgtccaagtctctcctcaaaatcctgggcaagaaaaatgaagccccaccagacaataaaaaaagaaaaaaatag

SEQ ID NO: 135507 - DNA, 2007 bp, synthetic construct
  misc_feature 1..2007: note = Description of Artificial Sequence: Synthetic coding sequence
  source 1..2007: mol_type = other DNA
atggggggcaaacagagggatgaagacgacgaagcttacgggaagcctgtgaaatatgacccgtcttttcggggcccgataaaaaaccgatcctgcaccgacgttatctgttgcgtgctgttcctcctatttatcctgggctacattgtggtgggtatcgtggcttggctgtatggtgaccccaggcaggtgctgtacccacggaatagtacaggggcttactgtggcatgggggagaataaggacaagccctatcttctgtattttaatatattctcatgtatcctcagctcaaacatcattagtgtggccgagaatggcctgcagtgccccacccctcagaccgttatcacgtccttgcaacaggaactgtgccccagcttcttgttgccctcagccccggcgctgggccgatgttttccctggaccaacatcaccccacccgccctgcctggtatcacaaatgatacaacgattcaacagggaatcagtgggttaatcgacagtctcaatgccagagatatttcagttaaaatttttgaggatttcgcacagtcttggtattggatcctggtggctctgggcgtcgccttggtcctctcccttctgttcattctgttgcttcgactggtagccggccccctggttttggtgttaatcctgggagtcctgggcgtactcgcgtatggtatctattattgttgggaggaataccgggtgctccgcgacaagggagcaagtatcagccagctaggctttactactaacctatcggcctaccagagcgtgcaagaaacttggttagccgccctcattgtcttggccgtgctggaggccatcctcctgctagttcttattttcttgagacagaggattcggatcgcaattgccctcctgaaggaggccagtaaagctgtgggtcagatgatgtctaccatgttttatccactcgtaaccttcgtactgttgctgatttgcatagcctactgggccatgacagccctctatcttgcgacctcgggccagccccagtatgtcctttgggccagtaatatctctagtccagggtgcgaaaaagtgcccattaatacaagctgcaaccctacagcacatctggtgaattcctcatgccctgggctcatgtgcgtttttcagggatactcttctaagggcctgatccaacgctcggtgtttaacctgcaaatttacggcgtgttaggtctcttttggactcttaattgggttctggctttgggacagtgcgtactcgccggagcgtttgccagcttttactgggcttttcacaaacctcaagacatcccaactttcccgctgatcagtgcatttatccgtactttacgataccacaccggcagcctggcatttggagccctgatcctgacgctggtgcagatcgcccgagtcatcctcgagtatatcgatcacaagctacggggagttcaaaacccagtggccagatgtattatgtgttgtttcaaatgctgcctctggtgtctcgagaagtttataaagttcttgaacagaaatgcctacatcatgatcgccatctacggtaagaatttctgcgtcagcgctaaaaatgcttttatgttgctgatgaggaacattgtccgggtggtggttctcgacaaggttacagacttgcttcttttctttggaaaattacttgtagtcggcggcgttggcgtgctgtcattctttttctttagtggtaggattccaggcctgggaaaagattttaagagtccacaccttaattattactggctccccattatgacttctatactcggtgcttacgttattgcatcagggttcttctccgtgttcggaatgtgcgtcgataccctctttctctgcttcctggaagatttagaaaggaacaatggtagcctagataggccgtactacatgagcaaaagtctgttaaagatcctcggaaagaaaaacgaggctcctcctgataataaaaagaggaagaaatag

SEQ ID NO: 135508 - DNA, 1905 bp, synthetic construct
  misc_feature 1..1905: note = Description of Artificial Sequence: Synthetic coding sequence
  source 1..1905: mol_type = other DNA
atgggtgagaataaggataagccttacttgctgtatttcaacatctttagttgtatactgtcttccaatattatttctgtggctgaaaatgggctccagtgtcccacccctcaggtctgtgtgagcagctgtcctgaagacccttggaccgtgggtaaaaatgagttcagccaaactgtgggagaggtcttctatactaagaacaggaatttctgcctgcccggtgtcccttggaacatgacggtaattacaagcctacagcaagagctgtgcccctccttcctattgcctagcgctccagctctcgggcgatgttttccttggaccaatatcacgccccccgccttgcccggaataactaatgatacaaccatccaacagggaattagtggactgattgacagcttgaatgccagggatatttccgtgaaaatctttgaagacttcgctcaaagctggtattggatcctggttgccctcggagtcgcactcgtcctgtctctcctgtttattctcctgttacgcctggtggctggccctctggtactggtgcttatcctgggagttctgggagtcctggcctacgggatttactactgttgggaagagtacagagtactgagagataagggggcttctatcagccagctgggctttacgaccaacctaagcgcgtatcagagcgtgcaggaaacttggctcgccgccctcattgtcctggccgtcctggaggctatcctccttctcgtcctgatattccttaggcaacgcatccgcatcgcgattgccttgctgaaggaagcatcaaaggcagtgggccagatgatgtccactatgttttacccactggttacattcgtcctgcttcttatttgcattgcatattgggcaatgacagccctgtatttggctactagcggtcaacctcagtacgtcctttgggccagcaacatctcaagtccaggatgtgagaaagttccaatcaatacatcgtgtaaccctactgcacacttggtcaatagctcgtgtccagggctgatgtgcgtctttcagggatactcatccaaaggcctgatccagcggtccgtgttcaatctacagatttatggcgtgctgggactcttctggaccttgaactgggtgctcgctctcggccaatgtgtactggctggggcgtttgcaagcttctactgggcattccacaagccccaggatatccctacctttcccctgatcagcgcttttatccggacgctaaggtaccacaccggtagcttagctttcggggccctgattttgaccctcgttcagatcgccagagttatcctcgagtatatcgaccataagctgagaggagtgcaaaaccctgtggctaggtgcattatgtgttgcttcaaatgctgcctctggtgcctggaaaaattcatcaaattcctgaatcgtaatgcgtacatcatgatcgctatctacggcaaaaacttttgtgtgtctgctaagaacgccttcatgctactgatgagaaatattgttagagtggtggtgctggataaggttacggatctcctcttattctttggcaaactactggtggttgggggtgtaggagttctgtcttttttcttcttcagcggtagaatccccggtctcgggaaagattttaaaagtccccacttgaattattattggctcccaatcatgacaagcattcttggagcctatgttatcgcttccggatttttcagcgtatttggtatgtgtgtggataccctgtttttatgttttcttgaagacctcgaaagaaacaatggctcactcgatcggccatattacatgtccaagagccttctgaaaatcttaggaaaaaaaaatgaggcccctcccgataataaaaaaaggaaaaaatag

SEQ ID NO: 135509 - DNA, 2247 bp, synthetic construct
  misc_feature 1..2247: note = Description of Artificial Sequence: Synthetic coding sequence
  source 1..2247: mol_type = other DNA
atgatccccgcagcgtcttctacaccgccaggcgacgcactttttccgtcagtagccccccaggatttttggcggtctcaggtgaccggatattcgggcagtgtcaccagacatctttctcaccgcgccaacaatttcaagagacatccaaaacggcgaaaatgcatacgccctagtcctccaccaccaccaaacacaccttgccctcttgagctggtggacttcggcgacctgcacccgcagaggtcatttagggagctgttatttaacggatgcattctcttcggaatcgaattttcctacgctatggagacagcatatgtgacccccgtgcttttgcagatggggcttcccgatcagctgtactctctagtctggttcatcagtcccattctagggttcctgctgcaaccgctcctgggtgcatggtctgacagatgtactagtcgctttggaaggaggcggccctttattctggtcctggcaattggggccctcctggggctttcacttctgttgaacggcagagatatcggcatagctttggcagatgttactgggaatcacaagtggggcttgctgttaactgtgtgcggcgtggtcttgatggatttctctgctgatagtgcagacaatccaagtcacgcctatatgatggacgtctgtagtcccgcggaccaggaccgagggttaaatatccatgcgctgctggctggactgggcgggggatttgggtacgtagttggtgggattcattgggataagaccggatttggtcgcgccctcgggggacagctgcgcgtaatctatctgttcactgctgtcactctttccgttacaaccgtactgacactggtcagcatacctgagcgtccactccgacccccttctgaaaagagagccgccatgaagtctccctccttgccactgccaccctcccctcctgtgctgcccgaggagggacctggagacagcctgccatcccataccgccacaaatttttcaagcccaatcagccccccgagccctttgacacctaagtacggttctttcataagcagggattcatctctgacagggatctcagaattcgcctcatcatttgggaccgcaaatatcgactctgtcttgatagactgtttcactggaggtcatgacagctatctcgcgattcctggcagcgtccccagacctccaatttccgtttccttcccccgcgccccagacggcttctatagacaagatagaggcctactcgaaggtcgcgagggcgctttaacaagcggttgcgatggggatatcctcagagtgggcagtctagacacctcaaaaccacggtcttcagggatcctcaaacggccccagactcttgcaattcctgatgctgctggaggtggagggcctgagacgagccggagacggaacgtgacatttagccagcaagtcgcaaatatcttgcttaatggcgtgaaatacgagtccgagctgacaggttcctcagagagagcagagcagcctctctccgtggggcgcctgtgtagtacgatctgtaatatgcccaaggccttgcgcaccctctgcgtgaaccacttcctaggctggttgtctttcgagggcatgctacttttctacacagatttcatgggggaggtggttttccagggagatccgaaagcaccacacacttcagaggcgtaccagaagtataacagtggcgtgactatgggctgttggggtatgtgcatttacgccttctctgcggcattttactctgctattcttgagaagttggaggaatttctgtcagtgcgcacactgtacttcatagcctatctggctttcggactagggaccggtcttgctactctgagccggaatctgtacgtggtcctgagcctgtgcataacttatggaattttgttctctacgctctgcacacttccatattcacttttatgtgattattatcagtctaagaagtttgcagggagcagcgcagatggtacacggcggggcatgggcgtggacatctccctcttgagctgtcagtattttttagcgcaaattctcgtgtccctcgttctcgggccactgactagcgcagtggggagcgccaacggcgttatgtattttagttctttagtgagctttcttggatgcctatatagtagcctttttgttatatacgaaattcctccaagcgacgcagcagacgaagaacaccgaccactgctgctgaatgtttag

SEQ ID NO: 135510 - DNA, 2349 bp, synthetic construct
  misc_feature 1..2349: note = Description of Artificial Sequence: Synthetic coding sequence
  source 1..2349: mol_type = other DNA
atgcttcaacaacctggtcctagacctgggcgacagcagccctcaggcgacagggacgcttgtcgactccacccccaaggtcggcccccagctttgccaacaatgattccagccgcttctagcactcccccgggggatgctctctttccgagtgttgcaccacaagacttttggcggtcacaggtcactggttactccggctctgtgacgagacacttatcacaccgagctaataatttcaagaggcatccaaaacgtcgaaagtgcattaggccatctcctcctcctccgcccaacaccccttgtcccctagagctcgtagattttggggatttacacccgcaacggtcttttcgtgaactgttattcaatggatgcatcctattcggcattgagtttagctatgctatggaaacagcatacgtgactccagttctactgcaaatgggcctgcctgatcagctgtatagcctggtgtggttcatctctcctattctgggattcttgttacaacccctgctcggcgcttggagtgatcgctgcaccagccgctttggacgccgaagaccctttatcctcgtacttgccatcggtgccctgctcggcctgtcattgctcctgaacgggagggacatcggtatagcactggcagatgtgacagggaaccataagtggggcctcttgctgacagtttgcggcgtggtgttgatggacttctcagccgatagcgccgacaacccctcacatgcatacatgatggacgtctgctctccagccgatcaggatagaggactcaatattcatgcactgctggccggattgggcgggggtttcgggtatgtggttgggggcattcattgggacaaaaccggattcggtcgggctcttgggggtcagctgcgcgtgatctacctttttacggctgtgacactctctgttactactgtgctcactctggtatctattccagaacggcctcttcgcccaccttccgagaaaagggccgctatgaagtcaccctcacttccattgcctccttcaccacctgtgttacccgaagagggccccggagattctctgccttcgcacaccgctactaattttagcagtcctataagcccaccatccccgttgacacctaaatatggatccttcatcagtcgtgatagctctctgacgggcatcagcgaatttgcatcgtcatttggcacagccaacatcgactccgtcctcatagactgtttcacgggcggtcatgacagttatctcgctatccctggtagtgtgcctaggcctccgattagtgtttcgtttcctcgtgcgccagatggcttttacagacaggaccgggggttacttgaaggcagggaaggagccctgacctctggctgtgacggagacatacttcgggtggggagtctggacacaagcaagcccaggagctcgggtattttgaagcgtccccagactctggccataccggatgccgccggagggggaggccccgagacatctaggaggagaaatgttaccttcagccagcaggtagctaatattctcctgaacggcgtaaaatatgagtccgagctgacaggatccagtgagcgcgccgagcagcctctctctgtaggcaggctctgtagtacaatttgtaatatgccgaaggcgctgcgaactctatgcgttaaccacttcctgggctggctgtcattcgagggcatgctgctgttttatacagactttatgggtgaagtggtgttccagggcgacccaaaggctccacacacttcagaggcttaccagaagtacaattccggggttactatggggtgttggggcatgtgcatttacgcgttcagcgctgctttctattctgccatccttgagaagctggaggaattcttgtcagtccgaacactgtatttcattgcgtacctggcttttggtctgggtacagggctcgcaacacttagtcgtaatctttatgtggtactgtcactgtgcatcacttacgggatacttttttctacgttgtgtacgctgccatatagccttctgtgcgattactatcaatcaaaaaaattcgccggctcctctgctgacggcacaaggagggggatgggggtggatatttctctactgtcctgccagtattttctcgcccagatcctcgtgtccttggttttggggccgctgacctctgcagtgggatcagccaacggcgtgatgtacttttcttccctcgtcagttttctagggtgcctctactcatccttgtttgtcatatacgagattcccccttccgatgccgccgacgaggagcatcgacccctcttgttaaatgtttag

SEQ ID NO: 135511 - DNA, 2247 bp, synthetic construct
  misc_feature 1..2247: note = Description of Artificial Sequence: Synthetic coding sequence
  source 1..2247: mol_type = other DNA
atgatccccgcagccagttcaacacccccaggcgatgctttgtttccctccgtggctcctcaagacttttggcgcagccaagtgaccgggtattctggttcagtgacccgccatctgtcccaccgagccaataacttcaaaaggcacccgaagcggcggaaatgcatcagaccaagtccacccccacccccaaacaccccatgcccactcgagctggtagactttggggatcttcatccccagcgcagcttcagagagctcctgtttaacggctgtattctgtttggcatcgaattcagttacgccatggaaacagcctatgttacccccgtactcttgcagatgggcctgcctgaccagttatactcccttgtctggttcatcagccccattctgggttttcttctgcagcccctgttgggggcttggtccgataggtgcacctcccgcttcggcagacgacgtcccttcatcctggtgcttgcaatcggggccttgctaggactgtccttgctcctgaacgggcgagacattggaatcgcgctggccgacgtgactgggaaccataaatgggggttactgcttactgtgtgtggcgtcgtgttaatggactttagtgcggacagcgccgacaatccatcacatgcttacatgatggatgtgtgttccccagccgatcaggatagaggactgaacattcacgcccttcttgccggactgggcggtggcttcgggtatgtcgtagggggaattcattgggacaaaactggattcggccgtgcccttggcggccagctgagagtaatttatttatttacagctgtgactcttagcgtcaccacagttctcacactggtgtccatccccgaacgccctctgaggcctccctcagaaaagagagccgccatgaagtccccctctcttcccctgcccccgtcacctcctgtactgcctgaagaagggccaggtgatagtctgccatcccacacggccaccaatttcagttctcctatctctcccccctccccgcttacacccaaatacgggtctttcatctctagagactcctctctaacaggtatttccgagtttgcaagctcttttggcacagctaacattgattcagtgctgattgactgcttcactggcggccacgattcctatcttgccattcccggttcggttccgcgtcctcctatttcagtttccttcccgagggcccccgatggcttctacagacaggacagggggctgcttgagggcagggagggcgctctgaccagtggctgtgatggggacatcctgcgcgtgggtagccttgatacgagcaaacccaggagcagcggaatactcaagcgcccacagactctagccatccctgacgccgcggggggaggcgggcccgaaacttcccggcgaaggaatgtgaccttttcgcaacaggttgccaacatattactcaacggggtaaagtatgaaagcgagctgacaggatcttccgaacgcgccgaacagcctctgagcgttgggcgcctttgcagtaccatttgcaatatgccaaaggcactgagaactctgtgcgtgaatcattttctcgggtggctgagcttcgaagggatgttgctgttttataccgatttcatgggggaagttgttttccaaggcgatcccaaggcaccgcacacaagcgaagcataccagaaatacaatagcggcgttactatgggatgttggggtatgtgtatatatgccttctccgcagctttctactctgctatcctggaaaaattggaggaattcctcagcgtgagaactttgtactttatcgcctatctagcctttggattagggacaggcctggccactctgtccaggaacctgtatgtagttttgtccttgtgcatcacttacggaatcctgttctcgacgttgtgcaccctgccctattctttgctatgcgattattaccagagtaagaagttcgccggatcgagcgccgacggtaccagaagggggatgggcgtggacatttctttgctgtcctgtcagtattttttagcccagatccttgtaagccttgtgctgggaccacttacttcagccgtaggaagcgccaatggagtcatgtacttcagctccctcgtgagttttctgggctgcctgtacagttcacttttcgttatttacgagattcctccttctgatgccgcggacgaggaacatagacccctcctgctaaatgtctag

SEQ ID NO: 135512 - DNA, 1593 bp, synthetic construct
  misc_feature 1..1593: note = Description of Artificial Sequence: Synthetic coding sequence
  source 1..1593: mol_type = other DNA
atgggatctaattcaggccaggctggacgccatatatataagtccctggcagatgacggacctttcgatagcgtggaaccaccaaagcgccccacgtcccgtctgataatgcactctatggctatgttcggccgtgaattttgctatgccgtggaggccgcttatgtgacccccgtactgctttcagtggggctaccgtcttccctttacagcatagtatggtttctgtctccgattctcgggtttttgctgcaacctgtcgtgggatctgcgagtgaccactgccgttcaaggtgggggagacgtagaccctacatcttgacactcggagttatgatgttggtgggcatggccctttacctaaatggcgcgacagtggtggcagccttaatcgcaaatcccagacgtaagctcgtctgggccatttcagttacgatgattggtgtggtcttattcgacttcgccgctgatttcatcgacggaccaataaaagcctatcttttcgatgtctgtagccaccaggacaaggaaaaagggctgcattatcacgccttattcactggttttggcggcgctcttggctacctcctgggagctattgactgggcacatctggaactgggcagattgctaggaacggagttccaggtgatgttctttttttcagcactagtactcactctgtgctttactgttcacttgtgttcgatctccgaggcgccactgacggaagtcgctaaaggaatccctccccaacagactccccaggacccacctctcagcagtgatgggatgtacgagtacggatccatcgaaaaagtgaaaaatggctatgttaatcccgaacttgcgatgcaaggcgctaagaacaagaaccatgccgagcaaacaaggagagcaatgaccctcaaatccctccttagggccttggtcaacatgccccctcactatcgatacctgtgcatatcacatctgatcggctggaccgctttcctttctaatatgctgttctttactgacttcatgggtcagatcgtctacaggggagatccttacagtgcgcacaactccaccgagttcctgatttacgagaggggtgtagaagtcggatgctggggattgtgtatcaattccgtcttctcttcgctgtactcctatttccagaaggtgctggtctcatatatcgggctcaaaggcctgtactttactggctacctactctttggattgggtactggttttatcgggttgttcccaaatgtttattcgactctggtgctgtgttccttgttcggtgtgatgtcctcaacgctgtacaccgtgcccttcaacttgattactgaatatcatcgggaagaggagaaggaacgccaacaagcgcctggcggtgatcctgataatagcgtcaggggcaaggggatggattgtgccacactcacttgtatggtgcaactcgcccagatccttgtgggcgggggactcgggttcctagttaatactgccggcaccgttgtcgtcgtggtaattacagcctcagctgttgccttgatcggatgctgcttcgttgccctcttcgtacgatacgtagactag

SEQ ID NO: 135513 - DNA, 1416 bp, synthetic construct
  misc_feature 1..1416: note = Description of Artificial Sequence: Synthetic coding sequence
  source 1..1416: mol_type = other DNA
atgggctctaattccggtcaggcaggccgccatatctataaatctctcgccgatgatggaccttttgattctgtagagcctcccaagcgtcctacaagccgacttattatgcacagcatggcaatgttcggtagggagttctgttacgctgttgaagctgcttacgttacccctgttctgctctccgtggggctgcctagctccctctactccatcgtttggttcctttccccgatcctggggtttctacttcagcctgtcgtggggagcgcatcagatcactgccgatctcggtgggggcgccggaggccctatatcttgaccctaggtgtcatgatgctggtgggtatggcgttgtacctgaatggagctacagtcgttgccgggtttgggggcgcactcggttatctactaggcgcaattgactgggcacaccttgaactgggaagactgctggggactgaattccaggtcatgtttttcttctccgcattggtgctgactctgtgtttcactgtgcacctgtgtagcatcagcgaagcccctcttacagaggtcgccaagggaatcccgccacaacagacgccccaggatcctcccctctcgagcgacggcatgtatgaatacgggtcaatagagaaggtgaagaacggctacgttaacccagaactcgctatgcaaggcgcaaaaaacaaaaaccacgccgagcagactcgaagggcaatgaccttgaagtctctgcttcgggcccttgtgaacatgcctcctcactacagatacctgtgcatctcacatctgatcggctggaccgcgtttctaagcaatatgctttttttcactgattttatgggacagattgtttatcgtggagatccttactctgcacacaatagtaccgagttccttatctacgagcgtggggtcgaagttgggtgctggggcttatgcatcaattccgtgttttccagtctgtattcctacttccagaaggtgctcgtctcttacatcggactgaagggcctgtattttaccggttatctcctgttcgggctgggaacagggttcataggcctctttccaaatgtctactctaccctggtgctgtgctcgctcttcggagttatgtcatccaccctttacaccgtccctttcaatctgattaccgaataccaccgtgaagaggaaaaggaaagacagcaggcccctggaggggaccccgataactccgtcagaggaaagggcatggattgcgcgacattgacctgtatggtccagctggcccagattctggtaggtggcggcctcgggtttctggttaataccgcagggacagtcgtggtggttgtgatcacagccagtgcggtggccctgatcggctgctgcttcgtggccctctttgtgcgctatgtggactag

SEQ ID NO: 135514 - DNA, 897 bp, synthetic construct
  misc_feature 1..897: note = Description of Artificial Sequence: Synthetic coding sequence
  source 1..897: mol_type = other DNA
atgggatccaactccggtcaggccggcaggcacatctacaaaagcctggccgatgacgggccgttcgacagcgtggaaccacctaaacggccaacttcgcgcctgatcatgcacagcatggccatgtttggaagggaattttgttacgcagtggaggccgcttatgtgaccccggtgttattaagtgtgggcttgccttctagtctgtatagcatagtttggttcttgtcccctatcctgggatttttactacagccggttgtaggctcagcatctgaccattgtcgctccaggtggggacgacgaaggccttacattctgactctaggcgtcatgatgctcgtggggatggcactatacctgaatggagccaccgttgtcgcagcgttaattgcgaacccgaggcggaaacttgtttgggcaatatcagtgaccatgattggcgtggtgttgtttgattttgccgccgactttattgacggcccaatcaaagcatacctgttcgacgtttgctcacatcaggataaagagaaaggcctgcactaccatgcactttttacgggcacccggagggcgatgacattaaagtctctgcttcgggcactggtcaatatgcctccccattatagatacctgtgcatttcacaccttattgggtggaccgcctttctttctaacatgttattcttcaccgacttcatgggccagatcgtgtatcgcggggatccttactcagcgcataatagcacagagttcctgatttacgaacggggagtggaagttgggtgctggggcttgtgcataaattcagttttcagtagtctgtacagttgcaagagctttagtctgttgcggatgtcaagcaaatctttctggtcttcaaccacatggatttag

SEQ ID NO: 135515 - DNA, 1383 bp, synthetic construct
  misc_feature 1..1383: note = Description of Artificial Sequence: Synthetic coding sequence
  source 1..1383: mol_type = other DNA
atgggaagtaatagtggccaggccggacggcacatttataagtctctggccgacgatggcccattcgactccgttgagccccccaagcgacctactagcaggttgatcatgcacagcatggcaatgtttggacgagagttctgttacgcggtagaagccgcttatgtcacacccgttttactgtccgtgggacttcccagttccttgtattcaatcgtttggttcctatcccctattttaggcttcctcctccagcctgtggtggggtccgccagtgatcactgccgttctcggtgggggaggcgcagaccctacattttgaccctgggcgttatgatgctggttgggatggctttgtatctgaatggcgcaacagtggttgctgcattgatcgcaaacccccgtcgcaaactggtgtgggcaatatcggtaactatgataggcgtagtgctcttcgacttcgctgcggattttatagacggccccatcaaagcctatctcttcgatgtctgctctcatcaggataaagagaagggattgcactaccacgccctgttcaccggcttcgggggtgccttgggatatttgttaggagcgatagactgggcccacctggaactcggtaggttactgggcaccgaattccaagttatgttttttttcagcgcattagttcttactctctgcttcacagtccacctgtgtagtatatctgaggccccattaaccgaagtggccaagggcatccctcctcagcagaccccacaggatccccccctatccagcgatggtatgtacgagtacggctccattgagaaggtgaagaacggctacgtgaaccccgagctagctatgcagggggcaaaaaacaagaatcacgcggaacagacccgcagagcaatgaccctgaaaagcctactgcgcgccttggtcaatatgcccccgcattacagatacttgtgtatttcacatctgatcggatggacagcttttctctctaatatgctgttctttacggactttatgggccaaatagtctaccgaggtgacccatatagcgcccataattccacggaatttctgatctatgagaggggagtggaggtgggctgctggggcttgtgcatcaattcagttttctcttccctgtacagttacttccagaaagttcttgtctcctatataggcctgaaaggtttgtactttaccggatacttgctttttggcctgggaactggctttattggcctgtttcccaacgtatacagcactctcgtcctgtgcagtttattcggagtgatgtcttcaactctgtacacagtgccttttaacctaatcaccgagtaccatcgagaggaagagaaggaggtgtgctgccactag

SEQ ID NO: 135516 - DNA, 732 bp, synthetic construct
  misc_feature 1..732: note = Description of Artificial Sequence: Synthetic coding sequence
  source 1..732: mol_type = other DNA
atgggctccaacagcggccaagcgggacgacatatttacaagtccctggcagacgacgggccttttgattccgtggaaccgccaaagcgacctactagcagactgattatgcattcaatggctatgtttggacgcgagttttgttacgctgttgaggcggcgtacgtcaccccagttttgctctctgtcggcctccctagctccctctattccatcgtttggttcctcagcccaattctggggttcctactgcagccagtggtaggctcagctagcgatcactgccggagcaggtggggcagacgtcgcccctacatcttaacccttggcgtgatgatgctagttgggatggcactgtatctgaacggcgcgacagtcgtggccgcactcatagccaatcctaggaggaagctcgtgtgggcaatatccgtgactatgattggcgtcgtgctattcgatttcgccgctgactttatcgacggaccaatcaaggcctatctgttcgacgtttgttcacatcaggataaggagaagggcctccactaccatgctctgttcactgatagtcagggtaatgatattaaagtcacagcggagtcaacaggagaacacgcttcgtctctgcctctgccacttcaccagccgccacactggatggattccctccctgtccaacatgccgttcttcacagattccatggccctgattgcgtaccacgaggctctctttag

SEQ ID NO: 135517 - DNA, 741 bp, synthetic construct
  misc_feature 1..741: note = Description of Artificial Sequence: Synthetic coding sequence
  source 1..741: mol_type = other DNA
atggccttgtatctgaacggtgccactgtggtcgccggctttggcggggccttaggttatctgctcggcgcaatcgactgggcacatttagagctggggagattactgggaacagagtttcaggttatgtttttctttagcgccctagtccttaccctgtgtttcactgttcacttgtgcagcatatctgaggctccccttacagaggtagccaagggaattccaccccagcaaacacctcaggatcctccactcagctctgatggaatgtatgaatacggatccatcgaaaaggtgaagaatggatatgtgaacccagaacttgccatgcaaggcgccaaaaacaagaatcacgcagagcagaccagacgggccatgacactgaaatccttacttcgcgccctagtcaacatgccaccgcactacagatatctttgtatttctcatcttatagggtggaccgcctttttaagcaacatgctcttctttacagacttcatgggacagattgtgtaccgtggcgatccatattcagcgcacaactctactgagttcttaatttacgagaggggcgtcgaggtcggatgttggggcctctgcattaattcagtgtttagctcgttgtatagttacttccagaaggtcctcgtttcctatatcggcctaaaagggctttactttacaggctatttgctctttggccttggaaccggcttcatcggtttatttccaaatgtgtag

SEQ ID NO: 135518 - DNA, 1662 bp, synthetic construct
  misc_feature 1..1662: note = Description of Artificial Sequence: Synthetic coding sequence
  source 1..1662: mol_type = other DNA
atggtgcaacgactgtgggtgagtagactcctgaggcatagaaaagctcagttgcttctcgtgaatctgcttacatttgggcttgaagtttgtcttgcagctggcatcacctacgttccaccactgctccttgaggtgggagttgaggaaaagtttatgaccatggtgttgggaatcggccctgttcttgggttagtgtgcgttccactcttggggagtgcctccgatcactggcgagggaggtatggccgccgtcggccgttcatttgggctctaagcctcggtatactactctccctgttcctgattccacgggccggttggctagctgggctgctttgcccggacccccggccgctggaactggcattactgattctgggcgtgggtctgctggatttctgcggacaggtgtgcttcacgcccctggaggcccttcttagcgatctttttagagatcctgaccactgtcggcaggcctactctgtgtacgccttcatgatatctcttggtggctgtttgggttatctcctccccgccattgactgggatacaagtgcgcttgctccttacctaggcactcaggaagaatgtcttttcggtctgttaaccctgatattcctgacctgcgtcgcagcaaccctgttggtggcagaggaagctgctctgggcccaaccgagcccgccgagggcctaagcgctccatcccttagtccacattgctgtccatgcagagccagattggccttcagaaacttaggggctcttctgcctcgcctccatcaactctgctgtcgcatgccgcggacccttcgcaggctctttgtggcagaactgtgttcctggatggccctcatgactttcaccttattctacactgactttgtgggagaaggtctttaccagggcgtccctcgagcagaacccggcacagaagcaagacgacactatgatgagggggtcaggatggggagcctaggcctgttcctccagtgcgctatcagcctcgtgttctcactagttatggataggttagtgcaacgatttggtaccagggccgtttacctggcctctgtggcagcatttccagtggctgcgggagcaacctgcctgtcacactcggtcgccgtggttactgcttcagctgcattaaccgggttcactttcagcgcccttcaaatcctgccctacactctcgcgagtctgtatcaccgcgaaaaacaggtatttctgccaaagtatcgcggcgacactgggggcgcctctagcgaggactcgttaatgaccagctttttacctggacccaagccaggagctcctttccctaacggccacgttggtgccggaggctccggcctgctgccccctcccccggccttatgtggtgccagcgcttgtgacgtatcagttcgtgttgtggtcggcgaaccgaccgaagcacgagtggtgccaggacgcggtatatgtctggatctggccatcctggattcagcctttctgctctcccaagttgcgccctctctgtttatgggatcgattgttcagctttcacagtccgtgacagcatatatggtttcagcagccggactgggactagtggcaatctacttcgctactcaggttgttttcgataaatcagatttggccaagtactccgcctag

SEQ ID NO: 135519 - DNA, 1293 bp, synthetic construct
  misc_feature 1..1293: note = Description of Artificial Sequence: Synthetic coding sequence
  source 1..1293: mol_type = other DNA
atggaagggagcgccagccctccggagaagccacgagcccggccagcagccgctgtactgtgtcgcggccctgtggagcccttggtcttcctggcaaattttgctttggttctgcagggccccttgaccacgcagtacctgtggcaccgattctcggctgacctcgggtacaatggcactcgccagagggggggatgcagcaacagatctgcagaccctacaatgcaagaagtggaaacgttgacatcacactggaccctgtacatgaatgtgggcggatttttagttggcctgttttcctccacgctgcttggcgcatggtctgattcagtgggcagaaggccactgcttgtactggcctcactcgggctgcttctacaggcacttgttagcgtcttcgttgtgcagctgcagctccacgtcgggtacttcgtcctggggagaatcctctgcgcattgctgggcgattttggagggctgctggccgcgtcatttgctagtgttgcagatgtgagttcttccaggagcaggacgtttcgtatggcgctgctggaagcatctataggcgtcgctggaatgttggcctccctgctgggaggtcattggcttagagcccaggggtatgctaatcctttctggctcgcgctggccctcctaattgccatgacattgtacgccgccttttgttttggcgagacccttaaggaacccaaatcaactcggctgtttacatttcggcaccatcgctctattgttcaactatacgtggctcctgcgcctgaaaaatctaggaaacacctggccttatattcccttgcgatcttcgttgttattacggtgcactttggagctcaagacattctgacactgtacgagctgtctacacccttatgttgggactcaaagcttatcgggtatgggtccgcggcccagcacctgccttatctcacctcgctgttggccctgaaactgttacagtactgcctggccgatgcctgggtcgctgaaatagggctcgctttcaatattctcggaatggtcgtgtttgccttcgcaactataacgcctctgatgtttaccggcgccctgttctcagcagtggcgtgcgtgaatagcctggcgatgctgaccgctagcgggtttaattctctgtacccagcaacactgaatttcatgaaagggtttccattcctgttaggggcaggcttgctgctaataccggcagtcctgattggcatgctcgaaaaagcagatccacatctagaattccagcagttccctcagagcccatag

SEQ ID NO: 135520 - DNA, 1380 bp, synthetic construct
  misc_feature 1..1380: note = Description of Artificial Sequence: Synthetic coding sequence
  source 1..1380: mol_type = other DNA
atggagggttctgctagtcctcctgagaaaccacgggcaaggcctgccgccgctgtcctgtgtcggggacccgtcgagcccctggtattcttagcaaatttcgctttggtccttcagggtcctcttaccacacagtacttgtggcatagatttagcgctgatctggggtacaatggaacgaggcagcgaggtggctgctctaaccgctcagctgacccaaccatgcaggaggtcgaaactctgacatcacactggactttatacatgaatgtgggagggttccttgtgggattgttctccagtacactgctcggcgcttggagcgactcagttggtcgaagaccacttctggtgttagctagtctggggttgcttctccaagcactcgtcagcgtctttgttgtgcagctacagctccacgttggatatttcgtgttgggcaggattttgtgcgctctgcttggtgatttcgggggcttactcgcagcaagttttgcgtccgtcgccgatgtgagctcaagtcgttcaagaacatttagaatggccctcctggaagctagtatcggagtggcagggatgctggcaagcctcctgggcggtcactggctcagggctcaagggtacgctaatccgttttggcttgcactcgctctgctgatcgccatgacgctgtatgcagccttctgctttggggaaacgctaaaggaaccgaagtctacaaggctatttacatttcggcatcaccggagtatagttcagctctacgtcgccccagcgcccgagaagtctcggaaacaccttgcactctacagcctggcaatattcgtcgtgattaccgttcatttcggggctcaggacattctgactttatatgaacttagcacccccctctgttgggacagcaagttgatcgggtacggcagtgccgcacagcacttaccttatctgaccagcctcctggcacttaaattacttcagtattgtctggcagatgcatgggtggctgagataggcctcgcttttaatattctgggaatggtagtttttgctttcgctaccatcacgccattgatgttcaccggctacgggctcctctttctgtcactggtaattacccctgtgatccgggccaagctcagtaaactagtacgcgaaacagagcagggtgctctcttctctgctgtagcctgtgtgaactcattagctatgttgaccgcgagtgggatatttaattcactttaccctgccaccctgaactttatgaagggattccctttccttttgggagccggtctgttactgattcccgctgtcctcattggcatgttggagaaggctgacccacaccttgagttccagcaatttccacagtctccttag

SEQ ID NO: 135521 - DNA, 1428 bp, synthetic construct
  misc_feature 1..1428: note = Description of Artificial Sequence: Synthetic coding sequence
  source 1..1428: mol_type = other DNA
atgagccccgaggtgacttgtcctaggaggggccaccttccacgatttcaccctcggacctgggtggagcccgtggtcgcatcttcccaggtcgctgcctccctttacgacgccggcctgctgcttgtggtcaaagcatcttatggcacaggggggtcctcaaatcacagcgccagcccatcacctagaggcgctttagaggaccaacagcaacgcgctatttccaatttttacatcatttacaaccttgtggtgggtctgagccccctgctgtccgcttacgggctgggatggctgtcagatcggtaccaccgaaagattagtatatgcatgtcactactaggctttctcctatctcggctgggcttactgttgaaagtgttactggattggccagtggaagtcctgtacggagccgcggccctgaatggactgtttggaggcttctctgccttctggtcgggggtcatggccttgggcagcctaggctctagcgagggtcgtcgatctgtaaggctcatcctgatcgatctgatgctgggcctcgctggattttgcggaagtatggcctctggccacctgttcaagcaaatggcaggccactcaggtcaaggcttgattctcactgcctgcagcgtcagctgcgccagttttgctctcttatattcccttttggtgctgaaggttcccgagtccgtggctaagcccagtcaggagctgccggctgtggatacggtttccggaaccgttggaacctatcgaacactggatcctgaccaactagatcagcaatacgctgtgggtcacccacccagccccggaaaggccaaacctcacaagacaacaatagccctcctctttgtgggtgctataatttatgatctggctgtggtaggcacagtggatgttatcccactgttcgtcctgagagaacccttggggtggaatcaggtacaggttggctacggtatggccgccggatatacaatattcatcacgtctttcctcggtgttttggttttcagccgctgctttagagatacaaccatgattatgatcggaatggtcagctttggttctggagctttgctcctggcgttcgtaaaggagacctacatgttctacatcgcacgtgcggttatgctgttcgctctgatcccagtgacaactatccgcagtgctatgagcaaactaattaaggggtccagttatggaaaagtcttcgtgatcttgcagctatctctcgctttgaccggcgtggtgacatccaccctctacaacaagatctatcagttgacaatggatatgtttgtgggctcttgtttcgcattatcttcttttctctctttcctggctattatccccataagcattgtggcatataagcaggttcctttgagtccctatggagatatcatcgagaagtag

SEQ ID NO: 135522 - DNA, 1713 bp, synthetic construct
  misc_feature 1..1713: note = Description of Artificial Sequence: Synthetic coding sequence
  source 1..1713: mol_type = other DNA
atggaggctcccgaggagcccgctcctgttcgcggtggccctgaagccacgctggaagtgcgcgggtctcgctgtctgcgcttaagcgccttcagagaggagctcagagccctgttagtgttggcaggccccgcattcctggtacagctgatggtgtttctgatctcgtttattagcagcgttttttgtggccacctgggaaaactcgagctagacgccgtgaccctggctattgccgtcatcaacgtgaccggagtctctgtagggttcggtctgagttccgcttgtgacacgctgatctctcaaacttacggatcacagaacttaaaacatgtgggcgtgatactccagcggtccgcactcgtattgctgctctgttgtttcccatgctgggcgctctttctcaatacacaacatattcttctactcttccggcaggaccctgatgtgtccaggctgacccaaacttacgtcactatattcatccccgcactccctgccacctttctgtatatgctgcaagtgaaatatctactgaaccaggggatcgtcctcccccagatagtcactggcgttgccgccaaccttgtgaatgctctggccaactacctctttctgcatcagcttcacctgggtgtgattggaagcgcacttgcaaaccttatcagccagtacacactggcactgctgctcttcctctacattctgggcaaaaagctacaccaggccacgtggggcgggtggtccttagaatgtctgcaggattgggccagcttcctgaggcttgctatcccatctatgttgatgttatgtatggagtggtgggcatacgaagtgggaagcttcctgtcaggcatattgggcatggtcgaactgggggcgcaaagtatcgtttatgaattagcgatcatagtctacatggttcctgctggcttcagcgtggcggcatccgtgagagtggggaatgcgctgggggctggggacatggaacaggctagaaaatccagtacagtctcccttctcattaccgtcctcttcgccgtggcattcagtgttctgctcctctcctgcaaagaccatgtgggctatatctttacgacggatagggatatcatcaaccttgtggcccaggttgtgcccatatacgccgtctcacatctgtttgaagccctggcctgcacctccggaggggttttaagaggatctggcaatcagaaagttggggctatcgtcaatacaattgggtactacgtcgttggcttacccatcggcattgctcttatgttcgctactaccctcggagtgatgggcctctggtccggcatcatcatctgcacagtgtttcaggcggtgtgcttccttggctttatcatacagcttaattggaagaaggcatgccagcaggcacaggtgcacgcaaatttgaaagtgaacaacgtaccccggagcggaaattcagccctaccccaggacccgttacacccggggtgtcctgaaaacctggagggcattcttacaaatgacgtcggtaagaccggggagccacagtctgatcagcagatgcgtcaggaagagcctctgcctgagcatccgcaggatggcgcgaagctgtccagaaagcagctggtcctgcgccgggggctgttgctgctcggggtatttctcattctactggtgggtatcttagtgcggttctatgtgcgcattcagtag

SEQ ID NO: 135523 - DNA, 1761 bp, synthetic construct
  misc_feature 1..1761: note = Description of Artificial Sequence: Synthetic coding sequence
  source 1..1761: mol_type = other DNA
atggaagctccagaggagcccgccccagtgcgcggtggtccagaggcgactttagaggtgaggggatctagatgtctgagactcagtgccttccgcgaggagctgcgggccctcttggtgctcgcgggccctgcctttctggttcagttaatggtgtttttgatatcgttcatatccagtgtgttctgtggccacttgggcaagctcgagctcgacgccgtgacactggcaattgccgtgatcaatgtaacaggcgtgagcgtcggtttcgggctgagcagcgcatgtgacacattgatttctcaaacatacggatcccagaatctcaagcacgtaggggtcatccttcaacgcagtgctttagtcctcctcctttgttgttttccatgttgggcgctattcttgaatacacaacacatcctgcttctcttcaggcaggacccagacgtatctaggcttactcagacatatgtgacgatcttcattcctgctctccctgcaacgtttctgtacatgctccaggtgaaatacctgctaaaccagggcatcgtcctcccacaaattgtgacgggggtagcagcaaacctagtaaacgcacttgccaattacctgttcttgcaccagctccatctaggtgtgattggtagtgccctggccaacttaatcagtcagtatacactggccctgctgctgttcctgtacatccttgggaagaagctccaccaagccacatggggaggctggtcactggagtgcctgcaggattgggcctcctttttgcgtctggccatcccaagcatgctcatgttgtgcatggaatggtgggcctatgaggtgggttctttcctgtccgggatacttggtatggtggagttaggagcacagagtatagtgtacgaactggccataattgtgtatatggtgcccgcaggctttagtgtcgcggcaagtgtgcgcgtaggcaacgcactcggggcgggagacatggagcaggcacgcaaaagcagcacggtttcactgctgatcacagtactgtttgccgtcgcctttagcgtcctgttactatcctgtaaggaccatgtcggatatatttttacgaccgatagggacatcatcaaccttgtcgctcaggttgtgcccatttacgctgtgagccatctcttcgaagctttggcttgcacaagcggcggagtgcttagggggagcggcaatcaaaaggtgggcgctattgtgaataccatcggttattatgtggtcggactccccattggcattgcactgatgtttgccactacgctgggcgtgatgggcctgtggagtgggatcattatatgtaccgtgtttcaggccgtgtgctttttgggctttatcattcaactgaattggaaaaaggcctgccagcaggctcaagtgcatgccaatctcaaggtcaataatgtgcctcggagtggaaacagcgctctcccccaggatccactccaccccgggtgccccgaaaatcttgagggaatcctcacaaacgacgtggggaaaacaggcgagcctcaatcagatcagcagatgcggcaggaggagcccttacccgagcacccacaggacggagcaaaactctccagaaaacagctagtgttgcggcgtggcttgttactgttgggagttttcctgattctgctcgctggggtacggtggtgtgatcattccagcctccaaccccgtaccttgggcctgcaggctatcttattgtgccagcctcccgaatag

SEQ ID NO: 135524 - DNA, 849 bp, synthetic construct
  misc_feature 1..849: note = Description of Artificial Sequence: Synthetic coding sequence
  source 1..849: mol_type = other DNA
atggtggaactcggggctcaatctattgtatatgagttagccattatcgtgtacatggtgcccgccgggttctccgtcgcagccagcgtgcgcgtcggtaatgctttaggcgctggcgatatggagcaagcacggaagtcgagcaccgtgtctctgctgataacagtcttgttcgccgttgcgttctcggtgctgttgttgtcgtgtaaggaccacgttggttatatattcactacagatcgggacattatcaatctggtcgcccaggtggttcctatatacgcagtgtcacacctgttcgaggctctcgcatgcaccagtggtggcgtcttgaggggtagtggcaaccagaaagtaggagctatagtaaatactattggttattacgtggtcggcctgcctattgggattgccctcatgtttgcgaccacgttaggagttatgggtctgtggtcgggtataataatttgcaccgtcttccaggctgtctgctttctgggcttcatcattcagttgaattggaaaaaggcatgccaacaggcccaggtacacgctaatctgaaagtcaacaatgtgcccaggtctgggaactctgctcttccgcaggatccgcttcatcccggctgtcccgagaacctggagggcattttaactaacgacgtgggcaaaaccggtgaaccccagagcgatcagcagatgcggcaggaggaacctctgccggaacaccctcaggacggggcgaagctcagccgtaagcagctggtgctccgacgcggcttgttgttgctgggtgtatttctgattctgctggttgggattctggttcgcttctatgttagaatccaatag

SEQ ID NO: 135525 - DNA, 1332 bp, synthetic construct
  misc_feature 1..1332: note = Description of Artificial Sequence: Synthetic coding sequence
  source 1..1332: mol_type = other DNA
atggaggctccggaggaacctgcacctgtcaggggtggacctgaggcgacgctggaggtacgtggctctcgatgtctcaggctgtcagcttttagagaagagctgcgtgccctgttggtcttggcaggcccagcctttctggttcagctgatggtgtttctgataagcttcatcagtagcgtgttttgtggacacctgggcaagctcgaattggatgcagtgactctggcaatagctacctatgggtcccagaacctgaagcacgtcggtgtgatcttgcagcggagtgcattggtactcctgctctgttgtttcccatgctgggccctgttcctgaatacccaacacatactgctgctttttcggcaagacccagacgtgagtaggctgactcagacttatgtaaccatcttcattccagcactcccagcaaccttcttgtatatgttacaggtcaagtacctgctgaaccagggtatcgtcctaccccaaatcgtgactggcgtggccgccaacctggtcaacgctttggccaactacttattcctgcaccaattacacctgggagttattggatctgcgctggctaatctcatctctcagtacaccttagcgttactgctctttttgtacattttggggaaaaagttacatcaggcaacgtggggagggtggtcccttgaatgtctacaagactgggcttctttcctgcgtctggccatcccatctatgcttatgctctgtatggagtggtgggcttacgaggtcggatcttttctttcggggatactgggaatggtcgagttgggagcccagtcgatagtgtacgagctggccatcatcgtgtacatggtgccagccggattttccgtggcagcatcagtgcgggtagggaacgctttgggggcaggtgacatggagcaagcccggaagagctcgacggtgagcctgttaattacagtgctattcgcggtcgcctttagcgtgctgctgttgtcatgtaaggaccacgtgggatatatttttacaacagacagggatatcattaatctcgtggcacaagtggttcccatttatgcggtctcacacctttttgaggctctcgcttgcaccagcggtggagtgctgcggggaagcggcaatcagaaggttggcgcgatcgtgaacacaattggctattatgtggtgggcctgccaatagggatcgcccttatgttcgcgacgacgctgggtgttatgggctctggcacccggcaatttgagtctaaacaaagagctagcgagtgggaattctgttcgccttctggctccgcttctccgcgcgtgccttag

SEQ ID NO: 135526 - DNA, 738 bp, synthetic construct
  misc_feature 1..738: note = Description of Artificial Sequence: Synthetic coding sequence
  source 1..738: mol_type = other DNA
atgctgatgttgtgtatggaatggtgggcatatgaggtgggttccttcctcagcgggattctcgggatggtggagctgggagcccagtccatagtgtatgaattggccattatagtgtacatggttcccgccgggttttctgtcgccgcgtccgtgcgagtcgggaacgccctgggcgccggtgatatggagcaggctcgaaagtcttcaacagtgtctttgttgatcactgtgctgtttgcagtggccttctctgttttgttgttgtcttgcaaagaccacgttggctatatatttactactgacagggatatcattaatctggtcgcacaggtggtgcctatttatgccgtttcacatctcttcgaggcacttgcttgtacttccggaggtgtgctccgtggcagtggaaaccaaaaagtgggcgccatcgtgaacactatcggctactacgtggtagggctgcctattgggatcgccctcatgttcgcaacaaccctgggcgtgatgggctgccctgagaatctggagggaatcctcacgaacgatgtcggcaaaaccggcgaaccacagtcagatcagcagatgagacaggaggagcccctgcctgaacatccccaggatggagcgaaactgagtaggaaacagttggtgcttcggcggggcctgctgctccttggcgtctttctgatacttctcgttggaatcctggtccgtttttacgttaggatccagtag

SEQ ID NO: 135527 - DNA, 1761 bp, synthetic construct
  misc_feature 1..1761: note = Description of Artificial Sequence: Synthetic coding sequence
  source 1..1761: mol_type = other DNA
atggaggcgcctgaggaacctgcccccgtgcggggtggccccgaggcaactcttgaggttagaggatctaggtgccttcgtctgagtgctttcagggaggagctacgtgctctgcttgtgcttgccggcccagccttcctggtgcagctgatggttttccttatcagctttattagctcagtgttctgcggacaccttgggaagttagagctcgatgcagtcacgctggccatcgcggtgattaatgtgaccggtgtctctgtcggcttcggcctgtctagtgcctgtgacaccctgatcagccagacctacgggtcacaaaacctgaagcatgttggggtgatactgcagaggagcgccctcgttctactcctctgttgtttcccctgctgggcccttttcctgaatacacaacacattctgctgctgttcagacaggaccccgacgtatcaaggcttacacagacttacgtcacaattttcatacccgccctgccagccactttcctttatatgctccaagttaagtacctcctgaatcaaggcatcgtcttgcctcaaatcgtaactggagtggcagccaacctggtcaacgccttagctaactatttattccttcaccaactccatctcggcgttatcggctccgcccttgccaacttgatctctcaatatacactcgcccttctgctttttctgtatatccttggcaaaaagcttcaccaagccacatgggggggttggagtctggaatgtctacaggactgggcctcctttctgcggttggcaatcccaagcatgctaatgttgtgcatggagtggtgggcctatgaagttggttcattcctttccggcattctgggaatggtggagcttggagcacagagtatcgtgtacgagttagccattatcgtgtacatggtaccggctggatttagtgttgctgcttccgtacgggtcggcaacgcactgggagctggagacatggagcaggctagaaagagcagcactgtaagtctcctcattaccgtattgtttgctgtggcattctcggtcctgctgcttagctgtaaagaccatgtcgggtacatatttactacagaccgcgacataatcaatttggtggcccaggtggttcctatctatgctgtgagtcacctgttcgaggccttagcttgtacctccgggggggtgcttcggggcagtgggaaccaaaaagtcggggccatcgtgaatactatagggtactacgtggttgggttacctatcggcatcgccctgatgtttgccactacactgggcgtgatggggctgtggtccgggattattatttgtaccgtattccaggcagtgtgcttcctgggcttcattatccagttgaactggaagaaagcttgtcagcaggctcaggtgcacgccaacctcaaggttaacaatgtgcctagatcgggaaacagcgctctccctcaggaccccctgcaccctggatgtcctgagaatctggagggcatcctcaccaacgacgtgggcaagacaggggagccacaatcagaccagcagatgcggcaggaggagcccctgcccgagcatccccaggacggcgccaagttaagccgtaagcagctcgttctgaggagggggttgctgctcttaggagttttcctgattcttctcgccggggtcagatggtgtgaccactcctccctccagccaaggacattaggactgcaggctatcctgctatgtcagccaccagagtag

SEQ ID NO: 135528 - DNA, 735 bp, synthetic construct
  misc_feature 1..735: note = Description of Artificial Sequence: Synthetic coding sequence
  source 1..735: mol_type = other DNA
atggaggcacctgaagaacccgctcccgttaggggcggtcccgaagccacccttgaggttcgcggcagccggtgtctcaggctaagcgcgttcagagaagagctgcgggccttgctcgtgttagctggacctgccttcctggtgcagctcatggtcttcctcatctcattcatatcctccgttttctgcggacatctgggcaagctcgagctcgatgctgttaccctggctattgcggttatcaacgttactggagttagtgtaggattcgggctgagctcagcttgcgacactctgatctctcagacttacggctcacagaacctgaagcacgtgggcgtgatcttacagaggtcagccctggtcctgcttctctgctgtttcccttgttgggccctctttctgaacacgcagcacattctactgctgttccgtcaggatccagatgtttcgcgtttaacccaaacgtatgttacgatcttcatccccgcgctgccagctacctttctgtatatgctgcaggtcaagtacctgttgaaccagcgcctgtgtacaggaaagctggattttccagtgcatcctggcagcacccctctctccctgcacccgagggagaagactgccagtagctacatgggccggttggtgcccagagttccagcagggttgggcctcctcccgcctcctggccatccccaacatgcgcacgccgtgcacggtgtcgtggggttatag

SEQ ID NO: 135529 - DNA, 1809 bp, synthetic construct
  misc_feature 1..1809: note = Description of Artificial Sequence: Synthetic coding sequence
  source 1..1809: mol_type = other DNA
atggacagccttcaggatacagtggcccttgatcacggtggctgttgtccagccctttcaaggttagtgccacgcggtttcggcaccgaaatgtggacactattcgctttaagcggaccactattcctattccaggtcctgactttcatgatttatatagtctctaccgtcttctgtgggcatctgggaaaggtggaactcgcatcagttacgctggcggtcgccttcgtaaacgtgtgcggcgtttccgttggggttgggctctcctcagcctgcgatacacttatgtcacagtcttttggcagtccgaacaaaaagcacgttggagtgatactccagagaggggcgctggtactgctcttgtgttgcctcccctgctgggcccttttcctgaacacacagcacatccttctgctctttagacaagatcccgatgtaagcaggctgacccaggattacgttatgattttcattcccggtctaccagtgattttcttatataatttgctggctaagtaccttcagaaccagggttggctgaagggccaggaagaggagtcccccttccaaacccccggtctgagcattctccaccccagccattcgcatttgtcacgggcaagctttcatctgtttcaaaaaatcacttggccccaagttctgagtggcgtcgtcgggaactgtgttaacggcgtggccaactacgctcttgtgagcgtactgaatctgggagtcagaggcagcgcatatgcaaacataattagccagttcgcccagaccgtgtttctgctgctgtatatagtgttgaagaagctacaccttgagacatgggcgggatggtcctcccaatgccttcaggattggggaccctttttctcacttgctgttccttccatgcttatgatctgcgtagaatggtgggcgtacgaaatagggagttttcttatggggctgctgtccgttgtagatctatccgcccaagcggtaatatacgaggtggcgacggttacgtatatgattcccctcggcctgagcattggagtgtgtgtgcgggtcgggatggcactgggggctgccgacactgtccaggcaaaacggagcgcggtctccggagtgttgtccatcgtgggcatctctctagtcctaggaaccctgattagcattttaaagaaccagctgggacatatctttacaaatgatgaggacgtgatcgctctcgtcagtcaggttctccctgtttatagcgtttttcacgtgtttgaagcaatttgttgcgtatatgggggagtattacgcggaaccggaaaacaagcgttcggcgcggcagttaatgctatcacatactacataattggcctgcccctgggcatcctgttgacgtttgtggtcaggatgcgcatcatgggcctgtggctgggaatgctggcctgtgtatttctggccacggctgcattcgtagcctacacggccagactggattggaaactcgcagcagaggaggccaaaaaacacagtggccggcaacagcaacagagggccgaaagtacagcgacgagacccggaccggagaaggctgtgctatcgagtgtggcaaccggatcctcacctggtatcacattaaccacttattctaggtcggagtgccatgtagattttttccggacgcctgaagaagctcatgcattgtcagccccaacatccagactgagcgttaagcaacttgtaattagacggggagccgcccttggagccgccagcgcaaccctgatggtcggccttaccgttcgaatcctcgcgaccagacattag

SEQ ID NO: 135530 - DNA, 1743 bp, synthetic construct
  misc_feature 1..1743: note = Description of Artificial Sequence: Synthetic coding sequence
  source 1..1743: mol_type = other DNA
atggactcactgcaagatacagtagccctggaccatggcggttgctgtcctgctctctctcgactggtgccgagagggtttgggacagagatgtggacgctgttcgctctgagcggaccactgtttttgtttcaagtgctaaccttcatgatatatattgtgagtactgtgttttgcggtcatctgggtaaagtggagcttgccagtgtcaccctagccgttgcgtttgtcaatgtatgtggagtgtccgtgggggtcggcctctcatcagcttgtgacacactcatgagccagagcttcggatctccaaataagaagcacgtcggcgtaattttgcagcgtggagccttagtgttacttctttgttgtctaccttgctgggctttgtttctcaatacccagcatatacttcttctattccgacaggatcccgatgtgagccggttaactcaggactatgtcatgatctttattcccggtctgcctgtgatattcctttataatctacttgccaaatatctccagaatcagaagatcacatggcctcaggttctcagtggagtggtgggtaactgtgtgaacggtgtcgctaactacgccctagtgagcgtacttaatttgggagtgcgcggttcagcctatgctaatatcatttcacaattcgcccagactgtcttcctgctgctctatattgtgcttaaaaaactgcacctggagacatgggccggatggtctagccaatgcctgcaggattggggcccatttttcagcctggctgtgccctctatgctgatgatctgtgtcgagtggtgggcctatgaaatcggctcattcctaatgggactgctgtctgtagtggatctgagtgcccaggctgtgatttacgaagtcgcgaccgttacctacatgagacactcccatagattagcctatgcggcccacgtcactcgcatccctctggggctctccatcggagtgtgcgttagggtggggatggccttgggggccgccgatactgtacaagccaagagaagcgcagtctcaggcgttctgtccatcgtcggaatctcacttgttttgggcactctgatatcaattcttaaaaaccaacttggccatatcttcacaaatgatgaggacgtaattgcactggtgtctcaggtgttgccggtgtatagcgtatttcatgtcttcgaggccatctgttgtgtctacggtggcgtgctgcgcgggacgggaaagcaggccttcggggccgctgtaaatgctatcacttactacattatcggcctgcccttgggaatcctactgacgtttgtggtgaggatgaggatcatgggcttgtggctcgggatgctggcctgtgttttcctcgcaaccgccgcttttgtggcatatactgcacggctggattggaagctcgccgccgaggaggccaagaaacacagcggacgacaacagcagcaacgagcagagtccacggcaacacgacctggacccgagaaggctgtattgagtagtgtggccactggcagtagccccggaattacactgactacatactctaggtccgaatgccatgtggacttcttcagaacaccggaggaggctcacgcgcttagcgcaccaacctctaggctcagtgtgaagcagttagtgattcgcaggggggcggctctcggcgcagcttccgccacccttatggtggggcttacggtacggatcttagcaacgcgccattag

SEQ ID NO: 135531 - DNA, 1092 bp, synthetic construct
  misc_feature 1..1092: note = Description of Artificial Sequence: Synthetic coding sequence
  source 1..1092: mol_type = other DNA
atggatagcctgcaggatacagtcgcactagaccatggggggtgttgccctgctctgtctcgacttgtcccgcggggttttggtacggagatgtggacactgtttgctctcagcggccccttgtttctcttccaagtccttacattcatgatctatatcgtaagcactgtgttttgtggccacctgggaaaggtggaactggcgtcagtcacacttgccgtcgcattcgtgaacgtttgcggcgtgtccgttggcgtaggcttgagctctgcatgcgacacgttaatgagccagtccttcggaagccctaacaagaagcatgtgggcgtaatactgcagcgcggcgcactggtgctcctgttatgttgcctgccatgttgggctctattccttaatacacaacatatactcctgctctttaggcaggaccccgatgtttcaagacttactcaggactacgttatgatattcattcctggtctgcccgtcatttttctctacaatcttctggcaaagtaccttcagaaccagaagatcacgtggccacaggtcttgagcggggtcgtcggtaattgtgtcaacggtgtcgcaaactatgccctggtgagtgtgctgaacctcggggtgagggggtccgcttatgccaatatcattagccagttcgctcagaccgtatttttgctcctatacatagtgcttaaaaaactgcacctggagacttgggccggatggtctagccaatgtctgcaggactggggaccattcttctcccttgcagtgccgtccatgttgatgatctgcgtggaatggtgggcctatgaaattggcagctttcttatgggccttctcagtgttgtcgacttaagtgcccaagcagtaatctacgaagtcgctacggtgacttacatgattcctctgggactgtcaataggggtctgtgtcagagtcgggatggcactgggagccgcagacactgtgcaggccaaacgctccgccgtgagcggagtactgagcatagtgggtatctcccttgtgctaggtacattaatttcaattctgaaaaaccagctgggccatatttttacaaactag

SEQ ID NO: 135532 - DNA, 891 bp, synthetic construct
  misc_feature 1..891: note = Description of Artificial Sequence: Synthetic coding sequence
  source 1..891: mol_type = other DNA
atgatttatatcgtgagcacagttttttgcgggcacttaggtaaagtggagctggccagcgttaccttagcggttgccttcgtcaatgtctgcggagtctccgtcggggtggggttgtccagcgcctgtgatactttaatgtcacagtcttttggtagcccgaataagaagcacgtaggagtcatccttcagagaggtgccctagtgctcttgctctgctgccttccatgctgggcacttttccttaatacccagcacatcttgctgctctttcggcaggaccctgatgtgagtcgattgacacaggattatgttatgattttcatccctggtttgccagtcatttttttatacaacttgctggccaagtacctgcagaatcagaagatcacttggcctcaggtactgtcaggtgttgtcggcaactgtgtgaacggcgtggccaactacgctctggtgagcgtgcttaacctgggggtgcgggggagtgcttatgcaaacatcatctcccagttcgctcagacagtgttcctcttgttgtacatcgtcctcaagaagctccacctggagacgtgggccggatggtcttctcaatgtctgcaggattggggccccttcttctccctggctgtgccatccatgttaatgatatgcgtggaatggtgggcctatgagatcggcagcttccttatgggtctcctgtcagttgtggacctttcagcgcaagccgtaatctacgaggttgctacggtcacgtacatgatccctctgggcctcagcattggtgtgtgtgtgcgggttgggatggcactgggggcagctgatacagtccaggctaagcgtagcgctgtgagcggggtgttgtccatcgcacgaagcgacccgtggtag

SEQ ID NO: 135533 - DNA, 531 bp, synthetic construct
  misc_feature 1..531: note = Description of Artificial Sequence: Synthetic coding sequence
  source 1..531: mol_type = other DNA
atgaaggccagcgggactctgcgcgagtacaaggttgtggggaggtgtttgccaaccccgaaatgtcatacccctccactttacagaatgcggattttcgcccccaatcacgtggtcgctaaatccaggttttggtatttcgtttctcagctgaaaaagatgaagaagtcatccggcgaaattgtctattgtggtcaggtgtttgagaaaagccctcttcgcgtgaaaaatttcgggatttggctgagatatgatagtagatcaggcacccacaatatgtatcgtgaatacagagatttgaccacagcgggtgcagttacgcaatgctacagggacatgggcgcacggcaccgagcccgcgctcacagtatacagattatgaaggttgaggagattgccgccagcaagtgtcgtaggcccgctgttaagcaatttcatgacagtaagattaaattccccctccctcatagggtcctgaggaggcagcataaaccacgatttacaactaaacggccaaatacctttttttag

SEQ ID NO: 135534 - DNA, 1995 bp, synthetic construct
  misc_feature 1..1995: note = Description of Artificial Sequence: Synthetic coding sequence
  source 1..1995: mol_type = other DNA
atggactcatccacgtggagtccaaaaacgaccgcagtgacccgtccagttgaaacacacgaactaattcggaacgccgcagatattagtattattgtgatttattttgtcgtggtgatggccgtgggtctatgggccatgttctcaacgaaccggggaactgtaggcggattttttctagccggacgctccatggtatggtggccaatcggggccagtctgttcgcgagcaatattggcagcggccattttgtcggccttgccggcactggcgctgcatcaggtatagctatcggcggattcgagtggaacgctctcgtgttggtggtggtgctggggtggctcttcgttcccatctatatcaaagcaggcgtcgtgaccatgcctgagtatctccggaagaggttcggaggacaacgtatccaagtttatctgtcccttttaagtctactgctctacatttttactaaaatctctgcagacatattttcaggcgccatttttataaacttggcactgggtttaaacctttatctggcgatatttctgctgctggctattaccgcactctacacgatcaccggcggtctcgctgccgttatttacacagacacactccaaaccgtgatcatgctcgtgggttccctcatactgacaggctttgcgtttcatgaggtggggggttacgatgcctttatggagaagtacatgaaagctattcccacaattgttagtgacggtaacacgacatttcaagaaaaatgttatactccacgggccgacagcttccatatatttagagatcccctcactggcgacttgccctggcccggctttatatttgggatgtcaatcctcactctgtggtactggtgtacagaccaggtgatcgtgcaacgctgcctttcagccaaaaatatgagccacgtcaaaggtggatgcatcttgtgcggatacctcaaattgatgccaatgttcattatggtgatgccgggcatgatcagccgaatcctgtacacagaaaagatcgcgtgcgtagtgccatctgagtgcgagaaatattgcgggacaaaagtgggatgcactaacatagcctaccccacactggtggtggaacttatgcctaatggactgagggggctgatgctttcggtgatgcttgcaagcctgatgagctctcttacttcgatttttaattccgcctcgaccctgttcaccatggacatatacgccaaagtgcggaagcgtgcctccgagaaggagctcatgattgctggcagactgttcatcctcgtgttgatcggcatatctatcgcttgggtgcctattgtccagtctgctcagtcgggtcagctgttcgattatatacaatctattacatcttacctgggacccccgatcgccgccgtttttttactcgccatattttggaagagagtgaatgaacctggagccttttggggactgattttaggactcctcatcgggatatcccgtatgatcactgaatttgcgtacggaactggctcatgtatggaaccaagcaactgtccaacgattatctgcggtgtgcactatttgtattttgccattatcctgttcgccatcagcttcatcactattgttgttatctcactactaaccaagccaattcccgacgtgcacctctacaggttgtgctggagccttcggaatagcaaggaagaaaggattgatcttgacgccgaggaggagaacatacaggaaggcccaaaagagactatcgagatagagacacaggtcccagagaaaaagaaaggcatttttagacgggcgtatgatcttttttgtgggctggaacagcatggggccccaaagatgacagaggaggaggaaaaagcaatgaaaatgaagatgaccgatacatctgaaaagccgctttggaggaccgtcctcaacgtgaacggaatcatcttggtgacagtcgctgtgttttgccatgcatattttgcttag

SEQ ID NO: 135535 - DNA, 1614 bp, synthetic construct
  misc_feature 1..1614: note = Description of Artificial Sequence: Synthetic coding sequence
  source 1..1614: mol_type = other DNA
atgccggagtacctgcgcaaacgtttcgggggccagcgcattcaagtatatctctcactgctcagcctattgctctacatatttacaaagatctccgctgatatatttagtggtgccatcttcattaacctggctttgggtctcaacctttacctggcaatttttctgctgttggcgattaccgccctgtacactattactggaggcttggccgccgtaatctacacagacactttgcagacagttattatgttagtcggttccctgattttgacaggttttgccttccatgaggttggaggatatgacgcttttatggagaagtacatgaaggcaattccaactatagtatctgacggtaacaccactttccaggaaaagtgctatacccctcgtgctgattcctttcatatttttagggaccctctcacaggtgacctgccttggcccggctttatcttcggaatgtcaatcctgacactgtggtactggtgtacagaccaagttatcgtgcaacgatgcctgtccgccaagaatatgtcccacgttaaaggagggtgtatcctttgcggctacctgaaactgatgccaatgttcattatggtgatgccgggcatgatctcccggatcctgtacacagaaaaaattgcctgcgtggtcccatctgagtgcgaaaagtactgcggaaccaaggtaggctgtactaacatcgcctaccctaccctcgtggttgaacttatgcctaacggtttacgcggacttatgctgagtgtaatgctcgcttccttaatgagttcgcttacatcaatctttaattccgcttctaccctgtttaccatggacatctacgccaaggtgagaaagcgcgctagtgagaaggagctgatgatcgccggtaggctctttatcctcgtgctaataggcatctccattgcctgggtgcctattgtgcagtctgcccaatctggccagctgttcgattatatacagagtattacttcttaccttgggcctccaatagcagccgtgtttctcctcgcaatattttggaagagagtcaacgaaccaggggccttttggggccttatcctgggcctactgattgggatatccagaatgataacagaatttgcctatggcaccggatcctgcatggaaccaagcaattgtccgactataatctgtggcgtgcactatctgtacttcgcaattatccttttcgcgatatcattcatcacaattgtggtgattagcctgctaaccaagcccatacccgacgtgcacctctacaggctttgctggtcccttcgaaactcaaaagaagaaaggatcgatctggacgcagaggaggagaatattcaggaaggaccaaaggagaccattgaaatcgagactcaggtgccagaaaaaaaaaaagggatcttccgcagggcttacgacctgttttgcggcctggagcagcacggcgcaccaaagatgactgaggaggaggagaaggctatgaagatgaaaatgactgatacctctgagaagcctctctggcgcaccgtactgaatgtgaacggaatcattctggtgacggtcgcagtgttctgtcatgcttattttgcatag

SEQ ID NO: 135536 - DNA, 1191 bp, synthetic construct
  misc_feature 1..1191: note = Description of Artificial Sequence: Synthetic coding sequence
  source 1..1191: mol_type = other DNA
atggaggtgaagaacttcgctgtctgggattatgtcgtctttgccgctttatttttcattagctccggcattggggtcttcttcgccatcaaggaacgcaagaaagctacaagtagagaattcttggtgggcggcaggcagatgtccttcgggccggtggggctgtctctcactgcgtccttcatgtccgctgtgaccgtgctgggcaccccctctgaagtgtatcgctttggcgcctcattccttgtcttcttcatcgcatacttgtttgtcatcctgctcacttcagaacttttcctgcctgtcttttataggagcgggattaccagtacatacgaatatctgcagttacgatttaataaacctgtcaggtatgcggcaactgtgatatacattgtccagacaattttgtatactggagtggtcgtctacgcacctgcactcgcactgaatcaggttaccgggtttgatctgtggggatccgtgttcgccactggtatagtttgcactttctactgcactttgggaggccttaaggccgtcgtttggacagacgcttttcagatggtcgtgatgatcgtgggcttccttactgttctaatccaggggtccacgcatgctgggggcttccataacgtgctcgagcaatctacgaacgggtcccggctacatatcttcgacttcgatgttgatccgttaaggcggcatactttttggaccataacagtaggcgggacgtttacatggctggggatatatggggttaaccaaagtaccatccaacgctgtatcagctgcaaaactgagaaacacgctaaacttgctctctatttcaacctgttggggttatggattattttggtgtgcgctgtgttcagtggcttgataatgtacagccatttcaaggactgcgacccatggacttccggtatcatctctgcacccgatcagctgatgccatatttcgttatggaaattttcgctaccatgccaggccttccaggcctgttcgtggcgtgcgcattttccggaaccctttcgacagtcgccagttcaataaatgccctggctacagtcacatttgaggacttcgtgaaaagctgtttcccgcaccttagcgataaattgagcacatggataagtaaaggactttgtcgctactcttggtggaccttttattcgatcagctag

SEQ ID NO: 135537 - DNA, 1857 bp, synthetic construct
  misc_feature 1..1857: note = Description of Artificial Sequence: Synthetic coding sequence
  source 1..1857: mol_type = other DNA
atggaagtcaaaaacttcgcggtttgggactatgtcgtttttgcggccctcttttttatctcatccggaatcggagtcttttttgctatcaaggagcgcaagaaagctacctcacgcgaattcctagttggaggcagacagatgagttttggccccgtcggcttgtccctgacagcgtcttttatgtctgcagtgacagttctgggaaccccatcggaagtttaccgtttcggcgcatctttcctggtgttcttcattgcatacctgttcgtgatcctgttgacctcagaactcttcctgccagtattttatcgcagcggaattacatccacgtacgagtacctgcagttaaggttcaataagcctgtgcgctacgcagccacagtaatttacatcgttcagacaatcctatatacaggagtggtcgtctacgccccagccttggctctcaaccaggttactggctttgatctgtgggggtcagtgttcgcaaccggcatagtgtgtactttttactgtacattggggggactgaaggccgttgtctggactgatgcttttcagatggtggttatgatcgtgggctttttgaccgtactcatccagggatcaacccatgccggcgggttccataacgtgctggagcagtccactaacggtagtcgtttgcatatctttgattttgacgtggacccgctacggaggcacaccttttggacgatcacggtgggaggaacattcacatggttaggcatctacggggtgaatcagagtacgatccagagatgcatttcctgtaaaaccgagaaacacgccaaactggccctctactttaaccttctggggctgtggatcattctcgtttgtgccgtgttcagtggccttattatgtactcccattttaaagactgtgacccctggacatcaggaatcatttctgctccagaccagctaatgccctactttgttatggaaatttttgccaccatgcctggactgcctggcctgttcgtggcatgcgcctttagtggcactctatccaccgtggcaagctcaatcaacgccctggcgactgtcacattcgaggacttcgtgaagtcttgcttcccacacctgagcgacaagctctccacttggatctcaaagggtctctgcctgctctttggggttatgtgcacgtctatggccgttgcagcttcagtgatgggcggcgttgtccaagcatctctgagtatacacggaatgtgtggaggcccaatgttgggtctgttctccctgggcatagtgttcccattcgtcaattggaaaggagcgctcgggggcctcttaacggggattactctgtccttttgggtagctatcggtgccttcatctatcctgcccccgcaagcaagacatggccgctccctctgagcacagatcagtgcattaagagcaacgtgactgccacaggaccccccgtcctcagcagtcgccctgggatcgcggacacttggtactcaatttcgtatctctattatagcgcagtcgggtgtctgggttgtattgtcgctggagtaataatttcccttatcacaggtcgtcagaggggggaagatatccaacctctccttatccgccccgtttgtaacctcttctgcttctggtcaaagaagtacaaaacactctgttggtgcggcgtgcaacatgactcaggcaccgagcaggaaaatctggagaacggaagcgctcgtaaacaaggcgccgagagcgtgctgcagaatggccttcgacgggaaagccttgtacacgttccaggatatgatccaaaggacaagagctacaacaacatggcctttgaaactactcacttttag

SEQ ID NO: 135538 - DNA, 834 bp, synthetic construct
  misc_feature 1..834: note = Description of Artificial Sequence: Synthetic coding sequence
  source 1..834: mol_type = other DNA
atggtggtcatgatcgtgggatttctgaccgtactcattcagggaagcacccacgcagggggtttccacaatgtactcgagcagagtacaaacggtagccgtctccatatctttgacttcgatgttgatcccctccggagacacacgttttggaccatcacggtgggcgggaccttcacctggctagggatctacggtgtcaatcagagcaccatacagagatgtatcagctgcaagacagagaagcacgctaagttggcactgtacttcaatttgctaggtctatggattattctggtctgcgccgtgttttcaggtcttatcatgtactcacattttaaggattgtgatccttggactagtggcataatctcagctcctgaccagttaatgccgtacttcgttatggagatttttgcaaccatgccaggcctgcctggtctcttcgtcgcctgcgctttttcgggcactttgagcacagtggccagcagcatcaacgcacttgccactgtcactttcgaggattttgtgaaaagctgctttcctcacctgtcagataaactctctacatggatctccaaaggactatgtaggtcactgatctggcgggatgtatacctctacggatgcggctgtatttgccatggccggtgctgcgcgggcttcccgcaacatagccgacatgtgtggcggaccaacgcaggtctgattctccctgggaacagagtaccgttctgtgagttagagggttgcacccgccgttcctcctattggaaccatcttgtgatcctgggtggccattgggggctccatcttccctgcacctccctctag

SEQ ID NO: 135539 - DNA, 2019 bp, synthetic construct
  misc_feature 1..2019: note = Description of Artificial Sequence: Synthetic coding sequence
  source 1..2019: mol_type = other DNA
atggaggagcacactgaggctgggagtgcccccgaaatgggtgcacaaaaggcattgattgataaccccgcagacattcttgtgatcgcagcctatttcttgcttgtgatcggagtgggattatggtccatgtgccgaaccaacaggggaacagtgggcggctattttttggctggccgcagtatggtgtggtggcccgtgggggctagtcttttcgcttctaacatcgggtctggccatttcgtaggactggcaggaacaggagctgctagcggtctggcagtggcaggcttcgaatggaatgctctgtttgttgtattattactaggatggctttttgctcccgtataccttactgcgggcgtgattaccatgccccagtacctgcgcaaacgctttggaggccgccgcataaggctttatctatctgtgttatccctatttctgtatatattcaccaaaatcagtgtagatatgttcagcggcgctgtgttcatccagcaggccctaggatggaacatttacgcctccgtgattgcattgcttggtatcaccatgatttacaccgtaaccgggggacttgcagcattgatgtatactgacaccgtccagaccttcgtgattctgggtggggcctgtattttgatggggtacgcgttccatgaagtcggggggtactccggcctgtttgacaaatacttgggtgctgccacctccttgacggtctctgaggaccccgcggttgggaatattagttcgttctgttaccgcccaagaccagacagctatcacctgcttaggcacccagtcaccggcgatcttccctggccggctctactgcttggccttaccattgtgtctggatggtactggtgttctgatcaggtcattgtgcagcgttgcttggctgggaaatctctcacacacattaaggccggatgtatcctgtgtggatatctgaaactcactccgatgttcctgatggtaatgccaggcatgattagtcgcatcctctatcctgacgaggtggcctgtgtggtgccggaggtctgtcgccgagtttgtgggaccgaggtggggtgctccaatattgcttatccccggctggtcgtcaagttaatgcctaacggactcagaggccttatgcttgccgtgatgctggcagctctcatgtccagtctggcctctatttttaacagttcatccacattattcactatggatatctatacaagattgcggcctcgggcgggcgaccgggagttattgctggtggggcgtttgtgggtggtgttcattgtggtggtgtctgttgcctggcttcctgtggtccaagcggcgcaggggggtcagctgttcgactatattcaggccgtcagcagctatctcgctccccccgtatccgcagtgttcgtcttggcgctctttgtccctcgagtgaacgagcagggggccttctggggcctcattggagggctgctgatggggcttgctcggttgatccctgagttttcattcgggtctgggtcctgtgtgcagccatctgcctgtcccgccttcctgtgtggcgtgcattacttgtatttcgctattgtactcttcttttgctctgggcttctgacacttaccgtgtccctgtgtacggctccaattccaagaaagcatctgcacagactggtgttcagtctgagacattctaaggaggagcgtgaggacttagacgcggatgaacagcagggttcttcgttgcccgttcagaacgggtgccccgagtcggccatggagatgaacgaaccccaggcacccgctcccagtttgtttaggcagtgtctgctgtggttctgcggcatgagtcggggtggcgtggggtcccctcctccactgactcaggaggaagctgctgctgccgcccggcgtcttgaagacattagcgaggaccctagttgggcgcgcgtggtgaatctgaacgctctgttgatgatggcagtcgctgtgttcctgtgggggttctatgcctag

SEQ ID NO: 135540 - DNA, 1377 bp, synthetic construct
  misc_feature 1..1377: note = Description of Artificial Sequence: Synthetic coding sequence
  source 1..1377: mol_type = other DNA
atggaagaacacactgaggccggatccgctcctgagatgggtgctcagaaagctctgatcgataatccagctgacattctggttatcgcagcttattttctgcttgtcattggagtggggttgtggtctatgtgccggactaaccgcggaaccgtgggtggatattttcttgctggacgctccatggtctggtggcccgtgggagcgtctcttttcgccagcaacatcggttctgggcatttcgtgggtcttgctggcaccggtgcggccagcggtctcgccgtggccggctttgaatggaacgcactgttcgtggtcttattactaggatggttattcgcgccagtctatcttacagcaggagtaatcaccatgccccagtaccttcgaaaaagatttggggggaggcggattaggctttatctctccgtcctctcgctttttctatacatctttaccaagatcagcgtggacatgttctccggcgccgtcttcattcagcaggccctggggtggaatatttacgcttctgtgatcgccttgctggggatcaccatgatctatacggtgaccggagggctggctgcactaatgtacactgacacagttcaaaccttcgtgatcctgggtggggcttgcatcctgatggggtacgcatttcacgaggtgggcgggtactctggcctttttgacaagtacctgggcgccgccaccagtctcacagtatccgaggatccagcagttggaaacattagctcattctgctatcgcccccgccctgattcataccatctgcttaggcaccctgtgactggtgatttgccgtggcccgccttgcttctgggtcttaccattgtgagcggctggtattggtgttctgaccaggtcattgtgcagaggtgtctagcaggtaagtcacttactcacatcaaggctggctgcatactgtgtgggtatctcaaattgactcctatgtttcttatggtgatgccaggcatgataagtcggatcctctatcctgacgaagtggcctgcgtcgtacctgaggtatgccgtcgcgtctgcgggacagaggtcgggtgttcaaatattgcttaccccagattagtggttaagcttatgccgaatggtcgcttgctgggcacacacagggggcccgctgacggccccggaacccccgattcgagggtgctcctcaggctcggccaactctgtgcagcactgggagtaccaagcttccccctgagacgggcactgcctttgctccggcattgtgccgtgctgctgctctggccaccccatccacacgggctgcctgtgcatcgcgcccatccgcagaaggccccaccccctcccggactccaatcgccagcctag

SEQ ID NO: 135541 - DNA, 2157 bp, synthetic construct
  misc_feature 1..2157: note = Description of Artificial Sequence: Synthetic coding sequence
  source 1..2157: mol_type = other DNA
atgagagcagtgctagataccgccgacatcgctatagtagccttgtacttcatactggttatgtgtatcggattctttgctatgtggaagagtaatcgctctacagtaagtggttacttcttagcaggcaggagcatgacatgggtgacaattggagcatccttattcgtgtcgaatataggcagcgagcacttcattggcctcgccggttcaggagcagcttcaggctttgccgttggcgcctgggagttcaatgcgctgctgttgctacagctgctgggctgggtattcatccccatctacatacggtctggggtgtacacaatgccagaatatctcagtaagcgcttcggtggtcaccggatacaggtgtactttgccgccctgtccctaatcctgtacatcttcaccaagctgagtgttgacctgtattcgggagctctgtttatccaggagagtctaggatggaatttgtacgtttcagtgatactccttattggcatgaccgccctgctcacagtaaccggcggattggtggctgtgatttacaccgatactctgcaagctctgttgatgataataggtgctctgacattaatgattatctcaatcatggagatcggcgggttcgaagaagtcaagagaaggtatatgctcgctagcccagatgtgacatcgatattgctaacctacaacctgagtaacaccaactcatgtaacgtgtcgccgaaaaaagaggctctgaaaatgctgagaaatcctaccgacgaagacgtaccctggcccggatttatcttggggcagacacctgcttccgtctggtattggtgtgctgatcaggttattgtgcagcgtgttctcgcagctaaaaatatcgcacacgcaaagggttcaaccctgatggcgggtttcctgaagctattaccaatgttcatcatcgtggtgcccggcatgatttcccgaattctgtttaccgacgatatcgcttgtatcaaccccgaacactgcatgctcgtgtgcgggtcacgagctggctgctctaacatcgcctatccgagactggttatgaaattggtgcccgtgggactgcggggcctcatgatggcggtgatgatcgccgctctcatgagcgacctggattctatttttaatagtgctagtactattttcacactggacgtgtacaagcttattcgaaagtccgcatcatcgcgggagttgatgattgtcgggcgaatctttgtggcttttatggtggtgatctctattgcctgggtacccatcattgtggagatgcagggaggccagatgtacctctacatacaagaggttgccgactacttgactccgcccgtggccgcactatttcttctagccattttctggaaacgttgcaacgagcagggggctttttatgggggaatggcaggctttgtgctcggcgccgtgagacttatcttggccttcgcctatagggccccagaatgtgaccaacctgataatcgccccggctttataaaggacattcattacatgtatgtggccaccgggctgttttgggtcactgggttgataaccgtaatagtaagcctcttaacaccacctccgactaaagaacagatcagaaccacgacattctggtccaagaaaaacctcgtggtgaaggagaattgttctcctaaggaagagccctaccagatgcaggaaaagagcatcctgcgctgctctgaaaacaacgagactatcaaccacatcatacccaacgggaagagcgaagactccataaaaggcctgcagccagaagacgtcaacttgttggtcacatgcagggaggagggcaatccggtggcctctttgggccacagtgaggctgagactcccgtggatgcttacagcaacggtcaggccgccttaatgggcgaaaaggaacgtaaaaaggagactgacgacggcgggcggtactggaaatttattgactggttttgtggcttcaagtctaaaagtctgagcaagagatccctcagggatctgatggaagaggaggcagtgtgtctgcagatgctggaagagactcgtcaagttaaggtaatcctgaacatcgggttgttcgccgtctgcagcttgggcattttcatgtttgtttatttttctctctag

SEQ ID NO: 135542 - DNA, 504 bp, synthetic construct
  misc_feature 1..504: note = Description of Artificial Sequence: Synthetic coding sequence
  source 1..504: mol_type = other DNA
atggaggcgggaggatttctggatagtctgatttatggggcttgtgtagtgtttactttgggcatgttctcagccggcttgtcagacttgcggcatatgaggatgacgagatccgtcgataatgtgcagtttttgccgttcctgacaacagaggtgaacaatctcggatggctgtcttacggcgccctgaagggcgacggtatcctaattgtggtgaacacagttggtgccgcgctacagacactctatatactggcctatttacattactgtccaagaaaggccaaggtcatacagaccaaaagcactcaatgtctcagctatcccctgactatcgccaccctcctgacttctgccagctggtgcctgtatggattccgtctgcgcgatccctatatcatggtgtccaattttccaggcattgtgacgtcgttcattcgcttttggctcttctggaagtatccccaggagcaggaccggaactactggctccttcagacgtag

SEQ ID NO: 135543 - DNA, 501 bp, synthetic construct
  misc_feature 1..501: note = Description of Artificial Sequence: Synthetic coding sequence
  source 1..501: mol_type = other DNA
atgagaggtttacatccttggcacgtgcttcgccggcctctcggtccccaggcacatgctaacgacccggaatgcggccagcggccagtccccgccctgtcacatcacggctcccagagagtggtgctactgcagacagccacactcctaggggtattactgctcggttatggttatttctggttgctagtccccaatccagaagcccgcttgcagcagctaggcctgttctgttccgtctttacaatatctatgtatcttagtccactggccgatctcgccaaagtgattcagaccaagtccacgcagtgcctgagctatcctcttacaattgccactttgttaactagcgccagctggtgcctgtatgggtttcggttgagggacccatatatcatggtctccaatttccctggcattgtgacctccttcatcaggttttggttattttggaagtaccctcaggaacaagataggaattattggttgctgcaaacatag

SEQ ID NO: 135544 - DNA, 666 bp, synthetic construct
  misc_feature 1..666: note = Description of Artificial Sequence: Synthetic coding sequence
  source 1..666: mol_type = other DNA
atggaggccggaggttttcttgatagtctgatttatggagcctgcgtggtatttacactgggcatgttttcggcaggcctgagcgatctaagacatatgcggatgacgagaagtgtagataacgtccagttccttccattcctgacaacagaagtgaacaacctcggctggctctcttacggagctctgaagggggatggaattctaatcgtggtgaacaccgtgggcgcagccctgcagacattatacattctggcttatctgcactactgcccgagaaaacgagtagtcctcttgcagactgcaacactactgggagttctgctcctgggctatggatacttctggctattagtgcccaatccagaggcgcgattgcagcagctgggattgttctgtagcgtgtttaccatctcaatgtacctctcccccctggcggacctggccaaagtgatacagacgaagtccacccagtgtttatcctacccacttaccatagccactctcctgacatctgcaagttggtgtctgtacgggttcaggctcagggacccttacatcatggtcagcaactttccaggaattgtgacctccttcatccgcttttggctgttttggaagtacccccaagagcaggataggaattattggttgctgcagacctag

SEQ ID NO: 135545 - DNA, 471 bp, synthetic construct
  misc_feature 1..471: note = Description of Artificial Sequence: Synthetic coding sequence
  source 1..471: mol_type = other DNA
atggaggagctggggccccaagcccatgcgaacgacccagaatgcggccagcgccccgtccccgcactttctcaccatggatctcaaagagttgtcctgttacaaacagcaactcttctcggggtgttactattagggtacgggtatttttggcttctggtcccgaaccccgaggcacggctgcagcagcttggactcttttgttccgtgtttactatctcaatgtatctctcacccttggcagacctggccaaggtaatacagactaaatctacccagtgtcttagctatcctctgacgattgccacgctcctcacctccgccagctggtgtctgtatggcttccggttacgggatccttacattatggtaagcaactttcctggaatcgtaacatctttcatccgattctggctgttttggaaatacccacaagagcaggatcgaaactactggctcttgcagacctag

SEQ ID NO: 135546 - DNA, 1929 bp, synthetic construct
  misc_feature 1..1929: note = Description of Artificial Sequence: Synthetic coding sequence
  source 1..1929: mol_type = other DNA
atggataaactgaaatgcccgtctttctttaaatgcagggagaaggagaaagtgagcgcttcctccgaaaacttccatgtgggcgagaacgacgaaaaccaggatcgaggtaattggtcgaagaaaagcgactacctgctgtccatgattgggtatgcagtgggacttgggaatgtatggcgcttcccctatctgacctactctaacgggggaggcgcctttctcatcccctacgccatcatgctcgccctggccgggctgcccctatttttcttagaatgtagtctggggcagttcgcttcactcgggcccgtgagtgtatggaggattctcccacttttccagggtgtcggtatcacgatggtgctgatctcaatctttgttaccatttactacaacgttatcattgcttattccctgtactacatgtttgcaagcttccaatctgaacttccatggaagaattgctcgagctggtctgataaaaactgctcaagaagtcctattgtcacccactgtaatgtgtccacagttaacaagggtatacaggagattatccagatgaacaagtcttgggttgatattaacaactttacctgcatcaacgggtctgagatctaccagccaggccagctcccttcagagcaatactggaataaggtggccctgcagcgctcctctggtatgaacgaaactggggtaatcgtgtggtaccttgcattgtgtctgctactggcatggttgatcgtaggcgccgccctgtttaagggtatcaaaagctccgggaaagtggtctattttaccgcactgttcccttatgtggtgttactaatattgctggtgcgaggcgctaccctggagggcgcgtcaaagggcatcagttactacattggtgcccaatctaatttcaccaaattgaaggaggcagaggtctggaaggatgctgctacccaaattttttatagccttagtgtggcatggggcggcctggtggccctctccagctataacaagttcaagaacaactgtttcagcgacgctattgtcgtgtgcctgacgaactgtcttacatccgtgtttgcgggcttcgctattttttctatcctcggccacatggcacatatctctggcaaggaggtatcccaagtggtcaagagtgggtttgacctcgccttcattgcttaccctgaagcactagcacagctccccggtggcccgttttggtccatcctcttttttttcatgcttctgacactcgggttggattctcaattcgcgtcgatcgaaaccataacaacaactattcaggacctgtttcccaaggtcatgaaaaaaatgcgcgtgcccatcaccttaggttgctgcctcgtgcttttcctgttaggcctggtctgtgtgactcaggcaggtatttactgggtccacctgatagatcatttctgcgccggctgggggattctgattgccgccattcttgagctggtgggaatcatatggatttatggcggcaatcgcttcatagaagacaccgaaatgatgatcggagcgaaacgttggatattctggttgtggtggcgcgcttgctggttcgtcatcacccctatcctcttaattgccattttcatctggagtctagtacagttccaccgacccaattatggcgctataccttatcctgattggggagtagccctgggctggtgcatgattgtattctgcataatctggattccgataatggccattataaagattatccaggccaaagggaacatctttcagcggctgatctcttgttgccgtccagcgagtaactggggtccttatctggaacagcatcgaggggagcggtacaaagatatggtagacccgaagaaggaagccgaccatgagattcctaccgtctccggaagccggaaacccgagtag

SEQ ID NO: 135547 - DNA, 1539 bp, synthetic construct
  misc_feature 1..1539: note = Description of Artificial Sequence: Synthetic coding sequence
  source 1..1539: mol_type = other DNA
atgggagttcaatggtggtcacacacccagggcgaggtcgccgtgggacttggtctgggcgactcttatctaactccatgcccttgccccggggtcggatacgctgttatcctgatcgctctctatgtggggttttactataatgtgatcattgcttggagtctctactacttgttctcttcttttacactgaacctcccttggacagactgcggtcacacttggaactcacctaattgcaccgaccccaaattgttgaatggctcagtgctcggcaatcatactaaatacagcaagtataagttcacacccgccgctgagttctatgagagaggtgtccttcacctccacgagtccagtggtatacatgacatcggtcttcctcagtggcagctcctgctgtgccttatggtagtcgtgatcgttctctactttagtctgtggaaaggcgtgaagacatccggcaaggttgtttggattacggctacattgccctacttcgttctcttcgtgctgcttgtgcacggcgtcacgcttcctggagcttccaacggcatcaatgcatatctgcacatcgatttctacaggctgaaggaggcgacagtatggatagacgcagccacacagatattctttagtctcggggccggctttggagtgctgatcgcttttgcatcgtacaataaattcgacaacaactgttaccgagatgccctcctgacgtcatccatcaactgtattacatcgtttgtatcaggattcgctattttttccattctgggatatatggcgcacgagcacaaggtcaacatcgaagacgtagctacagaaggcgccgggttggtttttatcctctacccagaagccatttctactttgagtggttcgacattttgggccgtcgtgttttttgtcatgctgttagcgttgggactggactcttcaatgggtggcatggaggccgtgatcaccggtttagcggatgacttccaggtgttaaaaaggcatcgcaagctttttacgtttggcgtgactttcagtacgtttctgcttgccctcttttgtattactaagggaggaatttacgtgctcacactactggacacatttgctgccggaaccagcatcctcttcgctgtgctcatggaggccatcggcgtctcttggttctacggtgtggaccgattctccaatgacattcagcaaatgatgggcttcaggcccggcttgtactggcgcctatgctggaaatttgtgagccctgcattcctgctgttcgtggttgttgtatctattatcaacttcaaacccctaacttacgacgattacatcttccccccatgggctaactgggtgggctggggcatcgcgctcagcagcatggtgctggtcccgatctatgttatctataagtttctgagcacccaggggtctttatgggaaagactggcatatggcattactccagagaatgagcaccatctcgttgctcagcgggatatcagacagttccagctgcagcactggctggccatctag

SEQ ID NO: 135548 - DNA, 1845 bp, synthetic construct
  misc_feature 1..1845: note = Description of Artificial Sequence: Synthetic coding sequence
  source 1..1845: mol_type = other DNA
atggatgggaaggtcgccgtacaggagtgcggtccacccgcagttagttgggttcccgaagagggagagaagctggatcaggaggacgaagaccaggttaaggatcggggccagtggacaaacaagatggaattcgtgctgtcagtggctggcgagatcataggcctcggcaacgtgtggaggtttccttatctttgctataagaacggggggggcgctttctttatcccatactttatcttcttctttgtttgtggtatcccggtcttcttcctggaagtagccctgggtcagtacacgtcccaagggtctgtcactgcatggcgtaagatctgtcccctttttcagggaatcgggctcgcgagcgtggttattgagagttatttgaacgtgtactatataataattcttgcttgggccctgttctatctgttttcatcctttacatctgaactcccttggacaacctgcaataatttctggaacactgaacattgcacagactttttgaaccattccggagctggaacagtcacacctttcgagaactttacctcaccagttatggagttctgggagcgaagagtccttggcattacatccggaatccacgacctgggttcactcaggtgggagctcgcactctgtctgctgcttgcctgggtcatttgctatttctgcatctggaagggcgtgaagtccaccggaaaggttgtgtatttcaccgcgaccttcccttacctgatgctggttatcttactgatccgcggagttaccctaccaggcgcgtatcagggcatcatctattacctgaagcccgatctctttcggttgaaagacccacaggtttggatggatgctgggactcaaattttcttctcctttgccatttgtcagggatgccttacagccctaggaagttataacaagtaccataataactgctacaaggactgtatcgccttgtgtttcctcaattccgctaccagctttgtggcaggatttgtcgttttctctattcttggcttcatgtcacaggagcagggcgtgcccatttcggaggtcgcagaaagcggacctgggctcgcattcatagcattcccgaaggctgtgaccatgatgcccctttcgcagctgtggagctgcctttttttcattatgctaattttcctcggcctggattcccagttcgtgtgcgtcgaatgtcttgtgacagcctccatcgatatgtttcctaggcagcttagaaagtccggccgccgcgagctactgattttaaccatcgctgtgatgtgttacttaataggactgtttctcgtcacagaagggggaatgtacattttccagttgttcgattattacgcctcttccggcatatgcctcctcttcctatctctgttcgaagtggtgtgtataagctgggtatacggcgcggatcgattctacgacaacatcgaggacatgattggatataggccctggccacttgtgaagattagctggctgttcctgactccgggcctgtgcctcgcaacctttttgttttccctttctaaatataccccgttgaaatacaacaatgtgtacgtgtaccctccatggggatattcaatagggtggttcttggccctgtcttcaatggtctgcgtgccgttgttcgtagtaattactctgcttaagactcgcggccctttccggaaaaggttacgccagcttatcactccggatagcagcctacctcagcccaagcaacatccttgtctggatggatctgccggtaggaatttcggccccagtcccacacgggaaggcttaattgccggcgagaaagaaacccatctctag

SEQ ID NO: 135549 - DNA, 1845 bp, synthetic construct
  misc_feature 1..1845: note = Description of Artificial Sequence: Synthetic coding sequence
  source 1..1845: mol_type = other DNA
atggacggtaaggtcgctgtacaggagtgcgggccgccagctgtgtcgtgggtgcccgaagaaggcgagaagctggaccaagaggacgaggatcaggtgaaggataggggacagtggaccaacaaaatggaatttgttctaagcgtggcaggtgagatcataggcttaggcaacgtgtggcgattcccctacctgtgctataagaatggcggaggcgcattttttatcccttatttcattttcttctttgtctgtggcatcccggtgttcttcttagaggtcgccttggggcaatacacgtcccagggatcggtcacagcatggcggaagatttgccccctctttcagggcattgggcttgccagcgtggtcatagaatcttatctaaacgtgtactacatcattattctggcctgggctttgttctaccttttcagttcttttacatccgagctgccttggactacgtgcaataatttctggaatactgagcactgtacggactttctgaaccattccggagccgggacagtgaccccatttgagaactttacctcacccgtcatggagttttgggagcgtcgagtacttggaattacatcaggaatccacgatctggggtccctgcggtgggagctcgccctgtgtctcctgctcgcttgggtcatatgctacttctgtatctggaaaggcgtaaaatccaccggcaaagtggtgtatttcacagccacgtttccatatctcatgcttgttatccttctgatccgtggcgtgaccttgcccggtgcctaccaggggattatctactacttgaagcctgatctgttccgtcttaaggacccgcaggtgtggatggatgccgggacacaaatcttcttttcattcgctatctgccagggctgcttgacagcgctcgggtcttataacaaataccacaacaactgctacaaggactgcatcgccctgtgtttcctcaactctgctacttctttcgtggcgggcttcgtggtatttagcatccttggcttcatgagccaggagcagggcgtgcccatctcggaggtggccgaaagtgggccagggcttgccttcatcgcattcccaaaggcggtgaccatgatgccgctgtctcagttgtggtcctgcctgttcttcattatgttaattttcttgggactagatagtcagttcgtgtgtgttgagtgccttgtgaccgcctccatcgatatgttccccagacagttgcgtaagagcggtcggagggagttgctgatcctgaccatagcggttatgtgttacctgatcggtctgtttctcgtaaccgaggggggcatgtacatttttcagctgttcgattactacgcaagtagcgggatttgcctgctattcttgtccctgttcgaagtggtgtgtattagctgggtgtatggagctgaccggttttatgacaatatcgaagacatgattgggtaccgaccctggccactggtgaagatctcctggttgtttctgacaccggggttgtgcctcgccaccttcctattcagccttagtaaatatactcccctgaagtataataacgtgtatgtctacccaccctggggttacagcatcggatggtttttggccctgagttccatggtatgcgtaccgcttttcgtagtgattacactcttgaagacccgcggccccttccgcaaacgactgcgccaactgatcacaccggactctagtctcccccagcctaagcagcacccctgcctggatggaagcgccggccgaaatttcggcccgagccccacgagggaaggcttgatcgcgggcgagaaagaaacccacctgtag

SEQ ID NO: 135550 - DNA, 1845 bp, synthetic construct
  misc_feature 1..1845: note = Description of Artificial Sequence: Synthetic coding sequence
  source 1..1845: mol_type = other DNA
atggacggcaaggtcgctgtgcaggaatgcgggccgccagctgtgtcctgggtccccgaggagggagagaaactcgatcaggaagacgaggatcaggtgaaggatcggggccagtggaccaacaagatggagtttgtgctctccgtcgccggggagattatcggcctggggaatgtatggcggttcccttatctgtgttataagaatggcgggggagcatttttcatcccatattttatttttttcttcgtttgtggcatccccgtcttttttttggaggtagcactcggccagtacacaagtcagggatccgtgaccgcatggcgtaagatctgccctctctttcaagggattggcttggcaagtgtcgtaatagagtcatacctcaatgtgtactatatcataatactggcttgggctctgttctacctcttcagcagctttactagtgaactgccttggaccacgtgtaataatttctggaataccgaacactgcactgactttttgaaccactccggggccggcactgtcacgccattcgagaattttacatctcccgtgatggaattttgggaaaggagggtactaggtattacgtctggaattcatgacctcggctcactgcgatgggaactggcactctgtttactcttggcttgggtgatatgttacttttgtatttggaaaggtgttaagtcaaccggtaaggttgtgtattttaccgcaacctttccttacctgatgctggtgattttgctcatacgcggcgttaccctgccaggggcttaccaggggatcatttattacctgaagcctgatcttttccgactgaaggacccacaagtttggatggacgcaggaacccaaattttcttcagtttcgccatttgtcagggatgtttgactgcactgggctcatacaacaagtatcacaacaattgttataaggattgtattgcactttgctttctaaactcagccacatcattcgtcgcagggttcgttgtgttttctattctggggtttatgtcccaagagcaaggtgttcctatttcggaggtcgccgagtccggacccgggttggcattcattgcttttcccaaggccgtcaccatgatgcctctgtcgcagctttggtcttgcctttttttcattatgctgatctttttgggcctcgatagtcaatttgtgtgcgtggaatgcctggtgaccgcctccattgatatgtttccacggcaactgaggaagagcggcagaagagagctactgatcctgaccatcgccgttatgtgctatctgatcggactgttcctggtgacggagggcggcatgtacatttttcagctattcgattattacgcaagcagtgggatttgcttactgtttctgtcactattcgaagtggtctgtatcagctgggtttacggggcggacagattttacgataacatcgaagacatgatcggatacagaccttggcccctggtgaagatctcatggttgtttctgactcccggactgtgtctcgcgacgtttctcttctctctatccaagtatacccctctcaagtataacaacgtgtacgtgtatccgccatggggctacagcatcggatggtttctcgccctatcatccatggtttgcgttccgttgtttgtggttatcaccctattgaaaacccgagggccttttaggaagcgactcagacagctgattacccctgacagtagtcttccccagcctaaacagcatccttgccttgatggatccgctggccgtaactttgggcctagccctaccagggaaggcctcattgcaggagagaaagagacacatctctag

SEQ ID NO: 135551 - DNA, 1845 bp, synthetic construct
  misc_feature 1..1845: note = Description of Artificial Sequence: Synthetic coding sequence
  source 1..1845: mol_type = other DNA
atggacggtaaggtggctgtgcaggagtgcggccctccagccgtgagctgggtgccggaggagggggaaaagcttgaccaggaagacgaggatcaggttaaggataggggacaatggactaacaagatggaattcgtcctgagcgtggctggtgaaattattggcctaggaaacgtctggagatttccctatctgtgttacaaaaacggcgggggggccttctttatcccatattttatctttttcttcgtctgcggcatccccgtattcttcctcgaggttgctttaggccagtatacatctcaggggtctgtcaccgcttggcgaaagatatgtccattattccagggaattggactggcttcagtagtgatcgaatcctacttaaatgtctactatattattatattagcatgggcccttttctaccttttcagctcattcactagcgagctgccatggaccacttgtaacaacttttggaacaccgaacattgtactgactttctgaaccactctggggccggaacagtcaccccttttgagaactttacttcccctgtgatggaattctgggagcggcgcgtcttaggaatcacctcaggcattcatgatctgggctcgctgcgatgggagctggctctctgccttttgctagcctgggtaatctgttacttctgcatatggaaaggggttaagtctactggcaaagttgtttactttactgcaacctttccctacttaatgctagtgattctgttgatcaggggtgttactcttccaggggcttatcaggggatcatatactacttgaagcctgacctctttagattgaaggatcctcaggtgtggatggatgcaggaacccagatattctttagctttgccatctgtcaaggttgtctaactgcactcggatcatacaataagtatcacaacaactgttataaggactgcatcgctttatgctttctgaattcagccacctctttcgtcgccgggttcgtcgtcttttcaatcctgggctttatgtctcaggaacaaggcgtgcctattagtgaggtggccgagagtgggcccggcctggcctttatcgccttcccaaaagccgtgacaatgatgcccttaagtcaactgtggagctgtttgttttttattatgctcatctttttgggcctggactcacagttcgtctgtgttgagtgtctggtgacagcgagtatcgacatgtttccgcggcaactgcgcaagtcgggaagacgggaattgcttatattgaccatagccgtaatgtgttacctgataggcctatttttggtgaccgaaggcggtatgtatatcttccaattgtttgattactacgcctcttctggcatctgcctcctcttcctttctctatttgaggtggtatgcatttcctgggtgtacggcgccgaccggttttacgacaatatcgaggatatgattgggtaccgtccctggccgttggtgaaaatctcatggctttttttgacacccgggctttgcctcgcgactttcttgtttagcttatccaagtatacgcctttgaaatacaacaacgtatatgtgtaccccccttggggttactcaattggctggttccttgccttgtcttctatggtgtgcgtgcctctgttcgttgtgatcacactcctgaagaccaggggtccttttaggaagcggctgagacagttgatcacccctgattcctcactgccacagccgaagcaacacccctgtctggatggaagtgcaggacggaattttggccccagtcccaccagggaagggcttatagccggtgagaaggagacccatctgtag

SEQ ID NO: 135552 - DNA, 1845 bp, synthetic construct
  misc_feature 1..1845: note = Description of Artificial Sequence: Synthetic coding sequence
  source 1..1845: mol_type = other DNA
atggatggaaaagtcgccgtgcaggagtgcggtcccccagccgtctcctgggtcccggaggaaggagagaaactggatcaggaggatgaagatcaggtgaaggaccggggccagtggaccaataagatggaatttgtgctgagcgttgctggagaaatcattgggctgggaaacgtgtggcgcttcccatatctgtgctataagaacgggggaggtgcattctttattccgtattttattttcttctttgtgtgcggtattccagtgtttttcctggaggtcgcactcgggcagtatacctcacagggctcagtgaccgcctggagaaagatatgtcctctgttccaaggtatcgggctcgccagtgttgtgattgaatcctatctcaatgtgtactacataattatcctggcttgggcactgttctacctgtttagctcattcacctctgagttgccatggaccacctgcaacaacttctggaatacagagcactgcaccgattttctgaatcactctggcgcaggcaccgtcacgcccttcgaaaacttcacttctccggtaatggaattttgggagaggcgcgttctaggcatcacatctgggatccacgatttaggctccttgagatgggagctcgccttgtgtcttttacttgcgtgggtgatatgttatttttgcatctggaagggcgtgaaatcaacagggaaggttgtgtatttcacagccacattcccctatttaatgcttgtgattctgctcattcgtggggtgacccttcccggagcttaccaaggaatcatctactaccttaaaccagacctttttagactgaaggatcctcaagtgtggatggacgctggtacgcagatctttttctcgttcgccatttgtcagggctgtctgactgctttaggatcatacaataagtaccataacaattgctataaggactgtattgctctttgtttcttaaatagcgccacttctttcgtggcgggattcgtggtgttctcaatcctcggctttatgtctcaagagcagggagtacctatcagtgaggttgccgaaagtggtcctggactcgctttcattgcctttcccaaagccgtaactatgatgcccctgtcccagctttggagttgcctgttttttattatgttaatctttctgggtcttgatagccaattcgtgtgtgtggagtgtcttgtgactgcttccatcgacatgtttccgcggcaactgcgaaagtctggaaggcgcgaattgttgatcctgaccatcgccgtcatgtgctatctcatcggactcttcctggttacagaaggcggaatgtatatctttcagttgttcgactactatgcaagcagtggcatttgcctgttattcctgagcctgttcgaggtggtgtgtatcagctgggtttatggggcggataggttctacgataacattgaagacatgatcggctatcggccctggccactggttaagattagctggttgttcttgactcctggcctttgccttgctacgtttctcttctccctgtcaaagtatacacctcttaagtataataatgtctacgtatatcccccttgggggtattccattggctggttcttagccctgagctccatggtgtgtgtgcctttgtttgtagtgatcacactgctcaagacgcgcggcccctttcgaaagagactgcggcagttaattacacctgacagcagtctccctcagcctaagcagcatccatgtctggacggatctgctggaaggaacttcgggccatcccctacccgggaagggctgattgctggcgaaaaggagacgcacctttag

SEQ ID NO: 135553 - DNA, 441 bp, synthetic construct
  misc_feature 1..441: note = Description of Artificial Sequence: Synthetic coding sequence
  source 1..441: mol_type = other DNA
atggacggaaaagtggcagttcaggagtgcggtccacctgcagtctcctgggtgcccgaggagggtgagaagctcgaccaggaggacgaggaccaggtaaaggatcggggccagtggactaacaaaatggagtttgtgctgtccgtggcaggtgagatcataggtctcgggaatgtctggcggtttccgtatctgtgctacaagaacggtggtggggcattttttattccatattttatctttttcttcgtatgcgggattcccgtgttctttctcgaagtggccctcggccaatacacaagccaggggtctgtgaccgcttggaggaagatttgtcccctattccaaggcattggcttggcaagcgtagtgatcgaatcctatttaaatgtctactacatcataatactggcctgggcccttttctacttgttttcttag

SEQ ID NO: 135554 - DNA, 1908 bp, synthetic construct
  misc_feature 1..1908: note = Description of Artificial Sequence: Synthetic coding sequence
  source 1..1908: mol_type = other DNA
atggcgaagaagtccgctgagaacggaatttactcggtgtcgggcgacgaaaaaaaaggtcctctgattgcccctggtcccgatggtgcaccggccaagggagatgggccagttggactcggcactccggggggcaggctcgctgtgccccctcgagaaacttggacacggcagatggatttcatcatgtcatgtgttgggtttgcggtaggcctgggtaatgtctggcgctttccctacttgtgttacaagaatggcggaggtgttttccttatcccatatgtgctgatcgccctggttgggggcattcctatattttttctggaaattagtcttggccagtttatgaaagccggctctatcaatgtatggaatatctgtcctctctttaagggactcgggtatgcaagcatggtgatcgtgttctactgtaacacctactatattatggtgctcgcatgggggttctattacctggtgaagagcttcaccaccactctgccatgggccacatgcggccacacttggaacaccccggactgcgtagaaatcttccgacacgaggattgcgcgaacgccagtcttgcaaacctgacatgcgaccagctggcagacagaagatctccagtgatagagttctgggaaaacaaagtattgagactgtccggaggactagaagttcccggggcgcttaattgggaagtgactctctgcctactggcctgttgggtgcttgtgtatttctgtgtctggaagggggtcaagagcaccggtaagatcgtttacttcaccgcgactttcccatacgtggtgctggtagtgctgttagtaagaggagtcctgctgcctggggctctagacgggatcatttactacttgaagcctgattggtccaaattggggagcccccaggtgtggatcgacgccggaacgcaaatcttcttctcctatgcaatcggccttggagcactgaccgccttaggatcctacaaccggttcaacaataactgctataaggatgccattatcctggccctgatcaattcgggtactagctttttcgccgggttcgtcgtgttctccattctgggattcatggcagcagaacaaggagtgcacatctccaaggttgccgagagcggacccgggttagcgtttattgcctatccaagggccgtaactttaatgccggtcgctccattgtgggctgcattgttctttttcatgctgctgctgctaggactcgacagccagttcgtaggggtggagggattcataaccggcctgctggatttacttcccgccagttattactttcgctttcagagggaaatctctgtcgcactatgctgtgctctgtgcttcgttattgacctttcaatggtaacggatggtggcatgtatgtgttccaactgttcgactactattcagcatcggggaccacattactgtggcaggcattttgggagtgcgtggtcgtggcatgggtgtacggcgccgaccggtttatggatgatatcgcttgcatgatcggctataggccgtgcccgtggatgaaatggtgctggtcatttttcacacccttggtctgtatgggaatctttatctttaacgttgtctattatgaacccctcgtgtataacaatacgtacgtctatccatggtggggtgaggcaatgggatgggccttcgctctgagctccatgctgtgtgtaccattgcacttgctaggctgtttgttgcgggctaaaggaaccatggccgaaaggtggcagcacctgactcaacccatctggggtcttcaccacctggaatacagggctcaggacgccgacgtcaggggcctgacgaccctcactcccgtgagcgagagcagtaaagttgtggtggtcgagtcagtcatgtag

SEQ ID NO: 135555 - DNA, 2190 bp, synthetic construct
  misc_feature 1..2190: note = Description of Artificial Sequence: Synthetic coding sequence
  source 1..2190: mol_type = other DNA
atgctcccaactctccagattcaaggcccagcagcatttgcccccggcgatcgaggtcccggcagacattgtcctttcccagtcccaattaccccgactggcgcactgttgccagtaagtgacagctgtgattccttagtcgatttggtctggccctcagtgacctatctcgcccttggaacacagtctagagtttggcctcaccctttgggtgctcctggccaagccggcgagtcccccgagcaaagaagacagtgcctcgagctatgggacatggcatcaagcttgggagataaagtccctcgggccgcttgtggtaagcgggggcagaccgtgtggcaactgcacctcgcctgtttgtgtctggcacaatttcactcgcctcccgctcagcctccccctctgagtagacggggggggggaccagatcctgatcctatcagcaggagccttccaggacctcctacacccgccttgcccactcactcttactctagccacagcccacgtgcgccacggctgttatcaccccttagaagggctcctaggggttcacccgccccccacagacacgcctcccttcagaccaacgaggcgcccagagagctcccccattgcacatggcccggcttgcctggaagatctctcgctccatctttcctctggagagaaccgtggcttggcgggcagtggggccccctgaacatccctgccaggaaaggcgataggcgaaggtgggaatggggctgcgaaggaggaggcgcgaccgcctctgccgagcaacccgggccccagattgtgtatttcaccgccacattcccttatgttgtgctagtagtcctgctggtgcgtggggtgcttctgcccggcgccctcgacgggattatctactacctgaaaccggattggtctaaactaggctccccacaagtatggatcgacgctggcacccaaatttttttttcctatgcaatcggactgggggccctgacagctctgggtagctataatcgcttcaacaacaattgttataaagatgccatcatccttgccttgattaactcaggtacctccttttttgctggttttgttgtgttttccatccttggattcatggccgcagagcagggggtgcacattagtaaagtggcggagagcggccctggcctcgcctttatcgcgtatccccgagctgtcacgctgatgccagtggccccattatgggctgccctgtttttctttatgctgctcctgctagggctagactcccaggtttgcatgggcttatgggaccgggagcctggcggggggcgccgggagggctgccgccagggcaaaggatggagaaggtgcggcgcacgaccggaactaccatggccccagttcgttggggtcgaggggttcattaccggtctgctggatttgttgcccgcctcctactactttaggtttcaacgggaaatcagcgttgctttatgctgtgctctatgttttgtgatcgatttatcaatggtcacagatgtttcgggcgtagggggcctcccagtgacttccggtggacgtctgccttcaagtctgactggtctctgccctcaaggaggtatgtacgtgtttcagctgtttgattactattccgcatccgggacaaccttgctttggcaagccttctgggagtgcgtcgtcgtagcatgggtgtatggtagatcttggctccgcgccggcctgggggacggaggtggcgaaggccgatctcctgcgtggcctgccagcccccggggtgcagatcggttcatggacgatattgcctgcatgatcggctatcgcccttgcccatggatgaagtggtgctggagctttttcacaccacttgtctgcatggggatatttatttttaatgtggtgtattacgagcctctggtgtataacaatacatacgtgtatccctggtggggagaagctatggggtgggcattcgcgctttcctcaatgctgtgtgtgccgctgcacttactcgggtgtcttctgcgtgccaagggcacaatggcagagcggtggcagcatctcacgcagcccatctggggattgcaccacctggaatatcgagcccaagatgcagatgtgcgcgggctaactacactgaccccagttagcgagtcttctaaagtagtcgtggtagagtccgtgatgtag

SEQ ID NO: 135556 - DNA, 471 bp, synthetic construct
  misc_feature 1..471: note = Description of Artificial Sequence: Synthetic coding sequence
  source 1..471: mol_type = other DNA
ttattacactctccaacctggagctggagctgctgctggtgtgttgagtgttgctgtctggccccctggatggcctccttcaccatctcctccttaacaggtcagagttggggcccgttgtcacccggtcagcttcagcctctgcagcaacagctactgcagtgggatcagctcctttgttggctgagggggctcttacaccctgggttacacgggtgccgagccggacgggcccacctgcaaggcgggcgagtgagagagatttcggtggccttatgttgcgcactttgcttcgtgatcgacctctcaatggtcaccgacggcgggatgtacgttttccagctttttgactattactcagcaagcggaaccaccctattatggcaggccttctgggaatgcgtggtggtggcctgggtgtacggcgccgatcgcttcatggatgatatcgcctgcatgatcggctactag

SEQ ID NO: 135557 - DNA, 339 bp, synthetic construct
  misc_feature 1..339: note = Description of Artificial Sequence: Synthetic coding sequence
  source 1..339: mol_type = other DNA
taattccggcatgaggattgtgcaaacgcttctctggctaatttgacctgcgaccagctcgccgacagaagatcccccgttatcgagttctgggagaataaagtcttaagactgtcaggcgggttggaggtcccgggtgcgttgaattgggaggtcacactctgccttttagcctgctgggtattagtctatttttgcgtgtggaaaggcgtcaaaagtacggggaaggtgcctttggaagcatgctctggcgaaggcgggagtgccctcggcgccggctgtctatgtcaagctcatctgtggcagagggaggttacacgccaatccctcgccctatag

SEQ ID NO: 135558 - DNA, 1563 bp, synthetic construct
  misc_feature 1..1563: note = Description of Artificial Sequence: Synthetic coding sequence
  source 1..1563: mol_type = other DNA
atgaaagcagggagcatcaatgtgtggaatatttgtcctctgttcaaaggcctagggtacgcctccatggtgatcgtgttttactgtaatacctactatatcatggtactggcatggggcttctactacctggtcaaatcctttaccacaacactgccttgggccacctgcggtcacacgtggaacaccccagattgtgtggagatcttcagacacgaggactgcgctaacgcatcactggcaaacctgacttgtgatcagttggcagatcgcaggtcccccgtcatcgagttctgggaaaacaaggttcttagactgtctgggggtctggaagtgccaggcgctctgaactgggaggtgactctctgcctcctggcctgttgggtgctcgtttacttttgcgtgtggaagggcgtgaaatctaccggtaagattgtgtactttacggcaaccttcccttatgtggttcttgttgttcttcttgtgaggggggtactacttcccggagcgctggatgggataatttactatctgaaacccgattggtccaagctagggtctcctcaagtatggattgacgctggcacccagatcttcttctcctatgcgattggtttgggcgccctgactgctttagggtcctacaacaggttcaataacaactgctacaaggacgcaattatcctggcactgatcaacagtggcacctcattttttgccggatttgtcgtcttctcaattctcggtttcatggctgctgagcagggagtgcacatcagtaaagtggccgaatctggaccaggtctcgcgtttatcgcatatcctagggccgttactctgatgcccgttgctcccctgtgggcagccctcttcttcttcatgctgctactgctgggactagattcacagtttgtgggtgtagaggggtttataactggactgcttgatttactgccagcctcgtactacttcaggttccagagggagatcagtgtggcgctttgttgcgccctgtgtttcgtgattgatttatcaatggtaactgacggaggtatgtacgtcttccagctatttgactattactccgcttcaggcactactctgttatggcaggccttctgggaatgcgttgtggtggcctgggtctacggggccgataggttcatggacgatatcgcctgtatgattggctatagaccttgtccctggatgaaatggtgctggtcgtttttcacacccctcgtgtgtatgggcatcttcatcttcaatgttgtttattacgaacctctggtctacaataacacttacgtgtatccatggtggggggaggcaatgggctgggccttcgctctaagcagtatgctgtgcgtgccactgcacttactaggatgcttactgagagctaagggaacaatggctgagcgatggcagcacctgacccagcctatatggggcctgcaccacttggagtatagagcccaggacgccgacgtgcggggactcacaacattaacaccagtatccgagagcagcaaggtggtggttgttgagagcgttatgtag

SEQ ID NO: 135559 - DNA, 525 bp, synthetic construct
  misc_feature 1..525: note = Description of Artificial Sequence: Synthetic coding sequence
  source 1..525: mol_type = other DNA
tgaatcgatgcaggaactcagattttcttttcctacgccattggactgggtgccctgacagcccttgggtcttataatcgttttaacaacaactgttataatgggacctccttttttgctggattcgttgtgttctcgatcctggggttcatggcagccgaacagggcgtgcacatttctaaagtggctgagtcaggccccggcttagctttcattgcatatccgagagctgtgacccttatgcctgtcgccccgctttgggctgcactatttttcttcatgctcttactgctgggcttggattctcagtttgtcggcgtcgaaggcttcatcacaggtctcttagacctgttacctgctagctattattttcgttttcagagagagatttctgtggcgctttgctgcgcgctgtgtttcgtaattgacctgagcatggttaccgacggaggcatgtatgtatttcagctcttcgattactatagtgcttcgggcaccacgctcctatggcaggccttttggtag

SEQ ID NO: 135560 - DNA, 270 bp, synthetic construct
  misc_feature 1..270: note = Description of Artificial Sequence: Synthetic coding sequence
  source 1..270: mol_type = other DNA
ggcagacatcatcccggctcacaccagcagtgggatcagctgctgtgctggctccgaggattgctacatcctgggttgcatgggtgtcgggcaggacgggcccacctccagggtggcagggtaagggcaggccccggccttcatcgcctgcctgccggatgtcacgctgacgcatcagggcctactcttggctgccctgttttactgcacgcggtcgccgcatggagcaggcaacccggcgtcgaaggctttattaccgggcttctttag

SEQ ID NO: 135561 - DNA, 1863 bp, synthetic construct
  misc_feature 1..1863: note = Description of Artificial Sequence: Synthetic coding sequence
  source 1..1863: mol_type = other DNA
atgtctaaatccaagtgttctgtcggcctgatgtcaagcgtcgtggccccagcgaaggaaccaaacgcggtggggccaaaagaggtcgaattgatcctcgtgaaggagcaaaatggagtgcagctgacctccagtacactgacaaatcccaggcagagtcccgttgaagcacaagatcgggagacctggggcaagaaaatcgacttcttactttccgttatcggattcgctgtggatctggccaatgtctggcgcttcccatatctttgctataagaacggtgggggggcttttctagtgccttaccttctgtttatggtcatcgctggcatgcctctgttttacatggaactggcgttaggccagtttaacagagaaggcgcagcaggagtctggaaaatctgccctatattgaaaggagtgggattcaccgttattctgatcagtctgtatgtgggattcttctataacgtgattatcgcatgggccctacactacctgttcagctcctttaccaccgaactaccctggatacactgtaataactcctggaattcccccaattgctcagacgctcatcccggagactcaagtggggatagctcaggactgaacgatacctttggcaccactcccgcagctgaatatttcgagagaggtgttctgcacctgcatcagtcacacggcattgacgacctgggtccccctcgttggcagcttacggcttgtttggtgctcgtgattgtgctgctctactttagcctttggaagggggtcaagacctcaggaaaggtggtgtggattactgctactatgccttacgtcgtgctgactgcgctccttttaagaggcgtaacacttccaggggcgatcgatggtattagagcttatctgagtgttgatttttataggctctgcgaggcaagcgtctggatcgatgctgccacccaagtctgtttctctctgggagtaggctttggagtattaatcgccttttcttcttataacaaatttacaaacaattgctatcgcgacgccattgttaccacatcaattaatagtctcacatcgttctctagcggctttgtggtgttttcctttctggggtatatggcgcaaaaacacagtgtgcctattggtgacgtggctaaggatggacctgggctgattttcattatctatcctgaagccatcgctaccctaccactcagcagcgcttgggccgttgtattttttattatgttgttaaccctgggtatagatagcgccatgggcggcatggagtccgtgatcacgggacttattgatgagtttcaattgctgcatcgtcacagggaactgttcaccctattcatcgttctggctactttcctcttgagtttattctgcgtaaccaatggtggcatctatgtctttacgctgctggatcactttgccgccgggacctccatcctgtttggggtgctcattgaggcaatcggcgtagcatggttttacggagtgggtcagttcagcgacgacattcagcagatgacaggccaacggccatctctgtactggagactgtgttggaaactcgtgtctccctgtttccttctgttcgtcgtcgtcgtctccatcgttacctttagacctccacactatggcgcgtatattttccctgattgggcaaatgcactggggtgggtaattgccacatccagtatggccatggtccctatctatgccgcttacaagttttgctctctgcccggatcttttcgtgaaaaactagcctatgcaattgcccctgagaaggaccgggaactggtggatagaggggaggtccgccagtttaccttaagacattggttgaaagtgtag

SEQ ID NO: 135562 - DNA, 1863 bp, synthetic construct
  misc_feature 1..1863: note = Description of Artificial Sequence: Synthetic coding sequence
  source 1..1863: mol_type = other DNA
atgagcaagtccaagtgttccgtgggtctgatgagctcagtggttgctcctgctaaggaacctaacgctgtgggccctaaggaagtggaactgatcctcgttaaagagcaaaatggagtccagctcacttcatcaacactgacaaaccctcgacaaagtcctgtggaggcacaggacagagaaacttggggcaaaaagatagactttctgctctccgtgataggatttgccgttgatctagccaacgtatggaggttcccttacctttgctataagaacggcggtggcgctttcctggtgccatacttgctgtttatggtgatcgcagggatgccattgttttacatggagttagccctgggacagttcaatcgggagggcgccgctggtgtctggaagatttgccccattctgaagggggttgggttcaccgtgattctcattagcctatacgtaggttttttctacaacgtcatcattgcatgggcattgcactatctatttagcagttttaccacagagctgccctggatacactgtaataacagttggaacagtcccaattgctcggatgcccaccccggagactcctcaggggattccagcggattgaacgatacctttgggactacacccgctgccgaatactttgagcggggcgttttacacctgcatcaatcccacggcattgatgaccttggacctcccaggtggcagttaactgcctgtctcgttttggttattgtgctcctgtatttttcgctctggaagggggtgaaaacatcaggtaaggtcgtgtggattactgctaccatgccttatgtagtgctcacagcgctgttgctgcgaggggtgaccctccctggagccatagatggtatccgggcatatttaagtgtggacttttatcggttatgtgaagccagcgtgtggattgacgccgccacccaagtctgcttctccctgggggtggggtttggggtgctcattgcgttctcctcctataacaagtttaccaataattgttaccgggacgccatcgttacaacctccatcaatagcctgacgtccttttcgtcagggttcgtggtgttctcttttctcggatacatggctcaaaagcattccgtgcccattggagatgtggccaaagatggtcctggcctcatttttattatctatccagaagcaattgccactctgccactgagttctgcctgggcagtagttttcttcataatgctcctgaccctgggaattgacagcgctatgggaggtatggaatcagtcatcacaggtctaatcgatgaattccaactgctccacagacacagagaattattcactctatttattgtactggcaacgttcttgctctccctcttttgcgtaaccaatggaggtatctacgtctttactctgcttgaccattttgccgccggcacttccatcctctttggggtcttaattgaagccatcggagttgcctggttttacggtgtggggcaattttccgacgatatacagcagatgacggggcagaggccctcactatattggcgactctgctggaaactggtgagcccttgtttcctgctcttcgtcgttgttgtcagtattgtgacatttaggcctcctcactatggggcctacatttttcctgattgggctaatgctctggggtgggttattgctacatcctccatggctatggttcccatttatgctgcgtataagttctgtagtctgccaggcagctttcgagagaagctcgcctatgccatcgcaccggagaaggatagggagttagtagataggggggaggtacgccagttcacgctaagacactggcttaaggtctag

SEQ ID NO: 135563 - DNA, 1800 bp, synthetic construct
  misc_feature 1..1800: note = Description of Artificial Sequence: Synthetic coding sequence
  source 1..1800: mol_type = other DNA
atggcgaccaacggttccaaggtggctgatggccagatatcgactgaagtctccgaggcccctgtggcaaatgacaaaccaaaaacccttgttgtcaaggtccagaagaaggcagccgaccttcctgacagggatacctggaaagggaggtttgatttcctcatgagttgcgtgggatacgccatcggtctggggaatgtctggaggtttccctacttgtgtggtaaaaatggtggcggcgcttttttaatcccatatttcctcactcttatttttgctggcgtgccactgtttctgctggagtgtagcctcggacagtacacgagtattggaggactgggcgtgtggaagctggccccaatgtttaaaggtgtgggattagcagccgctgtgctttcattctggcttaatatctactacatcgtgatcatatcttgggctatctattacttatacaactcttttaccacaaccctcccctggaagcagtgcgacaacccctggaacaccgaccgctgcttttccaactactctatggtgaacactaccaatatgacttcagctgtggtggagttctgggagaggaatatgcaccagatgaccgacgggctcgataagcccggccagatccggtggcctcttgctatcacactggcgatcgcctggatccttgtatacttttgtatttggaaaggggtggggtggactgggaaagttgtttacttttcagcgacctatccctacattatgctgatcatccttttcttccgtggcgtgacgctccctggcgccaaagagggtatccttttttacatcactcccaacttccgaaaactgtctgacagcgaagtctggctggacgctgccacccagatttttttttcctacgggctggggctgggatccctcattgctctcggttcgtataacagcttccataataacgtgtatagagatagcattattgtgtgctgcattaactcctgcacctcgatgttcgcaggtttcgtcatttttagtatagtgggctttatggctcatgtaactaagcgtagcatcgctgatgttgcagcatctggaccaggattagccttcctggcatacccagaggctgtaacccaactgcctatttctcctctatgggcaatcttattcttctctatgctcctcatgttgggtatcgactcgcagttttgcacagttgaagggttcatcacagccctcgtagacgagtacccccgcttactgcggaaccggagagagctcttcatagccgcagtgtgtatcatcagttatctcatcgggttgtcgaatataacccaaggcggaatatatgtctttaagctgtttgactactacagcgctagtggcatgtcactcttgttcttagtgttttttgagtgtgtgtccatttcttggttttacggggtgaataggttttacgataacatccaagaaatggtcggctcccggccatgcatatggtggaagctctgctggagctttttcactcccattattgttgccggggttttcattttctctgcagtgcagatgacacccctgacaatgggaaattacgtcttccccaagtggggccagggcgttggctggctgatggctttgagcagtatggtgttaattccgggatatatggcgtacatgtttctgacgcttaaaggaagcctgaagcagcgaatacaggtgatggtgcagccaagtgaggatattgtccgtcctgagaacgggcccgaacagccccaggcaggttcctctacaagcaaggaagcatatatttag

SEQ ID NO: 135564 - DNA, 120 bp, synthetic construct
  misc_feature 1..120: note = Description of Artificial Sequence: Synthetic coding sequence
  source 1..120: mol_type = other DNA
atggcaaccaatggctccaaggtggccgatggtcagattagtacagaagtgtctgaagcgccagtagctaacgataaacctaagaccctggtcgttaaggtccaaaaaaaagcggcttag

SEQ ID NO: 135565 - DNA, 1266 bp, synthetic construct
  misc_feature 1..1266: note = Description of Artificial Sequence: Synthetic coding sequence
  source 1..1266: mol_type = other DNA
atggttaatacaaccaacatgacatccgcagtggtggagttctgggaacggaatatgcatcaaatgaccgatggcctagacaaacctggccaaattaggtggcctctcgcaatcactctggccattgcttggatcctggtgtacttttgcatctggaagggcgtgggctggacggggaaggtagtgtatttctctgccacgtatccatatataatgctaattatactgttttttagaggtgtgaccttacccggagctaaagagggaatcctgttctacataacgcctaattttagaaagctgtccgactcagaggtgtggctcgatgctgctacacaaatctttttttcatatggattgggtttagggagcctcatagctctggggagttacaatagctttcacaataacgtatacagggacagtatcatagtgtgttgcatcaactcttgcacctcaatgttcgccgggttcgtgattttttcaatcgtggggtttatggcccacgtgactaaaaggagtattgccgatgtagccgccagtggccccggtctcgcatttctcgcctaccctgaggctgtgacccagctgccaatctctcctttatgggccatcctgttcttctccatgcttcttatgcttggcatcgactcgcagttttgtaccgtcgaggggtttattaccgcactggtggatgaatatccccgattgctgcgaaatcggcgggagctgttcattgcagcagtttgcataatcagctacctgatcggcctgagtaacattacacagggcggcatatacgtttttaagttgtttgactactattccgcctcaggtatgtccctgctttttctggtcttcttcgaatgtgtgagcatttcatggttctacggcgttaaccggttctatgacaacatccaggaaatggtgggctcacgtccttgcatttggtggaaactctgctggtctttcttcactccgataatcgtggctggcgtgttcatattctctgcagtgcagatgactcccctaaccatgggcaattacgttttcccaaaatggggacagggagtgggatggctcatggcactttcctctatggtgctgattcccggttatatggcctacatgtttttaactttgaagggctcactcaagcagagaatccaggtcatggtgcagcccagtgaggacattgtgcgaccagaaaacgggcccgaacagcctcaagccgggagttctaccagcaaggaggcctacatctag

SEQ ID NO: 135566 - DNA, 1899 bp, synthetic construct
  misc_feature 1..1899: note = Description of Artificial Sequence: Synthetic coding sequence
  source 1..1899: mol_type = other DNA
atgaccgctgaaaaggcattgcccctcggaaatgggaaggctgctgaagaggctagagagtccgaagcccccggcggtggctgctcttcagggggagctgcgcccgctcgtcacccacgagtaaagcgagataaagcagtgcatgagagagggcactggaacaacaaggtcgagttcgtcctgtcagtggcaggtgagattatcggtttgggcaatgtctggaggtttccgtacctctgttacaagaatggaggcggcgccttcctgatcccgtatgtggtcttcttcatttgctgtggaattcccgtgtttttcctggagaccgcactggggcagtttactagtgagggggggataacatgctggagaaaagtttgtccccttttcgaaggcatcggatacgctacgcaggtcattgaagcccatctgaatgtttattatataatcattttggcttgggcaattttctatcttagcaattgttttactactgaactcccttgggccacgtgcgggcacgagtggaacacagagaattgtgtcgaatttcaaaaattgaatgtcagtaactactcacacgtcagcctgcagaatgctacatccccagttatggagttttgggagcaccgcgtgctggcaatctcagatggaatcgagcatatcggtaacttacgctgggagctagcgctgtgccttctggcagcatggactatatgttacttctgcatttggaaaggcactaaaagtacagggaaggtcgtttacgtaacggctacattcccttacatcatgcttctgatcctgcttatccgaggcgttactttacctggcgcatctgagggaatcaaattctacctgtacccagacttatcacgcctatcagatccccaggtctgggtggatgcaggtacacagatcttcttctcatacgccatctgcctgggctgtttaacagcgctgggctcatataataattacaataacaactgctacagagactgcataatgctgtgttgtctcaactccggtacatcatttgtcgctggcttcgccattttctcggtcttgggctttatggcctatgaacagggagtgccaatagccgaggtggccgagtccggcccaggactcgcattcatcgcctatcctaaggccgtgacaatgatgcctttgagccccctgtgggcaacactgttttttatgatgctaatttttctgggactcgatagtcaatttgtgtgcgtggaaagcctggtcactgccgtggtcgacatgtacccaaaggtgttcaggagaggttataggagggaactcttaattctcgccctgtcagtgatctcgtatttcttgggcctggttatgctgaccgaaggtggtatgtacattttccagctgttcgacagctacgcagcgtcgggcatgtgtcttctgttcgtggccatctttgagtgtatatgcatcgggtgggtgtacggcagtaaccgattttacgataatatagaggatatgatcggctaccgccccccaagtctgatcaaatggtgctggatgatcatgactcccggcatttgtgctggtatcttcatctttttcctgattaaatacaagcccctcaagtacaataacatatacacgtaccccgcatggggctacggaattgggtggcttatggccctgagctctatgctgtgtatacctctgtggatctgcattacggtgtggaagacagagggaacactccctgagaagctacagaaactgacaaccccctccaccgatttgaagatgcgaggtaagctgggggtgtctccccgaatggtcactgttaatgactgcgacgctaagctcaaatcagacgggaccattgcagcaattacagagaaagagacccatttctag

SEQ ID NO: 135567 - DNA, 627 bp, synthetic construct
  misc_feature 1..627: note = Description of Artificial Sequence: Synthetic coding sequence
  source 1..627: mol_type = other DNA
atgaccgcagagaaagccttacctctggggaatggaaaggccgcagaggaagcgagagagtctgaggcgcccgggggcggctgttcatctgggggagccgctccagcgcggcatcccagagtgaagagagacaaggctgtccacgaacgcggccactggaataacaaagtcgagttcgtgctgagtgtggcaggagaaattattgggctgggaaacgtgtggcgctttccatatttgtgttacaaaaatgggggcggcgctttcttgatcccttatgtggtcttcttcatttgctgcggcatccccgtgttctttctagaaacagcactgggccagtttactagtgagggaggaatcacctgctggcgcaaagtatgcccactttttgaggggatcggatatgcaactcaggttatcgaggctcatctgaacgtgtactacatcatcattctcgcttgggcaatcttctacctgtctaactgtttcacaacagaactgccctgggctacctgcgggcacgaatggaacaccgaaaactgtgtagagtttcagaagctcaatgtctccaattactctcatgtatcacttcagaacgctacgtctcctgtaatggaattttgggaatag

SEQ ID NO: 135568 - DNA, 2394 bp, synthetic construct
  misc_feature 1..2394: note = Description of Artificial Sequence: Synthetic coding sequence
  source 1..2394: mol_type = other DNA
atggattgcagcgcccctaaggaaatgaacaaattgcccgctaacagtcctgaggcagcagctgcccagggtcatccagacggaccttgcgctcccagaacaagtccagaacaggagctgccagcggctgctgcaccacccccacctagggtccccagaagtgcctccaccggtgcccagactttccagagcgccgacgcccgggcttgtgaagctgaacgccccggcgtgggcagctgtaaactatcatcgcctcgcgcacaggcagccagtgcagctttacgagacctcagagaagctcaaggtgcgcaggctagtcctcccccaggaagcagtggacccggaaatgctttacactgcaagatcccgtttttgagggggcccgagggcgatgctaatgtgagtgtgggcaagggtacacttgagcgcaataacacaccagtggtcgggtgggttaacatgtcccagtccactgtagtgctggctactgatggaatcaccagcgtgctgccaggtagcgtggccactgttgcgacacaggaagatgagcagggtgacgagaataaagcccgggggaactggagcagtaaattggattttattctctcaatggtcggctacgctgtaggtctgggaaacgtctggcgctttccttatcttgcatttcagaacggaggtggagcttttcttattccatacctgatgatgctagccttagccgggttgcccatatttttcctggaagtctctcttggccaatttgccagccaaggccccgttagcgtctggaaagccatacctgccctccaaggctgtggcattgctatgctaataatttcggttctcattgcaatctactataacgtcattatatgctacacactgttttacctgttcgcatcctttgttagcgtcctcccatggggatcctgcaacaacccctggaacacccccgaatgcaaagataagaccaagttgctgctcgactcttgtgtgatcagcgaccatcctaaaattcagattaagaattctactttttgtatgacagcatatccgaatgtgaccatggtgaattttacatcacaggcaaataaaacatttgtgtcggggagcgaagagtatttcaaatacttcgtgttgaaaatctccgccggcattgagtacccaggcgagatcagatggccactggctctctgcctcttcttggcctgggtgatcgtgtatgctagcctagctaagggaatcaagacgagcggcaaagttgtgtacttcaccgctacatttccctacgtggtgctcgtgattctgctgattcgcggagtaactttaccgggcgccggcgccgggatttggtatttcatcaccccaaaatgggaaaagctcactgacgccactgtatggaaggacgccgctacacagatcttttttagcctctccgcggcctggggaggactcatcacactgtctagttataataagtttcacaacaattgttatagggatacactgatcgtcacgtgcaccaatagtgcgacaagcatctttgctggttttgtgatcttctccgtcataggattcatggctaatgagcgcaaggtgaatattgaaaatgtggccgaccagggccctggcattgcatttgtggtctatccagaagctttgacccgcctccccctgtctcctttttgggctatcattttcttcctcatgttgcttaccctcgggctggataccatgttcgcaacgatcgaaacaatcgttacaagcatatccgatgagtttccaaaatacctgagaacacataaacctgtcttcacactgggttgttgcatctgtttttttatcatggggttcccaatgatcacacaaggcggtatctatatgttccaactggttgatacttacgcagccagctacgcacttgtcatcattgcaattttcgagctcgtggggatcagctacgtgtacggtctgcagcggttttgtgaagatatcgagatgatgattggatttcagcccaatattttctggaaagtgtgttgggctttcgtcactcccacaatcctgacatttatactgtgcttctctttctaccagtgggaaccaatgacctatggttcctacaggtaccccaactggtctatggtgctgggctggctcatgctcgcctgctcggtgatctggattcctataatgtttgtcatcaaaatgcacctggccccaggacgttttattgaacgactgaagctggtatgtagcccgcagcccgactgggggccgtttctggctcagcataggggcgagcgctacaagaatatgatagatcccctgggcacttcgtcattggggctgaaactcccggtcaaagacttggaactggggactcagtgttag

SEQ ID NO: 135569 - DNA, 1959 bp, synthetic construct
  misc_feature 1..1959: note = Description of Artificial Sequence: Synthetic coding sequence
  source 1..1959: mol_type = other DNA
atgagcggcggggatacgagggccgccatcgcccggcccagaatggcagccgcacacggaccagtggcccctagttcaccggaacagaatggcgcggttccttccgaagccacgaaacgggatcagaacctgaaacgcggaaactggggtaatcagatagagttcgttttgaccagcgtggggtacgccgtcggtctgggcaacgtctggcgattcccctacctgtgctaccgcaatggcggaggggcctttatgttcccttattttatcatgctgatcttttgtggaattcccctgttctttatggaactgtctttcgggcagttcgcttcccagggttgtctcggagtgtggaggattagccctatgtttaagggcgttggttacggcatgatggtcgtgtctacctatatcggaatttattacaacgtcgtgatctgcatagcgttttactattttttctccagcatgacccacgtcctgccatgggcttactgcaacaatccttggaacacccacgactgtgctggtgtgctggatgccagcaatttgaccaatgggtcgaggcccgcagctctgccgtctaatctttctcatctgctgaaccactctctgcagcggacatccccctccgaggagtactggcgactttacgtgcttaaactgtcggatgacatcgggaactttggggaagtccggctcccactcctgggttgcttgggagttagctggcttgtggtcttcctgtgtctaatccgaggggtaaagtcctctgggaaagtggtctatttcacagcgaccttcccatatgttgtactgaccattttgttcgtcaggggcgtcaccctggagggtgcctttgatggcataatgtactatctcactccacaatgggataagattctcgaagccaaggtctggggcgatgcggcttctcagatattctactccctaggttgcgcttggggaggactcatcacgatggcaagctataacaaatttcacaataactgctacagagacagtgtgatcatatcaattaccaattgcgccacgtctgtctacgcaggtttcgtgatattctccattctcggcttcatggccaaccacctgggggtcgatgtttcccgggtagcagaccacggaccgggcctcgccttcgtggcttatccggaagcactgaccttgctgccgatctcacccctgtggagcctgctcttcttttttatgcttatcctgctggggctggggacccagttctgtttgttggaaaccctagtgactgccattgtggacgaggttgggaacgaatggattctgcagaagaaaacatatgtgaccctaggcgtggccgtggcaggctttctgttaggaattccactgacgtcccaggctggcatctattggctgctgctcatggataactacgccgcatcattttcactggtggtgatctcctgtattatgtgtgtagccatcatgtatatttatgggcacaggaactatttccaggatatccagatgatgctgggctttccccccccattattttttcagatttgctggcggtttgtgagcccagccataattttctttattcttgtgtttaccgtcatccagtaccagccaattacatataaccactaccagtaccctggatgggctgtggcaattggattccttatggcacttagtagcgtactgtgcattcccttgtatgcaatgttccgcctgtgtaggacagacggggacaccctgctgcagcgattaaaaaatgcaactaagccatctagagattgggggcctgccctcctggagcaccgcaccggccgttatgctcccacgatcgccccctcccccgaagacgggttcgaagttcagccattgcaccccgataaggctcagattccaatcgtcggatctaacggcagttctagattacaggactcccggatctag

SEQ ID NO: 135570 - DNA, 2121 bp, synthetic construct
  misc_feature 1..2121: note = Description of Artificial Sequence: Synthetic coding sequence
  source 1..2121: mol_type = other DNA
atgtcaggcggtgacacgcgggccgctattgctcgaccacgaatggcagctgctcacggcccagtggctccctcaagcccggagcaagtgacactgctgccggttcagcggtcctttttcctccccccctttagcggtgccacaccttctacctcgttggccgagagcgtactgaaggtgtggcatggtgcttataactccggactgcttcctcaactgatggctcagcacagtctcgcgatggcccaaaatggagccgttcctagtgaggccactaagagagatcagaatctcaagcgggggaactggggaaaccagatagagtttgtgttgaccagcgttgggtatgcagtcggacttgggaatgtttggcggtttccttacctgtgttaccggaatggggggggcgcttttatgtttccctactttattatgctgatcttttgcggaattccactgttttttatggagttatccttcgggcagttcgctagccagggctgtcttggggtctggcggatctcacctatgtttaagggggtgggctacggaatgatggtcgtgagcacttacattgggatctattacaatgtggttatctgtatcgcattttattacttctttagtagcatgactcacgtgcttccctgggcctattgcaataacccttggaatacgcacgactgtgccggagtgttggatgcctcgaatctgaccaatgggagtcgaccggcggcgctgccttctaacttgagtcatctgctgaaccattctttgcagcgcacctccccgtcagaagagtattggcgcctgtacgtactaaagttgagcgacgatattggtaattttggtgaggtgaggttacccctcctgggctgcctgggagtgagctggctcgtggtttttctgtgtctcatacgcggagttaaatcatcggggaaagtggtatactttacggcgaccttcccatacgttgtgctgacaattctgtttgttagaggagttactcttgaaggagcttttgacggaatcatgtactatctgaccccacagtgggacaagatcttagaggctaaggtatggggcgacgctgcctctcaaatcttttactctctcgggtgcgcgtgggggggtctgataacaatggcctcttacaacaagttccacaataactgctacagggacagcgttatcatatccattaccaactgcgcaacttccgtgtatgcgggatttgttatttttagcattctcggcttcatggccaatcacttgggggtggacgtgagtagggtcgcagatcacggtccaggcctagcgttcgtggcttacccggaagccctaacactcctcccaataagtccactctggtctctattattcttcttcatgctcatactgctgggtttaggcacacagttttgtctcctcgaaactctcgtcaccgcgattgtggacgaagtcggaaatgagtggatcctccagaaaaaaacctacgtgactttgggtgtggccgtcgcaggattcctgttggggatcccccttacaagtcaggctgggatctattggctcttgctcatggataactacgctgctagcttttccctagttgttatttcttgcattatgtgcgtggccatcatgtatatctacggacaccggaattactttcaagacattcagatgatgctgggttttcccccaccactctttttccagatctgctggaggtttgtgtctccagccattatcttcttcatccttgtgtttacagtgattcagtaccagcccatcacctacaatcattatcaatatccggggtgggcagtggctatcggctttctaatggctttgtcctcagtgctgtgcattcccctgtatgctatgttccgtctgtgtagaaccgacggggatacactcctacaaaggcttaagaatgcaactaaaccaagccgtgactggggccccgctctcctggagcatcgaaccggccggtatgcacctactatcgcaccttcccctgaagatggctttgaggtgcagcctttgcatcctgataaggcacaaattcccatcgtcggttctaacgggtcgtctagactgcaggacagtagaatctag

SEQ ID NO: 135571 - DNA, 1725 bp, synthetic construct
  misc_feature 1..1725: note = Description of Artificial Sequence: Synthetic coding sequence
  source 1..1725: mol_type = other DNA
atgttcccatattttatcatgttgatcttctgcggcatccccctattctttatggagttatctttcggtcagtttgctagccagggatgcttaggggtgtggaggatttctccaatgttcaaaggcgttgggtatggtatgatggtggtgtctacatacatcggcatctattacaatgttgtcatctgtatcgccttttattattttttttcttccatgacgcacgtgctgccatgggcttattgcaacaatccatggaacacacatgactgcgcaggagtgctcgatgctagcaatttaactaatgggtcccgtcctgccgctctgcccagcaatctctctcatctcttgaaccatagtctgcaacggacgagtccgtccgaggaatactggaggttgtatgtccttaagctaagcgacgatatcgggaacttcggagaggtgcgattgccactcctcggttgtctgggagtttcttggctggtcgtgtttctgtgcctgattagaggagtgaaatcctccggaaaagtcgtgtactttactgctacctttccctatgtggtgctgaccatcctgtttgttcggggagttacgttagagggggcatttgatggtataatgtattaccttacaccccagtgggataaaattctggaggcaaaggtgtggggcgacgccgcatcccagattttctattcgttggggtgtgcttggggcgggctcatcaccatggcgtcgtataataagttccacaacaattgctatcgcgatagtgttatcatttctataacaaactgtgccactagcgtgtatgctggatttgtgatattcagcatcttgggtttcatggccaaccacctgggggtagatgtctcgcgcgtggcagaccacgggcctgggctggcattcgtggcataccccgaagccctgactctgttgcctatctcacctctttggagtctattattcttcttcatgctgatcttattaggactgggaacccagttctgcttgctcgaaacccttgtcaccgctatcgtggatgaagtgggaaacgaatggattctgcagaagaaaacatatgtgaccttgggtgtggcagttgccgggtttctactaggcatccccctcacttcccaggcaggtatctattggttgctcctcatggacaattatgccgcttcttttagcctggtcgtcattagttgtatcatgtgcgtggctatcatgtatatttatggccatcgcaactactttcaggacattcagatgatgctgggatttccacctccgctgtttttccagatttgttggcggttcgtctctccagcgattatctttcttcaggcacaggtccacaggaggcttcctcagaacccgctgcacttcgcttccttacctgaacgcaacgtccttctacatcagctgccacagcgcggaggagtgcccgagcatgaccctccgactccaccgagcccggccaggacctatggaccacaggttcgcgtcagggaggtgccccgggctcgccgacagagatcccccaatccagcccctctttgggctcctcccagccctaagcctcatccctgctctgcagcggggcctttaggttgggactgcccattcagaaactgccagtcactagccctgtcatctgcccggttgctggctgactccgatgctggcgggcctgaaacaagacagtgggaacctggcccttag

SEQ ID NO: 135572 - DNA, 1902 bp, synthetic construct
  misc_feature 1..1902: note = Description of Artificial Sequence: Synthetic coding sequence
  source 1..1902: mol_type = other DNA
atggttggtaagggggccaaggggatgttgaacggagccgtaccttccgaggcaacaaagcgagaccagaacctcaaaagaggcaactggggtaaccagattgaattcgtgttaaccagcgtgggctatgctgtgggcctcggtaacgtgtggaggtttccttacctgtgttatcgcaacggaggaggagcttttatgtttccatatttcatcatgctgatcttttgcgggattcccctgttttttatggagttgtccttcggacaattcgcatcccaggggtgcctgggcgtgtggagaatctcccctatgtttaagggtgtcggatatggcatgatggtggtgagcacgtatatcggcatctattataatgtggtcatctgtattgcattttactatttcttttcatcaatgactcacgtgctgccctgggcgtactgtaataacccttggaacacccacgactgcgccggcgtgctggacgccagtaacttgacaaacggatccaggccagctgctcttcccagcaatctgagtcacttgctgaaccactccctccaacggaccagcccctcagaggagtattggagactctatgtgttgaagttatccgacgatattgggaactttggcgaagtgaggcttcccctcctcggctgtctcggcgtgtcttggctcgttgtgttcctgtgcttgatccggggcgtcaagtcatccggaaaagtggtgtactttacggcgaccttcccctacgtagtgttgaccattctgtttgtccgtggtgttacactggagggggcattcgacgggataatgtactatctgacgccgcagtgggacaaaattctcgaggcaaaggtgtggggagatgcagcttcccagatcttttacagccttggttgcgcgtggggggggcttatcacaatggccagctataacaagttccacaacaactgctaccgcgactccgtgatcatttctatcactaactgcgctaccagtgtgtacgccggttttgtcatctttagcatccttggattcatggcgaaccatctgggagttgacgttagccgggtggcagaccacggcccagggctggcgttcgtggcctaccctgaagccctgaccttgcttcctatatcacctctgtggagcttactttttttctttatgttaatcctgcttggattaggcacccagttctgcttactggaaacactagtgaccgctattgtggatgaagtagggaatgaatggatcctccaaaagaagacttatgtgactctcggcgtcgcggtagctggttttctcctgggtatccccttgaccagtcaggccgggatttactggctgctgctgatggacaattacgcagcttccttctccctcgtagttattagttgtatcatgtgcgtggcaataatgtacatctacggccataggaattactttcaggacattcagatgatgcttggcttccccccccccttattttttcaaatttgctggcgatttgtcagcccagctattatcttctttatactagtgttcacagtcattcagtaccagcccatcacgtacaatcactatcaatacccaggctgggcggtcgcaattgggttcctgatggctctgtcttctgtactttgcatacccctatacgctatgttcagactctgtaggactgatggcgataccctcctgcaaagactgaaaaatgccacaaagcctagcagagattggggcccggcattgcttgaacaccgaactgggcggtacgccccaaccattgcgccgtcgcctgaagatgggttcgaggtacagccgcttcacccagacaaggcacagatcccgatagtgggatccaatggtagttcacggcttcaggacagcagaatttag

SEQ ID NO: 135573 - DNA, 1569 bp, synthetic construct
  misc_feature 1..1569: note = Description of Artificial Sequence: Synthetic coding sequence
  source 1..1569: mol_type = other DNA
atgatggtggtcagcacctatatcggcatctattataatgttgtgatttgcatcgccttctattatttcttttcctccatgacgcacgtgctgccttgggcttattgtaacaatccctggaacacgcacgattgcgctggcgtcctcgacgcgagcaatctaacaaacgggtcccggcctgccgccttgcccagcaacctcagccatcttcttaaccactccttgcagcgcacctcgccatctgaggagtactggagactgtacgtcctgaaattgtccgacgacattggtaactttggtgaggtgagactacctttgctggggtgcctcggagtctcctggctggtggtttttttgtgtcttatccggggcgtcaaatcgtccggtaaggtggtctattttacggccaccttcccatatgtcgtcctgaccatcctgttcgtgagaggagtgacactggagggcgcctttgatggcataatgtactacctgaccccccagtgggataagattctggaggctaaggtttggggcgacgccgccagccagattttttactcacttggctgtgcctggggcggcctcattacaatggcttcttacaacaagtttcacaataattgctaccgggatagcgttattatcagcatcaccaattgcgcaacgagcgtgtacgccgggtttgtgatcttttccatactcggattcatggccaaccatctaggggtcgacgtatcccgggttgccgatcacggtccaggactcgcattcgtggcctacccagaagctctgaccttgttgcccatttcacctctgtggagcctcttgttcttcttcatgctgattctacttggcctggggacgcagttctgcttgcttgaaacactggtcacggctatcgtggacgaggtggggaacgagtggatcttgcagaagaagacttacgtgaccttgggagtcgccgtcgccggtttcctcttgggcattccccttacatcacaagccggcatctattggcttttgctcatggacaactacgcagcttccttctccttagtcgttatcagttgcatcatgtgtgtggcgattatgtacatctatggacatcgaaattacttccaggatatccagatgatgctcggattccctccgccacttttctttcagatctgctggaggtttgtgagtccggctattattttcttcattctcgtgtttaccgttatccagtatcagcccattacctataaccactatcagtatccaggttgggcagtggccattgggtttctgatggcgttgagtagtgtgttgtgcatcccactctacgccatgtttcgcctttgtaggacagatggcgataccttgctacaacggcttaaaaacgccactaaacccagccgagattgggggccagccctgctcgagcatcggacgggaaggtatgccccaaccattgctccgtcccccgaggatgggtttgaggtgcagccactgcaccccgacaaggcacagataccaatagtcggatctaatggctcctctcggctacaggactcccggatctag

SEQ ID NO: 135574 - DNA, 405 bp, synthetic construct
  misc_feature 1..405: note = Description of Artificial Sequence: Synthetic coding sequence
  source 1..405: mol_type = other DNA
atgtccggaggcgacaccagagctgcgatcgcacggccccgcatggctgccgcgcatggcccggtcgcacctagttctcccgagcagaacggcgctgtcccctccgaggccacaaagagagaccagaatctcaaaagagggaattggggtaaccaaattgaattcgtcctgacgtccgtcgggtatgccgtgggactgggaaatgtctggcggtttccatacctgtgctaccggaacggcggcggggcctttatgttcccctattttatcatgctgatattttgcggaattcctttgttctttatggaactaagcttcggacaattcgcgagtcagggctgcctgggcgtctggagaattagtccaatgttcaaaggcgtaggatacggcatgatggtcgtgtag

SEQ ID NO: 135575 - DNA, 1161 bp, synthetic construct
  misc_feature 1..1161: note = Description of Artificial Sequence: Synthetic coding sequence
  source 1..1161: mol_type = other DNA
atgttcccctactttatcatgctgatcttctgtgggatccccctgttctttatggaactgtctttcgggcaattcgcaagccagggatgtctgggggtgtggagaatttctcccatgtttaagggagtggggtacggtatgatggtggtgagtacctatattgggatctactataatgttgtgatctgcatagcgttttattattttttctcatccatgacccacgtgttaccctgggcctactgcaataatccatggaatacgcacgattgcgcaggtgtcctggacgcgagcaatctgactaatggaagtagaccagcagcattgccgagtaacttgtcacatctgcttaaccactcgctgcaaaggacctctcctagtgaagagtattggaggctgtacgtgttgaagctgtccgacgatattgggaacttcggggaagtgcggctgcctctgttggggtgcctgggggtcagctggctggtggtcttcctgtgcttgataagaggagtaaagagttctggtaaggtagtgtacttcaccgccacatttccatatgttgtgttaaccattctcttcgtcaggggggtgactctggagggcgccttcgacggcattatgtattatctgaccccccagtgggacaagatcctcgaagcaaaagtttggggagacgccgcaagccagatattctatagcctcggctgcgcgtgggggggcctgatcacgatggccagttataataaattccataataactgttaccgagacagtgtgattatttcaattaccaattgtgccaccagcgtgtacgcggggttcgtgatattcagcatcctgggatttatggccaaccatctgggagtggacgtctcgcgagttgcagatcacggcccgggtctggcctttgtcgcctatcctgaagccttgactctcctccccataagccccctctggtcactgctgttcttcttcatgcttatcctcctgggcctggggacccaattctgcctgctggaaaccctcgtgacagctatagtcgatgaagtcggcaacgagtggatactacagaagaaaacgtacgtcaccctcggggtcgccgtagccgggttcctgttgggtatccccttgacgtcacaagcttcgatcgggtgctgttag

SEQ ID NO: 135576 - DNA, 1050 bp, synthetic construct
  misc_feature 1..1050: note = Description of Artificial Sequence: Synthetic coding sequence
  source 1..1050: mol_type = other DNA
atgggagacatgggtgaccctccaaaaaaaaagagactcatctctctgtgcgtaggctgtgggaaccagattcacgaccaatatatccttcgcgtttcgcccgacttagagtggcatgcagcctgcctcaagtgtgcagagtgtaatcaatatcttgacgaatcatgtacttgctttgttcgggacgggaaaacttattgtaagagggactatattcgcttgtatgggattaaatgcgcaaagtgttccatcgggttctcaaagaacgatttcgttatgcgagctcgatctaaggtttatcatatagagtgctttcgctgcgttgcatgcagtagacagcttatccccggcgacgaattcgccctcagggaggacggtctgttttgtagggccgaccacgatgtcgttgaaagagctagcttgggcgccggcgatcctttatctccattgcatccggccagacctttgcagatggcagccgagcctatctcggccaggcagcccgcgctcaggcctcacgtgcacaagcagcctgagaagaccactcgcgtgcgcaccgtgctgaatgaaaagcagctgcacacactgcggacctgctatgccgccaatccaaggccggacgctcttatgaaggaacagctagtggaaatgaccgggctgagtcctcgggttatcagagtgtggtttcagaataagaggtgtaaggacaaaaaaaggagtataatgatgaaacagcttcagcagcagcaacccaacgataaaacaaatattcagggcatgaccggcactcccatggttgccgcatctccggagagacatgatggtggtctccaggccaaccctgtcgaagtgcagtcataccaacccccatggaaggtgctgagtgatttcgctctgcagtctgatatagaccaaccagcattccagcagttggtcaacttctccgagggcggccccggctccaacagcacaggcagtgaggtggcttctatgtctagtcagctgcccgatacccctaattcgatggttgctagcccaattgaggcgtag

SEQ ID NO: 135577 - DNA, 2283 bp, synthetic construct
  misc_feature 1..2283: note = Description of Artificial Sequence: Synthetic coding sequence
  source 1..2283: mol_type = other DNA
atgctcagtgacgatcacgtcaacgagatcatcattcaggtcgagaacgtgtcctccggcgtgcaatcccatccgtcttcaaaccagatttttcaagagaaggtcctgctggactcaagcattaacatggttctaagcatctctgatattgacgtaatcgacagtcagaccgtgtcgaaacggaacgaccagaagggaaaccaggtgcttagattcagtacttctctgaatgagagcatgtcgcagactctgcactcactggagtgcatggggatcgatactcctggatcctctcacgagacagtgcagggccagaaactgattgctagtcttataccaatgacctcacgggataggatcaaggccattcgaaaccagcccaggactatggaagaaaagcgaaaccttcggaagattgtagacaaagaaaaatcgaaacagacccaccgcatattgcaactcaattgctgcatccaatgcttgaacagtataagccgtgcatatcggagatccaagaacagcctcagcgagattctcaactcgattagcctgtggcagaaaacgctcaaaatcattggcggaaagttcgggacctcagttctttcttactttaatttcctacgatggctccttaagtttaatatctttagcttcatactaaatttttcattcatcattatcccacagttcactgtagcgaaaaagaatacactccagttcaccggcctggagttttttactggtgtgggctattttcgagataccgtgatgtattacggcttctacactaattcgaccatacagcacggcaattcgggagccagttataacatgcagctggcatacatttttactatcggagcatgtctgaccacttgtttctttagtcttctgttttctatggccaagtactttcgcaataactttattaacccgcatatctattctggtgggatcacaaagctgattttttgctgggatttcactgtcacacacgaaaaagctgtgaaactgaaacagaaaaacttaagcacagagatccgagaaaatctgtcagagctcagacaggaaaatagcaagctgacatttaatcagctgctaacaagattcagcgcttacatggtggcctgggtggtcagtaccggagttgcgattgcctgttgcgccgccgtctactatctggccgagtataacttggaattcctgaagacccactccaatcccggcgccgtgctgctactccctttcgtcgtatcctgtattaatctggcagtcccctgcatttacagcatgttcaggctcgtagagaggtatgagatgccccggcacgaggtatatgtattgctcatccgaaatattttcctgaagatcagcattattggcatcctctgttactattggctgaacacggtggccttaagcggcgaggagtgttgggagacgttaattggacaggacatctatcggctgctgttaatggacttcgtgttttcactggttaactccttccttggagagtttctccgacggatcatagggatgcaattaattacgtctttagggctgcaggagtttgacatcgcccgaaacgttctggagctgatttacgctcaaaccctggtgtggattggaatctttttctgcccactcctgccctttattcaaatgatcatgctgttcatcatgttctatagcaagaatatatcactaatgatgaatttccagcctccttccaaagcctggcgggccagtcagatgatgactttcttcatcttcctgctttttttccccagcttcaccggcgtgctttgtactctggccattaccatctggcgccttaagcccagcgcagactgcggaccattccggggacttcctctgtttatccacagcatctacagctggatcgatactctgagcacacgacccggctatctgtgggtagtgtggatctataggaatctcattgggtcagttcatttttttttcatcctgactctcatcgtgctgatcatcacgtatctgtattggcagatcaccgaaggcaggaaaattatgattcgcctgctgcacgagcaaatcataaatgaagggaaagacaagatgtttttgattgagaaactgatcaagctgcaagatatggagaagaaagctaacccaagtagcctggtcctggagcggagagaagtcgagcaacagggattcctgcatcttggggaacacgatgggtcactggacctacgaagtagaaggtctgtccaggagggtaatcctagggcctag

SEQ ID NO: 135578 - DNA, 1854 bp, synthetic construct
  misc_feature 1..1854: note = Description of Artificial Sequence: Synthetic coding sequence
  source 1..1854: mol_type = other DNA
atgctgttggcccgtatgaatccccaggtgcaacctgagaacaatggggctgacacaggacccgaacagcctctgagggctaggaaaaccgctgaattgctggtggtcaaggagaggaacggcgtccagtgcctgcttgctccacgcgatggagacgcacagcctagagaaacatggggtaagaaaatagactttctactcagcgtagtgggatttgccgttgatctcgccaatgtttggaggttcccctatctatgttataagaacggagggggcgcctttctgattccttacactctgtttctgattatcgctggaatgccactgttttatatggaactggctctaggccagtataatcgcgagggtgctgctaccgtgtggaaaatctgtccctttttcaaaggtgtgggttacgcagtcatcctgatagccctatatgtcggcttctactataacgtgattattgcatggagtctatactatctttttagcagttttacccttaacctaccctggactgactgtggccatacgtggaactccccaaactgtacagacccaaagctcttgaatgggagcgtcctgggcaaccatacaaagtattctaaatataaatttacacctgccgctgagttttacgagcgtggcgtgctccatcttcacgaatcatccggtattcacgatatcggcctgccccaatggcaattgctgctttgcctgatggtggtggtgatcgtgctctactttagcctgtggaaaggggtgaagaccagcgggaaggtagtatggataaccgccacacttccctactttgtcctttttgtattgcttgttcatggtgtgactctgccaggagcatcgaacgggattaatgcatacttgcatatcgacttttacagactgaaggaggccacagtgtggatagatgctgcgacccagatattcttcagcctaggggctggattcggagtattaattgccttcgcctcctacaacaagtttgataacaattgttatcgggacgctctcctgacaagttctatcaattgcattacctcctttgtgtccgggtttgccattttcagtattctcgggtacatggcccatgagcataaggtcaacatcgaagacgtcgctacagaaggggccgggctggtgtttattctgtaccctgaggccatcagcaccttgtctggatccacattttgggccgtcgtgtttttcgtcatgctcctcgcacttgggttagacagtagcatgggcggcatggaagccgtgatcacaggactggcggatgactttcaagtgcttaagcgacatcgtaagctgttcaccttcggcgtgaccttctcaacctttcttctggccctcttctgcataacaaagggcgggatatacgtgctgacattgttggacacctttgccgccgggacttcaattctgttcgcagtgttaatggaggccataggagtgagttggttttacggcgtggacagattctccaacgacatccagcagatgatgggctttcgtccgggactgtactggagactgtgttggaagttcgttagccctgccttcctcctatttgtggtggtcgttagtataataaatttcaagcctctcacatacgatgactacattttccccccttgggctaattgggttggctgggggattgcacttagtagcatggttttggtgcccatttatgtgatatataaattcttaagcacccaaggcagcctgtgggaacgcctggcttatggcatcactcctgagaacgaacatcacctggtggctcaaagagacataagacagttccagctgcagcactggctcgccatatag

SEQ ID NO: 135579 - DNA, 1854 bp, synthetic construct
  misc_feature 1..1854: note = Description of Artificial Sequence: Synthetic coding sequence
  source 1..1854: mol_type = other DNA
atgcttctggcaaggatgaaccctcaggtgcagccagagaacaacggagccgacacaggacccgagcagccccttagagcaaggaagacagctgaactgctggtcgtgaaagagcggaacggcgtgcagtgtttactggcacctagagacggcgacgcacagcctcgagagacatggggtaagaaaattgacttcttgctatccgttgttgggtttgccgttgaccttgctaacgtttggcggttcccttacttatgttataaaaacggggggggtgcatttctgatcccctatacactgttcctcattattgccggcatgcccctgttttacatggaactggccttgggacagtacaaccgcgagggagccgctaccgtgtggaaaatatgcccattcttcaagggggtgggatacgccgtgattctgattgccctctacgtagggttttattataatgtgattatagcatggtccctttactacctgttttcttcattcacgcttaatctgccatggacagactgtggccacacctggaactcccccaattgcaccgacccaaagctgttgaatggatcagttctgggtaatcacaccaagtattcaaaatataaatttacacctgcagccgaattctatgaacggggagtcttacatctccacgagtcaagcggcatccatgacattgggttgccccagtggcaactgctgctgtgcctcatggtggtcgttatcgtattgtatttctcgctttggaagggggtgaagacttccggtaaggtcgtgtggataaccgccaccctaccttacttcgtgctcttcgttttgctggtgcacggagtgaccctgccaggagcctcaaatgggatcaatgcatatctacacatcgatttttaccgcctgaaagaagccacagtgtggattgatgcggctacacagatcttcttttcactaggagcggggttcggcgtgctgattgcattcgctagctacaataagtttgataataactgctatcgcgatgctctactgacctcttctattaactgcattacatcgttcgtcagcggcttcgcgatctttagcatactcggctatatggcacacgagcataaggtcaacatagaagacgtggcaacagaaggtgcaggcctggtgttcattctatatcctgaagctataagcacactctccggaagcacattttgggccgttgtgttctttgtgatgttgcttgcattgggtttagatagctcaatgggaggtatggaggctgtaatcaccgggctggccgacgattttcaggttctgaaacgacatcgcaaactgttcacctttggagtgacctttagcacattcctgctggcccttttttgcataacaaaaggaggcatttatgtgctgaccttactggacaccttcgccgcaggcacatccattctatttgctgtgctgatggaggctatcggcgtgagttggttctacggggtcgatcggtttagtaacgacatccagcagatgatgggattcaggcccgggctgtactggagattgtgttggaaatttgtcagcccagcgttccttttgttcgtcgtggtcgttagcattattaattttaaaccgctgacgtatgatgattatattttcccaccctgggcaaattgggtgggttggggaattgcgctaagctcgatggtgttggtgcccatctatgtgatatataagtttctgtccacccagggatctctgtgggaacgcttagcttatggaatcacacccgaaaacgagcatcatctggtggcacaacgggatatccgccagtttcagctacagcactggctggccatctag

SEQ ID NO: 135580 - DNA, 996 bp, synthetic construct
  misc_feature 1..996: note = Description of Artificial Sequence: Synthetic coding sequence
  source 1..996: mol_type = other DNA
atggtcgtggtcatagtcctctatttttcactttggaaaggagtgaagaccagtggaaaagtttggatcgacgcggctacacagatctttttcagcttaggagcaggctttggcgtccttatcgcattcgcctcttacaataagtttgacaataattgttatagagatgcactgctgacgtcaagtatcaattgcattacttcattcgtgagtggttttgctatattcagcatactgggttacatggcacacgaacacaaggtcaacattgaagacgtcgcaacagaaggcgccggcctggtctttattttgtatcccgaggccatatcaaccctcagcggttctaccttctgggctgttgtgttcttcgtaatgctgctagccctgggccttgatagttctatgggtgggatggaggcggtcattaccggactggctgacgattttcaggtgctgaagcgccacaggaaactgttcactttcggcgttaccttcagcaccttcctgctggctctcttctgtatcaccaagggtggaatatatgtcctcacccttttagacaccttcgccgctggtacatccattcttttcgcagtgctgatggaagccataggcgtgagctggttctacggtgtggacaggttctcgaacgacatacaacagatgatggggttcagacctggcctatattggcggctatgttggaaattcgtgtccccggcgttcctgctattcgtagtcgtggtgtctatcatcaatttcaagcctttaacctatgatgactacattttccccccttgggccaattgggtggggtggggtatagccctctcatctatggtgctggtgccgatctatgtcatttataagtttctatctacgcaaggttccctttgggaacgtctagcatatggaattaccccggaaaacgagcaccatctagtggcgcagagggacatcaggcagtttcagctgcagcattggctagcaatctag

SEQ ID NO: 135581 - DNA, 1893 bp, synthetic construct
  misc_feature 1..1893: note = Description of Artificial Sequence: Synthetic coding sequence
  source 1..1893: mol_type = other DNA
atggaaactactcctctcaatagccagaaacagctgagcgcatgcgaggatggagaagactgccaggagaatggtgtgttgcagaaggtggttccgacgcctggtgacaaagtggagtccggacagatttccaatgggtactccgctgtcccatcccccggagcgggtgacgatacaaggcactcaattccagccaccaccaccaccttagtggccgaattacaccaaggggagagagaaacatggggaaaaaaggtggacttcctgctgagtgtgatcggttatgccgtggacctaggaaatgtgtggcggtttccttacatctgctaccagaatgggggtggcgcttttttgctgccctatacaatcatggccatattcggggggattccactattctacatggaactggctctggggcaataccaccgaaatggttgcatctctatttggcggaagatatgtcccatcttcaaggggataggctatgcaatttgtatcatcgctttttatattgcatcttattacaacaccattatggcatgggctctatactacctcatcagctcctttacggatcagctgccatggactagctgcaagaacagctggaataccggaaactgtaccaattatttttcagaagataatataacttggacgctacattctaccagtcctgcggaggaattctatacccgccacgtccttcagatacaccggtcgaaagggcttcaagacttgggcggcatatcctggcagctcgccctgtgcattatgctgatcttcacggtcatatatttttccatctggaaaggggtgaagacctccggaaaagtggtgtgggtgaccgcaaccttcccttacattattctctccgtcctgctggtgaggggggcgactctccctggcgcatggcgaggggtccttttctatctgaagcccaactggcaaaagttacttgagacgggcgtgtggatcgacgctgccgcacaaatcttcttttcgcttggccctgggttcggggtgctgctggcttttgcaagctacaacaagtttaataacaactgctatcaggacgccttggtgacatcagtcgtcaattgcatgacttcctttgtgtcagggttcgtgattttcacagtactgggatacatggcagagatgagaaatgaggacgtgagcgaggtggccaaagacgctggcccaagcttgctttttattacatacgctgaagctatcgccaatatgccggcatccacattctttgccatcatcttcttcctgatgctaatcacattggggctggattcaacctttgccggtctggagggagtgatcactgcggtcttggacgagtttccgcacgtatgggccaaacgcagagaacggtttgtgctggctgtagtcatcacatgtttttttggttcgctcgttactctgacatttggcggagcttatgttgtgaagctcctggaggaatatgctacaggccctgccgtgctgaccgtggccttaattgaggcagtggcagtctcttggttctacggaattacccaattctgtagagacgttaaagagatgcttggattttctcctggatggttctggcggatctgttgggttgctatctcccctttgttcctcttatttattatctgtagttttctgatgagccctccacagttacgcctttttcaatacaactatccctactggagcatcatcctgggatactgtattgggacatcgtcctttatttgtatccccacatacatagcttacagactgataatcactccaggtactttcaaggaacgcatcattaagagcatcactcctgagacccctacagaaatcccctgtggggacataaggctgaacgccgtgtag

SEQ ID NO: 135582 - DNA, 2019 bp, synthetic construct
  misc_feature 1..2019: note = Description of Artificial Sequence: Synthetic coding sequence
  source 1..2019: mol_type = other DNA
atgtcccagtcacgtagggtaaatcccgacgatcgggagttgggcggcgacccccaaatccaagccccccgcgaccagctgggatcgctggctgacgggcatcagtgccatttattgacttctcgcatggagaccaccccactaaattcccagaaacagctgtctgcttgtgaggacggggaggactgccaggagaatggagtgttgcagaaagtcgtgcccacccccggtgataaagtcgaatccggtcagatttctaatggttacagcgccgtaccaagcccaggcgccggagatgatacgcgtcactcaatccctgccacgactactaccctggtggcggaattgcaccagggcgaaagagaaacatggggcaagaaggtagattttctgctgtcagtcatcgggtacgctgtggatcttggcaacgtgtggagattcccatacatctgctatcagaatgggggaggggcattcctcctgccatacacgatcatggcaatcttcggcggaataccactcttctatatggagctggccctgggccagtatcataggaacggatgcatctctatctggaggaagatttgccctatcttcaagggtatagggtacgccatttgtattatcgccttctatattgcctcctactataacaccataatggcctgggccctttattacctgatcagtagtttcaccgaccaactgccctggacatcttgtaagaatagctggaacacaggcaattgcactaactattttagcgaggacaatatcacttggacactacattccacttctcctgctgaggagttctacactaggcatgtgctccagattcacaggtccaagggactccaagatttgggcggcataagttggcagctggcgttgtgcattatgctaatttttactgttatttatttctccatctggaaaggtgtcaaaacctcaggcaaagtggtatgggtgactgccactttcccctatatcattctgtcagtgctgcttgtgcggggagcgactttgccgggggcatggagaggggtgctgttctacctcaagcccaattggcagaaacttctggaaaccggcgtttggatagatgcggctgcacagattttcttttctctgggtccagggtttggagttctactcgcattcgcttcctacaacaaattcaataataactgttaccaggatgctctagtgaccagcgtagtcaattgtatgacatcctttgtaagtggattcgtcattttcaccgttctggggtacatggccgaaatgaggaacgaggatgtcagcgaagtggcaaaggacgcaggccctagcctcctgttcattacctacgccgaagccatcgccaacatgccagcttcgacgttcttcgccatcatctttttccttatgctgataacactcggattagactcaacgttcgctgggctggagggcgttattactgccgtgttggacgagtttcctcatgtgtgggctaaaagacgggagaggttcgtattggctgtcgtgatcacctgtttttttggatcactggtcactctgacgtttgggggggcctacgtggtcaagctgctcgaagagtacgccacgggccccgctgttttaaccgtcgccctgattgaagctgtagcggtgagctggttctatggaatcacgcagttctgcagggacgtgaaggagatgctagggtttagcccaggatggttctggagaatttgttgggtggcaatcagtcctctctttctgttatttattatatgctctttcctcatgtctcctccacaactgcggctgtttcagtacaactacccctattggtcgatcatcctgggctattgtattgggacctcgtcgttcatttgtatcccaacatacatcgcctatcgcctcataattaccccaggcacttttaaagagcgcatcattaagtccatcactcccgaaacaccaaccgagattccttgcggagatatccgcctcaacgcagtctag

SEQ ID NO: 135583 - DNA, 1893 bp, synthetic construct
  misc_feature 1..1893: note = Description of Artificial Sequence: Synthetic coding sequence
  source 1..1893: mol_type = other DNA
atggagacaaccccccttaattctcagaaacaactgtccgcttgcgaggacggggaggattgtcaggagaacggggtccttcagaaggttgttcctacgcccggtgacaaggtcgagagcggtcagatatctaatggatacagcgccgtgccaagcccaggagcgggtgatgatacgcgacacagcattcctgctaccaccaccactctggtggctgaactgcaccagggggaacgcgagacatgggggaaaaaagtcgactttctcctgagcgtaatagggtatgcagtggacctgggcaatgtgtggcgctttccgtacatctgttatcagaacgggggaggggctttcctactcccttatacgataatggccattttcgggggtatcccactgttctatatggagctggccctggggcagtatcacagaaacgggtgtatctccatctggaggaaaatatgtcccatatttaaaggcatcgggtacgccatttgcatcatagctttttacatcgcttcttactataacacaatcatggcttgggccctgtactatttgatctctagctttaccgaccaattgccttggacgtcttgcaaaaactcatggaatacagggaattgtaccaattatttctcagaggataatatcacgtggactctgcatagcacgtctcccgccgaagaattttacactcgtcacgtattgcagatccatcgatccaaaggtctgcaggatctgggcggaatctcatggcagctcgccctgtgtataatgctcatctttaccgtcatttatttcagcatctggaagggagtaaaaacatcaggaaaagtggtgtgggtgactgcgaccttcccttacatcatactgtcagttctgctggtcagaggggccaccctaccaggtgcttggcgtggggtcctattctatcttaagcctaactggcagaagttattggagacaggagtttggattgacgcagctgctcagatttttttctcgctcggaccaggctttggagtgttgctggccttcgccagttataataagtttaacaacaattgttaccaggacgcgcttgtcactagtgtggtgaactgcatgacttcgtttgtgagtggtttcgtaattttcacagtgctggggtacatggcagaaatgcgtaacgaagatgtcagtgaagtagcaaaagatgccggtcctagcctcctgtttattacgtacgcagaggcaattgcgaatatgccagcatccacgttcttcgccattatcttttttttgatgctgattacactgggccttgactctacctttgcagggctcgaaggtgttatcacagcagtgctcgacgagtttccacacgtttgggccaaaaggagggaacggttcgtcctggctgtggtgattacttgcttctttgggtcactggtaaccttgaccttcggcggagcctacgtggtcaaattactcgaggaatacgccacaggccctgccgtgctcacagttgcactgattgaagccgttgccgtttcatggttctatgggatcactcaattctgccgcgatgtaaaggaaatgttggggttctcccctgggtggttctggaggatatgctgggtcgccatatctccactgttcttgcttttcatcatttgctccttcctcatgtcccccccacagctgcgcctgttccagtataattacccttactggtctatcattctggggtattgcattggaacctcttcctttatttgtatcccaacctacattgcatataggcttattatcactcctggcacatttaaggaacggatcatcaaatctattactccagagacaccgaccgaaatcccatgcggtgacatccgtttgaacgccgtgtag

SEQ ID NO: 135584 - DNA, 1863 bp, synthetic construct
  misc_feature 1..1863: note = Description of Artificial Sequence: Synthetic coding sequence
  source 1..1863: mol_type = other DNA
atggccaccaaagagaagcttcagtgccttaaagacttccacaaggatatcctcaaaccgtctcctgggaagagccccggaaccaggccagaggacgaagcagaaggcaagcctccccagagggaaaagtggagttcaaaaatcgatttcgtcttatcagtggccggcgggttcgttgggctgggcaatgtctggagatttccatacctgtgttataagaacgggggcggtgcatttctcatcccatattttatcttcctgttcggcagcggcctgcctgtgttcttcctggagattatcataggtcagtacacttccgaggggggaatcacctgctgggaaaagatttgtcccttattctctggcatcggttacgcttcagtcgtgattgtgagtcttctgaacgtctactatatagtgatcctggcctgggctacatattacctttttcaaagtttccagaaagaattgccttgggcccactgcaatcatagctggaacaccccccactgtatggaggacactatgcggaaaaacaaatctgtgtggataaccatctcaagtactaacttcacttctcctgtaattgaattttgggaaaggaacgttctgagcctctctcctggtatcgatcaccctggcagcctcaagtgggatctcgcattgtgcctgctgctcgtctggcttgtctgttttttttgcatttggaagggagtgcgttccaccggtaaggtagtgtatttcaccgcgactttccctttcgctatgctcttagtgctattagtgcggggcctgacactgcccggcgcaggggccgggattaagttttacctatacccggacataaccagactcgaagatccgcaggtctggattgatgctgggacgcagatattcttctcatacgcaatctgcctgggtgcgatgacctccctgggttcatataacaaatacaagtataatagctacagagactgtatgctactagggtgcctcaactcgggaacctctttcgtgtcggggtttgcgatctttagcatcctggggtttatggcgcaggagcagggcgtggatatagcagatgttgcagaatccgggccaggtcttgctttcatcgcctatccaaaagcagtgactatgatgccattacctacattctggtctatcttgtttttcatcatgcttctactgctcggattagacagccagttcgtggaggtcgaaggacaaatcacaagcttggttgatctgtacccatcgtttctgcgcaagggttacaggagagaaatattcatcgccttcgtgtgctcaatatcctacctgctggggcttaccatggtgacagagggcgggatgtatgtctttcagctgtttgattactatgccgcctccggagtctgcctcctttgggttgctttcttcgagtgtttcgtcatcgcctggatttatggaggggataatctctacgatggaatcgaggacatgattggataccggcctggaccttggatgaagtacagttgggctgtgataactccggttctgtgtgtgggctgtttcatattctcgctggtgaagtacgtgcccctcacatataacaagacttatgtgtatccaaattgggcaatcggtctcggctggagcctggcacttagtagtatgctttgtgtgcctctggtgattgtgatacgcctgtgtcagacagagggcccattcctggtgcgcgttaaatatctgttgactccaagagaacccaaccgatgggctgtggagagagaaggagcaacaccttataattctcggacagtgatgaatggtgccctggtcaagccaacccatatcatcgtggagacgatgatgtag

SEQ ID NO: 135585 - DNA, 603 bp, synthetic construct
  misc_feature 1..603: note = Description of Artificial Sequence: Synthetic coding sequence
  source 1..603: mol_type = other DNA
atggcgacaaaggagaaattgcaatgtctcaaagattttcataaagacatcctgaaaccctccccaggtaagagtcctggcacaagaccagaagatgaggccgagggaaagcctccccagagggaaaagtggagctcaaagatcgacttcgtcctaagcgtggcaggaggattcgttggcctgggaaatgtgtggcgctttccatatctttgttacaagaatgggggtggagcattccttattccctactttatctttctgttcggctctggattgcccgtgttcttcttggaaattatcatcggacagtacaccagcgagggcggcatcacctgctgggagaaaatttgtccgctgttttcaggtatcgggtacgcgtcagtggtgatcgtcagcctactgaacgtgtactacattgtcattctggcatgggcaacctactatctgtttcagagcttccagaaagaactcccatgggctcattgtaatcattcatggaatacaccacactgcatggaagataccatgcgtaagaataagtctgtttggatcaccattagctctaccaactttacctctcccgtcatcgaattttgggagtag

SEQ ID NO: 135586 - DNA, 1080 bp, synthetic construct
  misc_feature 1..1080: note = Description of Artificial Sequence: Synthetic coding sequence
  source 1..1080: mol_type = other DNA
atggcaactaaggaaaagctgcagtgcctcaaggatttccataaagacatactgaagcccagcccagggaagagccccggtacccgccctgaggacgaagcagagggcaaaccgcctcaacgggaaaagtggtcctcaaaaatcgactttgtgctgtcagtcgctggtgggttcgttggtttgggaaacgtctggcggttcccctatttatgttataagaatggcggcggagcttttctgattccctacttcattttcctgttcggctctgggctgcccgtgttttttctggagatcataattggacagtatactagcgagggcggtatcacatgttgggagaaaatctgcccactgttcagtggcattggatacgccagtgtggtcattgtctctctgttgaatgtatattatatagtcatcctagcctgggccacctactaccttttccagagcttccagaaggagcttccatgggcacactgcaaccacagctggaatacccctcattgtatggaggacaccatgcgaaaaaataagagtgtttggattacaatctccagcaccaactttacgtcccccgtcatcgaattttgggaaaggaacgtcctgagcttaagcccgggtatcgaccatccagggagtctgaaatgggaccttgcactttgtttgcttctggtctggctcgtgtgttttttctgtatctggaaaggggtgagatctacaggcaaagtagtgtactttacagccaccttccctttcgccatgctgctcgtcctgcttgtgcggggcctgacattaccaggtgcaggcgctgggattaagttctatctgtatccagatattactagactggaagatccccaggtctggattgatgccgggacccagatatttttttcatatgccatctgcctgggcgccatgacttccctcggcagctacaacaagtacaagtataacagctacagatcttggcctggactccactgccttcctaaaagttgcgacaatgacgcggcagcacatatccttgttcacagctttttctattacgccagcttggcttggaccgggtag

SEQ ID NO: 135587 - DNA, 330 bp, synthetic construct
  misc_feature 1..330: note = Description of Artificial Sequence: Synthetic coding sequence
  source 1..330: mol_type = other DNA
atggccacaaaggaaaagctgcagtgtctgaaggactttcataaggatattctgaaaccttccccgggaaagtctcctggtacgcgccccgaagatgaagctgaaggaaagccgcctcagcgcgagaaatggtcttcaaagatcgactttgtgctgtccgtggctggaggatttgttggactgggaaacgtgtggagatttccatatttatgctacaagaacgggggaggcgcatttctaatcccatacttcatcttcttgtttgggagcggcctaccagtattcttcctggaaataatcatcgggcagtataccagcgaagggggttag

SEQ ID NO: 135588 - DNA, 1863 bp, synthetic construct
  misc_feature 1..1863: note = Description of Artificial Sequence: Synthetic coding sequence
  source 1..1863: mol_type = other DNA
atggctacaaaggaaaaactgcagtgtttaaaagacttccataaagacattctgaagccaagtcccggcaaatccccaggtaccaggccagaggatgaagcagaggggaagcctcctcagcgcgagaagtggtcttcgaaaatcgatttcgtgctgtcagtagctggcggctttgtcggcctgggaaatgtgtggcgtttcccctatctgtgttacaagaacggaggaggggcctttcttattccttactttatcttcctcttcgggagcggactccccgtgtttttcctggaaataatcattggacagtacaccagcgagggcggtatcacgtgctgggagaagatctgccctctgttctctggcattggctatgcaagcgtcgtgatcgtttccttacttaatgtgtattatatagttattctggcctgggccacatattacctgtttcagagcttccaaaaagaacttccgtgggcgcactgtaatcacagctggaacactcctcattgcatggaggacacaatgcgaaagaacaaatcggtttggattacaatttctagtacaaatttcacctcccccgtgatcgaattctgggaacggaacgtattgagcctctcaccaggcatagaccatcctggctctctgaagtgggatttggccttgtgcctcctcctcgtctggctggtgtgctttttttgcatctggaagggcgtaaggtcgaccgggaaggtggtgtactttaccgcgacattcccttttgccatgctgctcgtcctcctggtacggggtcttactttgccgggtgccggggcaggtattaaattctacctctaccccgacattacgagattagaggaccctcaggtctggattgacgctgggacccagatctttttttcctatgccatatgcttgggagctatgacctctctcggctcttataacaaatacaaatataactcatatagagattgtatgctgttgggttgccttaattcgggaacatccttcgtctccggcttcgccatcttctccatcttgggcttcatggcacaagaacaaggcgtggatattgccgatgtggcagagtcagggcccggcctcgccttcattgcttatcccaaagctgttaccatgatgcccctcccaaccttttggagtatacttttttttataatgttactgttgctgggactggactcacagttcgtcgaggtggaaggacagatcacgtccctggtcgatctgtacccctctttcctgcgtaaaggttacagacgggaaatttttatcgctttcgtttgctccatatcatacctgctgggtctgaccatggttaccgaaggagggatgtatgtgttccagctatttgattactatgccgccagtggcgtgtgtctgctgtgggtggcattttttgagtgctttgtaattgcctggatctacggcggggataacctgtatgacggtatcgaagacatgattgggtatagacccggcccatggatgaagtattcttgggccgtgattacccctgtcctgtgcgtcggttgtttcatattttctctggtgaaatatgttcctctgacatacaacaagacctacgtatatcccaactgggcaatcgggctgggatggagcttggcactttcaagtatgctgtgtgtgcccctggtgatagtcatacgtctgtgtcaaacagaggggccattcctggtaagggtgaaatatctcctgaccccaagggaaccaaaccgatgggccgtcgaacgggaaggcgcaacaccttataatagtcgcacggtcatgaacggtgccttggtaaaacccacacatattatcgtggagactatgatgtag

SEQ ID NO: 135589 - DNA, 1080 bp, synthetic construct
  misc_feature 1..1080: note = Description of Artificial Sequence: Synthetic coding sequence
  source 1..1080: mol_type = other DNA
atggccaccaaagagaagcttcaatgcctgaaggatttccataaggatatccttaagccgagtcccggaaagagtccaggcacccgccctgaggatgaagccgaagggaaaccaccccagcgggagaagtggagctctaaaatagatttcgtgctgagcgtggccggcggtttcgttggactgggcaatgtctggaggtttccctatttgtgctataagaacggaggcggtgcattcctgatcccatactttatctttctcttcggatccggactgccagttttttttctggaaattatcattggacagtatactagcgaaggcggaatcacttgctgggagaaaatatgccctctttttagcgggattggctatgcgtccgtggtcattgtttctctactgaacgtgtactacatagtcattctcgcatgggcaacctattacctcttccagtctttccagaaagaattaccatgggcccattgtaatcactcctggaacactcctcactgtatggaagataccatgcggaagaacaaatccgtctggatcaccatctcctctaccaactttacatccccggttatcgagttttgggagcgcaacgtcctcagcctgtcccctggaatcgaccaccccggctctctgaaatgggacctggctctgtgtcttctcctcgtctggttggtctgtttcttctgcatctggaagggtgtgaggtccacgggaaaagtggtttactttaccgctaccttcccctttgcaatgttattagttcttttagtgagggggctgaccctgcctggggccggcgccggcataaaattctacctctatcctgatatcactagacttgaggatccgcaggtctggatcgatgccggaacgcaaatcttcttcagttatgctatctgcttgggcgccatgacctcactcggcagttataataaatacaagtataactcataccgctcatggccaggcctgcactgcctccctaagtcctgtgacaacgatgcggctgctcatatccttgtccatagcttcttttactacgcctcacttgcctggaccggctag

SEQ ID NO: 135590 - DNA, 1905 bp, synthetic construct
  misc_feature 1..1905: note = Description of Artificial Sequence: Synthetic coding sequence
  source 1..1905: mol_type = other DNA
atggtgcgcctggtgctcccaaatcctggtcttgatgcacgcatcccctctctagccgagctggagacgatcgagcaagaagaagcctcgagcaggcctaaatgggacaacaaggcgcaatacatgttgacatgcctgggtttttgtgtaggcctcggtaacgtctggcgctttccttacctgtgtcagagtcatggcgggggggcctttatgataccttttctgattctcttagtgctggaaggaattccactgctgtacctggaatttgctatcgggcagaggcttaggcgcggatcactcggggtgtggtcaagcattcaccccgcactgaagggtctggggcttgcctccatgctgaccagcttcatggtaggactgtactataacaccatcatctcttggattatgtggtaccttttcaacagtttccaggaaccgttgccttggtctgactgcccgttgaatgagaaccaaactggttatgttgacgagtgcgccaggtcctcaccggtcgattacttttggtatagggagacccttaatatcagtacaagcatctctgacagcggcagcattcaatggtggatgctgctttgcctcgcatgcgcctggtctgtattgtatatgtgtaccatcaggggaattgaaacgaccggtaaggcggtgtacattacgagcacccttccctatgtagtccttaccatcttcctcatccgaggactaaccttaaaaggcgccaccaatggcatcgttttcttgttcacaccaaatgtgactgagttagcccagccagatacctggttggacgcaggggctcaggtgttcttctcatttagcctggcattcgggggtcttatctccttcagttcctacaatagcgtccataacaactgcgaaaaagattccgttatcgtcagtatcattaacgggttcacgtccgtttacgtggccatagtggtgtactcagtcataggcttcagagccacacagcggtacgacgattgttttagcaccaacattctgacactgattaatggctttgacctccccgaggggaacgtgacccaggaaaacttcgtggacatgcagcagaggtgcaatgctagcgaccccgccgcctacgcccagctcgtgtttcagacgtgcgacattaacgcctttctttcagaggctgtggaagggacagggctcgcattcatcgttttcaccgaagccatcacaaagatgcctctctcaccactgtggtctgttctgttcttcattatgttattttgtctcggactttcgtccatgttcggaaacatggaaggagtggtcgtgccactccaagatctgagagttattccaccgaagtggccaaaagaggtcctcaccggactcatatgtctcggaacattcctgataggctttatcttcacgttgaatagtggacagtactggctcagcctgttggacagttatgcaggcagtatcccattacttattatagcattttgcgaaatgttttcggtcgtgtatgtgtatggagtggatcgattcaataaagacattgagttcatgattgggcataagcccaatattttctggcaggtgacctggcgggtcgtttccccactcctaatgcttattatttttctgtttttttttgtcgttgaggtttcacaggaactgacatattcaatctgggaccctggctacgaggagtttccgaagtcccagaagatctcatacccaaattgggtttacgttgttgtcgtgatagtggccggtgtacctagcttgactataccggggtatgccatctataaactcattaggaaccactgccagaaaccgggcgaccaccagggactggttagcaccctgtccactgccagtatgaacggggacctgaagtactag

SEQ ID NO: 135591 - DNA, 1668 bp, synthetic construct
  misc_feature 1..1668: note = Description of Artificial Sequence: Synthetic coding sequence
  source 1..1668: mol_type = other DNA
atggagaaagctagacccctgtgggctaatagcctccagttcgttttcgcctgcatctcctatgccgttggcctggggaatgtgtggcggttcccctatctttgccagatgtacggcgggggcagcttcctcgtcccctatattatcatgctaatcgtcgaggggatgccgctgctgtacctggagttggcagtcggccagcggatgcgccagggctctattggagcctggagaaccatctcgccatacctttctggcgtcggtgtggcctcagtggtggtctcttttttcctctccatgtactacaatgtcatcaatgcatgggccttttggtatctgttccattccttccaggatcccctgccctggagcgtgtgtcccctgaacggcaatcacactgggtacgacgaagaatgtgaaaaagcttcctccacccagtacttttggtatcggaaaactctcaatatctccccctctcttcaagagaatggcggggttcagtgggagcctgcgctgtgtctcctgctggcctggctagttgtatatctctgtattctccgaggcactgaatccacaggcaagatcgaacagctggccaacccaaaggcatggattaatgccgccactcaaatctttttctcgctgggtctgggatttggctccctcattgctttcgcgagttacaacgagcctagcaataactgccaaaaacacgccatcatcgtgagcctcataaattcctttacatcaatttttgcttccatcgtgacattttcaatttacgggtttaaagcgacattcaattatgagaattgcctcaaaaaagtaagcctgctactgaccaatactttcgatctggaggatggctttctgacagcttccaacctagagcaagttaagggctacctggcctccgcctatccaagcaaatacagcgagatgtttcctcagataaagaattgttccctggaatcagagctggataccgcggttcaaggtacaggtctggcctttattgtttacactgaggccatcaagaatatggaggtctctcagttgtggtctgtgctctatttctttatgcttcttatgctgggcataggaagtatgttgggcaatactgcagctattctcacaccgctcactgactccaaaatcattagtagtcacctccctaaagaagcgatcagtgggctagtatgcctggttaattgcgctattggcatggtttttaccatggaggccggaaattattggttcgatattttcaacgattacgcggctactctctccctcctcctcatagtgttggtggaaaccatcgctgtctgttacgtgtatgggttgagacggttcgaatccgacctcaaggccatgactggaagggctgttagctggtactggaaagttatgtgggccggagtttcgcctctgttgattgtctctctgtttgtgttttacctgtccgactacattctgacaggcactctcaagtaccaagcctgggatgccagtcaaggccagttagtcactaaggactatcccgcctatgctctggctgtgattggcttgctggtggccagcagtaccatgtgtattcccctggccgcccttgggacctttgtccaaagacggctcaagaggggagacgcagatcctgttgcttag

SEQ ID NO: 135592 - DNA, 1779 bp, synthetic construct
  misc_feature 1..1779: note = Description of Artificial Sequence: Synthetic coding sequence
  source 1..1779: mol_type = other DNA
atggaaaaagcccgccctctgtgggcaaattcattacaattcgtcttcgcatgcatttcttacgccgtaggcctgggaaatgtgtggcgttttccatacttgtgccaaatgtatggcggtggtagcttcctcgtgccctatatcatcatgttaatcgtggaaggaatgccccttctttacttggagctcgcggttgggcaacggatgaggcagggtagcattggcgcttggcgaacaatcagcccctacctgtcaggcgtgggagtggcctcggtggtcgtgagtttctttctgtccatgtactataatgtcatcaatgcttgggcattctggtacctattccattcatttcaggaccctctgccttggtccgtatgcccactgaatggaaatcacacaggttacgatgaggagtgcgaaaaagcttcttccactcaatacttttggtatagaaagaccctgaatataagtccgtctctacaagaaaacgggggtgtccagtgggaaccagcattgtgcctactcctggcttggctggttgtgtacttgtgtattcttcggggtaccgaatccacgggaaaggttgtctatttcacagcttctctcccgtactgcgtgcttatcatttacctgattagggggctgaccttacacggtgcgacaaatggcctgatgtacatgtttacaccaaagatcgagcagctggctaatcccaaggcctggatcaacgccgccacacagatcttcttcagcctggggctgggcttcggatcccttatcgcatttgctagctataatgagccatccaataattgtcagaaacacgctattattgtatcactcatcaattctttcactagcattttcgcctcgatagtgactttctcgatctatgggttcaaagcaacatttaactacgagaactgcctgaagaaggtgagtctgctcctcactaatacctttgatctggaagacgggtttttgacggcctctaacctcgaacaggtgaaaggctacctggcttccgcttacccaagtaagtattctgagatgttccctcaaatcaagaactgttctctagagtctgagttggacactgccgttcaggggactggattggcatttatcgtatatacggaagctatcaagaatatggaggtgtcccaactgtggagtgtcctgtattttttcatgcttctgatgctcggaatcggttctatgctcggcaatactgccgcaattcttacacccctcactgacagtaaaataatctcaagtcacctgccgaaggaggccatctccgggcttgtctgccttgtgaactgcgccatcggtatggtgttcactatggaggccggaaactactggttcgacattttcaatgactatgctgcaacactctcgctgctgctgatagtgctcgttgaaaccatcgcggtctgctacgtttacggcctgaggcgattcgaatcagacttaaaggcaatgaccgggagggccgtgtcctggtactggaaggtcatgtgggcaggtgttagtcccctgctcattgtctctctgttcgtcttttatctttctgattatattctgacaggcactctgaagtaccaggcttgggatgccagccagggtcaactggtgaccaaagactaccccgcctatgccctggcagtaattggactacttgtcgcctcttcaacaatgtgtatccccttggctgccttgggcactttcgtccagagaagattgaaaaggggcgatgccgacccagtcgcttag

SEQ ID NO: 135593 - DNA, 1644 bp, synthetic construct
  misc_feature 1..1644: note = Description of Artificial Sequence: Synthetic coding sequence
  source 1..1644: mol_type = other DNA
atggagaaggcaaggcctctgtgggccaattcactgcaatttgtgtttgcttgtatctcttatgcagtcgggctcggaaacgtgtggcgttttccttatctgtgccaaatgtatggcggtggctcttttttggtgccttacattataatgctgatcgtggaaggtatgccactgctgtacctggaactcgctgtcgggcagagaatgaggcagggtagcatcggagcctggcgcactatctccccttatctgtctggcgtaggagtggcaagtgtggtcgtgagcttcttcctatctatgtactacaacgtgatcaatgcgtgggcattctggtatctcttccattctttccaagatccattgccctggtccgtgtgtccgctgaacggtaatcacactggctatgatgaagaatgtgagaaagcctccagcacccaatacttctggtaccggaagacactcaacatcagtccatctctccaggagaatggcggagtgcagtgggaacctgctctctgcctactgctggcctggctggtggtgtatttatgcatcctgcgcggcaccgaaagcaccgggaaggtggtgtattttaccgcatctttgccttactgtgtgttgatcatttaccttataagagggctcacactacatggtgcaaccaacgggctgatgtatatgtttactcccaagatcgaacaactggcgaaccctaaggcgtggatcaatgccgccactcagatcttcttttctctcggcctcgggtttggctcactgatcgcattcgcctcctacaacgaacctagcaacaattgtcaaaagcatgcgataatagttagcctgatcaacagcttcacctccatctttgcctcaattgtgacatttagcatctacggcttcaaggccacattcaattatgagaactgcctgaagaaggttagcctgctcctcactaatacctttgacctggaggacgggttcttgacggcctctaatctcgagcaggtcaagggatacctggcaagcgcataccctagcaagtattccgagatgtttcctcagattaagaattgctcactggagagcgagctggacactgcagtccagggcacggggctggcgttcatcgtttacacagaggcaattaagaacatggaggtcagccagctgtggtcagtcctgtatttctttatgctgctgatgctggggattgggagcatgttaggcaacaccgctgccatcctgactcccttaacagacagtaagataatttcttcccacctccctaaggaggctataagcggacttgtttgtctggtgaattgtgctattggtatggtctttaccatggaagccgggaattattggtttgatatcttcaacgattacgccgccaccctcagccttctgctgattgtcttagtcgagaccattgccgtgtgctatgtgtacgggctccggcgattcgaaagcgatttgaaggccatgacggggagagcggtaagctggtactggaaggtaatgtgggccggcgtcagccctctactcatagtaagcctattcgttttttacctgtcagattacattttaaccggaacacttaagtaccaggcatgggatgcatcccaggacgacaaattgtag

SEQ ID NO: 135594 - DNA, 1194 bp, synthetic construct
  misc_feature 1..1194: note = Description of Artificial Sequence: Synthetic coding sequence
  source 1..1194: mol_type = other DNA
atggcccacgctcccgagcctgacccagccgcatgcgacctgggagatgaaagaccaaaatgggataataaggcccagtaccttctgagttgtacagggtttgcggtcggccttggaaacatatggcgcttcccttacctttgccaaacatacggaggaggagctttcctgatcccctacgtaatcgctctggtttttgagggcatacccattttccacgtcgaactggccatcggacagaggctcagaaaggggtcggtgggcgtgtggactgcgatatcaccttatctttcgggcgtgggattgggatgcgtcacgctatcctttctgatttctttgtactacaacacaatcgtggcctgggtcctatggtacctgttgaattcttttcagcaccctctgccctggtcatcctgtcctccagatctcaacaggaccggtttcgtcgaagagtgtcagggatccagcgccgttagctacttttggtacaggcagaccttaaacattacagctgacatcaatgactctggttccatccagtggtggctgctaatatgccttgcagcttcctgggctgttgtttatatgtgcgtgattcggggaattgagacaaccggaaaggtgatttacttcaccgcattgtttccatatctggtgctgactatattcctgatccgagggcttacgctcccaggcgctacgaaaggtctgatatatctgttcaccccaaacaatccccgagtctggttagatgccgctacccagatctttttctccttatcgctggcctttggcgggcatatcgcttttgccagctataattcacccagaaacgattgccagaaagatgctgtcgtcatcgcactggtgaaccgtatgaccagtttgtatgctagtatcgcggtgttttcagttctcggcgcaagtgggcctggcctggcattcgttgtattcacggaaactgaccttcacatgccgggcgctcccgtgtgggccatgctgttcttcggtatgctcttcacgttggggctgagcactatgtttgggacggtcgaggctgtgatcacccccctcctggactctgggaactactggttagaaatctttgacaatttcgctgcttccccgaaccttttgatgctcgcattccttgaggtggttggggtcgtgtacgtatacggcatgaagcgttag

SEQ ID NO: 135595 - DNA, 1887 bp, synthetic construct
  misc_feature 1..1887: note = Description of Artificial Sequence: Synthetic coding sequence
  source 1..1887: mol_type = other DNA
atggcccatgcccctgagcctgaccccgcagcctgcgatttgggtgacgagcggcctaaatgggataataaggctcaatacctgctgtcttgcactggcttcgccgtagggttaggcaacatttggagattcccatatctgtgccaaacctacggcggcggcgcatttctgattccctacgtgatagcacttgtatttgaaggcatccctatatttcacgtcgagttggcaatcggccaaagattgcgaaaaggctccgtaggggtctggactgccatttccccctacctgtcaggcgtgggactcggctgtgtaactctctcgttccttataagcctgtactacaatacaatcgtcgcatgggtcctctggtacttgttaaactcttttcaacaccctttaccttggtcttcttgtcctcctgatctcaaccgcacgggctttgtggaagagtgccagggatctagtgcagtgtcatatttctggtataggcagaccctgaatattaccgcagatattaatgactcggggtccatccagtggtggttgctaatatgtctcgctgcatcatgggcagtggtgtacatgtgtgtgatccgaggtatagagacgactggaaaagtgatctactttacagccctgtttccttacctcgtcctcacgatctttttgattagaggtctgacactgcctggcgcaaccaagggcctcatatatcttttcactcccaatatgcacatacttcagaaccctcgggtctggctggacgctgccactcagatcttttttagcctgagcttagcttttgggggacacattgcttttgctagctataactcgcctaggaacgattgccaaaaggacgcggtggtcatcgccttggtgaacaggatgacatcattatatgccagcatcgccgtgttttctgtgctcgggttcaaagctactaacgattatgagcattgtcttgacagaaatatactgtccctgattaacgacttcgatttcccagagcagtccatctctagagatgactatcctgccgtattgatgcatttgaatgccacatggccgaagagggtggctcagttgcccctcaaggcatgcctgctcgaggattttctggataagagcgcgtcaggcccgggcttagccttcgtggtgttcaccgagacagatttgcacatgccaggggctcccgtttgggcaatgctgttcttcgggatgcttttcaccttgggcctctcaaccatgttcggcactgtggaagctgtgatcacaccccttctggacgtgggagtcctgccgcgctgggtgccaaaggaagcgctgacagggctggtgtgcttagtatgtttcctgtccgccacatgttttaccctgcaatctggtaattattggttggagatcttcgacaatttcgctgctagccctaacctgctgatgttagcatttctggaagtcgttggggttgtttacgtttatggcatgaagcgcttttgtgatgatatcgcgtggatgaccggtcggaggccatctccatactggcggctgacctggagggtggtaagtccgctccttttgacaatctttgtggcgtatataatacttctgttttggaaacccctgcgctacaaagcttggaatcccaagtacgagctcttcccaagtcgacaggagaaactgtacccaggttgggctcgcgccgcttgcgtcctgctttcactcctcccagtgctgtgggtgcctgttgcagccctcgcacaactgctaacaagaaggcgtcgcacctggcgagaccgggacgcacgtcccgatacagacatgaggcctgatacggacactcggcctgatacggacatgaggcccgataccgatatgaggtag

SEQ ID NO: 135596 - DNA, 1548 bp, synthetic construct
  misc_feature 1..1548: note = Description of Artificial Sequence: Synthetic coding sequence
  source 1..1548: mol_type = other DNA
atggaggccagggagcctggacggcctacccctacctaccacctggtccccaacacaagccagtcgcaggtggaagaggacgtgagctcacccccacagagatcgagtgagacaatgcagctgaaaaaagagatttccctgctgaatggggtgtctctggtcgtaggaaacatgatcgggtccgggattttcgtgtcgcctaagggcgtcctggttcacaccgcctcctacggaatgtctttgatcgtttgggcaatcggcggactgttctcagtggtcggtgctctttgctacgccgaacttggtaccaccatcactaagtcaggggcatcatacgcatatatactggaggcttttgggggctttattgctttcattaggctgtgggtttcactgctcgtagtcgaacccaccggacaggctataattgcaatcacctttgcaaattacattatccaacctagcttcccctcctgcgacccaccgtatctggcctgcagactacttgctgccgcctgcatttgtcttctcacctttgtgaattgtgcgtacgtgaaatggggcacccgggtccaagatacattcacgtacgccaaggtggtggctttaatcgccattatcgttatgggtctcgtgaagctgtgccaaggacatagtgagcacttccaggatgcgttcgaaggctcttcctgggacatgggcaacctcagcctggctctgtactccgcactgttcagttattcaggatgggacacactgaactttgtgaccgaggaaatcaaaaatcccgagaggaacttacccctggcaattggtataagcatgccaatcgtcactctgatttacattctaacaaatgttgcctactacactgtgctgaatattagtgacgtattaagttcagatgctgtggccgtgacgtttgccgatcagactttcgggatgtttagttggaccatcccgatagcggtcgccctgtcttgcttcggcgggctcaacgccagcatattcgcctcctccagattgttcttcgtcggcagtcgagaaggccacctgcccgatctactcagcatgattcatattgaacgtttcactcccatccctgctcttctgtttaactgcacaatggcactcatttacctgatcgttgaggacgtgtttcagctaatcaattacttttccttctcttattggttctttgtgggtctgagcgtggttggccagttgtacctgcgctggaaagaacccaagcgtcctagacctctcaagctctctgtcttctttcccatcgttttctgcatttgctcggtgtttctggttattgtccccctttttacggataccattaactccctaatcgggattgggatcgcacttagtggcgtccctttttattttatgggggtatacctcccagaatcacggcgcccgcttttcattaggaatgttctggccgccattactaggggcacccagcaattatgcttctgcgtattaaccgaactcgatgtagcagaagaaaagaaggacgagaggaaaactgactag

SEQ ID NO: 135597 - DNA, 1524 bp, synthetic construct
  misc_feature 1..1524: note = Description of Artificial Sequence: Synthetic coding sequence
  source 1..1524: mol_type = other DNA
atggctggcgcaggcccaaaacggcgggctctcgccgcccccgcggcggaagaaaaggaagaggctcgcgagaagatgctggctgcgaagtcagcggacgggtcagctccagcaggagagggtgagggcgtgactcttcagcggaacattactttattaaacggagtggcaatcattgtcggcaccatcatagggtctggtatcttcgtgactccaactggcgtcctcaaggaagcagggtcccctggtctcgctctggtagtttgggccgcttgtggggtgttctctatcgtcggcgcgctgtgctacgccgaactcgggacaaccatatccaagtccggcggggactacgcgtatatgttagaggtgtatggctctttacccgctttcctgaaactgtggatcgagctgctgatcatccggccctcctcccagtatattgttgcattagtattcgcaacatatctgttgaagcctctcttccccacatgtccagtacccgaggaggccgccaaacttgtggcttgcctttgcgtacttctgcttacggccgtgaattgctattccgtgaaggctgctacacgcgtccaggatgcctttgctgcggctaaactgctcgcccttgccttaatcattctgctcggatttgtgcagatagggaagggggacgtctctaacctcgatccaaacttcagtttcgaggggaccaaacttgatgtgggtaacatcgtgttggccctgtattcaggattgttcgcctatgggggatggaattatctcaatttcgtgacagaagaaatgatcaacccctatcggaatctaccactcgcgatcatcattagtcttcccatcgtcacacttgtgtatgtgctgactaacctggcctattttacaacgcttagcaccgaacagatgctgtcttccgaggcagtggctgtggattttggcaattatcacctgggcgtgatgagttggatcatcccagttttcgtcggactcagctgttttgggtccgtcaacggttctctgtttaccagttcaagattgttcttcgtgggaagcagagagggccacctacccagtatactctcaatgattcatccgcaattattgaccccagtaccaagtctggtgtttacgtgcgtgatgacattactttacgccttttccaaagatatctttagtgtgatcaactttttttctttctttaattggctttgcgttgcactggctatcatcggcatgatttggcttagacaccgaaagcctgagctggaaagacccataaaagttaatctggctctgcctgtgttctttattctcgcgtgcctcttcttgattgccgtttcattttggaaaacgcctgttgagtgtggaattggctttacaatcatcctcagcggactccccgtctacttcttcggtgtgtggtggaagaacaagccaaagtggttgttgcaaggtatcttttctactacagtcctgtgccaaaagctgatgcaggtcgtgccgcaagagacttag

SEQ ID NO: 135598 - DNA, 846 bp, synthetic construct
  misc_feature 1..846: note = Description of Artificial Sequence: Synthetic coding sequence
  source 1..846: mol_type = other DNA
atgtcccacggaacatactacgaatgcgagcctcgagggggtcaacagcctctcgaattcagtggcggacgcgcgggaccaggagaactgggcgatatgtgcgagcatgaggcttcaattgacctgagcgcttatattgaatcgggggaggagcagctgctatctgacctgttcgccgtgaaaccagcccctgaggcacggggcctcaagggaccgggcacacctgcctttccacactatcttcctccagacccacggcccttcgcctacccccctcatacttttggacctgacaggaaggccctggggcccgggatatactcaagccccggcagttacgacccccgggctgtcgcggtgaaagaggagcctaggggtcctgaaggcagtcgggctgcttcgcgtggatcatacaatccactccagtatcaagtcgcccactgcggccagaccgctatgcatctacctcctacactggccgcccctggacagccactcagagtcctcaaggcccctctggccacagcagctcccccatgcagcccattgctcaaggcacctagccccgccggaccactgcacaaagggaagaaagctgttaataaagatagtcttgagtaccgcctcaggcgagagaggaataatattgctgtgcggaagtctagagacaaggccaaaaggaggattctggaaacgcagcaaaaagttttagagtacatggccgagaacgaacggctgcgaagccgtgtagaacagttgacccaggaactggacactctgcgcaacctttttagacagatcccagaggccgccaacctgattaagggagtgggcggatgcagctag

SEQ ID NO: 135599 - DNA, 1608 bp, synthetic construct
  misc_feature 1..1608: note = Description of Artificial Sequence: Synthetic coding sequence
  source 1..1608: mol_type = other DNA
atggaggaaggtgcccggcatcgcaataacacagaaaagaaacaccccgggggcggcgagagcgatgcttctcccgaagccgggagcggaggcggcggtgttgctctgaagaaggaaatcggcctggtatcagcatgtggaatcatcgtggggaatattatcggaagtggaatctttgtgtcgcccaagggtgtgcttgaaaatgccggtagcgttggcctggctttgatcgtgtggatcgtgacaggctttatcacagtcgtgggagctttatgttacgccgagcttggagtcaccatccctaagtctggcggtgattacagctacgtgaaagacatttttggtggactcgccggatttctgcgactgtggattgccgtgcttgtgatttaccccacaaaccaggccgtcatcgctctgactttcagcaattatgtcctccagcctctcttccccacttgttttccaccagagtccgggctgcgcttgctagccgccatttgcctacttctcctgacatgggttaactgcagctctgtgcgctgggccacccgtgttcaggacattttcacagcagggaaactcctggccttggctctgataattataatgggcattgtccagatctgtaagggagagtacttttggctagagcctaagaatgctttcgaaaattttcaggaacccgacattgggctggtagcccttgcattcctgcagggcagttttgcctacgggggttggaacttcctgaactatgtgacagaggagctcgtggacccatataaaaacctgcctagagccatctttatctctatccctctggtcaccttcgtctacgtattcgccaacgtagcgtacgtgacagctatgtctccacaagaactgctggcaagcaatgccgtggcagtcaccttcggagaaaagctgttaggggtgatggcgtggatcatgccaatcagtgtggcactctccaccttcggcggtgtcaatggttctctgtttacctctagccggttgttcttcgcaggagcgcgcgagggtcatctaccaagtgtcctggcaatgattcacgtcaaacgctgtaccccaatccccgccctgctctttacctgcatctctactctgctgatgcttgtcacatctgacatgtatacattgatcaactatgttgggttcatcaactacctgttttatggagtgaccgtcgcgggtcagatagtgctgcgctggaaaaagccagatattcctcgacctataaagatcaatttgctgttcccaattatctacctgctgttctgggccttcttgttggtattttccctttggtccgaaccagttgtttgcggaattggcttggcaataatgttaaccggagtgccagtgtattttctgggcgtgtactggcagcacaaacccaaatgcttttccgatttcatcgagcttctgacactcgtgtctcagaaaatgtgtgtggttgtatatccggaggtggaacgggggtctggcactgaggaggccaatgaggatatggaagagcagcagcagcccatgtatcaacctaccccgaccaaagataaggacgtagctggccagccccagccatag

SEQ ID NO: 135600 - DNA, 633 bp, synthetic construct
  misc_feature 1..633: note = Description of Artificial Sequence: Synthetic coding sequence
  source 1..633: mol_type = other DNA
atggggatcgttcagatttgcaagggagagtacttctggcttgagccaaaaaacgcattcgaaaacttccaggaacctgacatcggccttgtggcgcttgcctttctacagggcagtttcgcatatggcggctggaattttctcaactatgtgacagaggagctggttgatccgtacaagaatctgcctagggctattttcatctctatccctctagtgacgtttgtttatgtcttcgctaacgtggcatacgtgaccgctatgtcaccccaggaactcctcgccagtaatgccgtcgccgtcaccttcggcgagaaacttttgggagtgatggcctggataatgccaatctccgtggcgctgagtacattcggaggggtgaatggttcgctccacctgctgagcgctgttctacgttggtcaccaagaggaccaccttctcaatgcgtggggcatgatccccgggaggctttgcatcccaacccatctcctgcccttcatatgcacctgcacccggccgacgccggccaccagcgccacgtccacacccaccagctttgtgggctgcatcagctccccctcctttgggggcacggatgttggacagattccccatcattggaagaagcatag

SEQ ID NO: 135601 - DNA, 693 bp, synthetic construct
  misc_feature 1..693: note = Description of Artificial Sequence: Synthetic coding sequence
  source 1..693: mol_type = other DNA
taatgtctccaggaacacagtcagccctcacagctcctgtgtacattgctgttatgttggtgcgtcctggggcgtgagcgccccttccgtaaggcccagtctacatcttcgcctctggagggagtccccaggtttttgaagcgcttgctcttgacttgggtcaattgcagttctgtccgctgggcaactcgcgtacaagacatcttcaccgccgggaagctcttagctttagcgctgatcattataatgggcatcgtacaaatctgcaagggcgagtatttctggttggagcccaagaatgcatttgagaatttccaggagccagatattggactggtggccttggcctttctgcaaggcagctttgcctacgggggctggaacttccttaactacgtcacggaggagttggtggatccatataagctgttttttgccggagctcgagaaggccacctgcccagcgtccttgctatgatccatgtcaagcgctgtacacccatccccgcacttctgtttacctgtatcagcaccctgctcatgctcgttacatctgatatgtatacattgataaactatgtcgggttcattaactaccttttttatggagttaccgttgctgggcagatagtcctgaggtggaaaaaaccagatatccccagacccatcaagccactgccctaccagggatag

SEQ ID NO: 135602 - DNA, 936 bp, synthetic construct
  misc_feature 1..936: note = Description of Artificial Sequence: Synthetic coding sequence
  source 1..936: mol_type = other DNA
atgggtcaactgtttcaatgcgcggtgggacatcctggttcacgtcatctccacagctgggaggccccagggttgggccctgattatcaccatggagattgcaccgatatgcagcggaatcttccccgcgctattttcatcagtatacccctcgtgacattcgtgtatgtgtttgcaaacgtggcctatgtgacagcaatgtcccctcaggagcttctggcctccaacgcagtggctgtgaccttcggagaaaagctactcggcgtaatggcctggattatgccgatttccgtggcattaagtacttttggcggggttaatggctctctgtttacttcaagcagacttttttttgccggggcacgggagggccacctgccgagcgtcctcgccatgatacatgttaaaaggtgcactcctattcccgcgctgctctttacatgtatctctacattgctgatgcttgtcaccagcgacatgtacactttaataaactacgtcgggtttataaactatctcttctatggtgtgaccgtagcaggccagattgttttacgctggaagaagcccgatatccccagaccaatcaagataaacctcctctttcccataatctacctgctcttctgggcctttctgctggtgttcagcttgtggagtgagccagttgtctgcggtatagggcttgccatcatgttgacgggtgtcccggtttatttcctgggggtgtattggcaacacaagccaaagtgcttttcagatttcatcgagctgctcacactggtctcgcagaaaatgtgtgtggtcgtgtatcctgaggtggaaagaggaagcgggacagaggaggctaacgaggatatggaagaacagcagcaacccatgtaccagccgacccctacaaaagacaaggacgtagcaggacagccccaaccctag

SEQ ID NO: 135603 - DNA, 999 bp, synthetic construct
  misc_feature 1..999: note = Description of Artificial Sequence: Synthetic coding sequence
  source 1..999: mol_type = other DNA
atgggcattgtgcagatatgtaagggcgaatacttttggttggagcccaagaacgcttttgagaactttcaggagccagacattggactggtcgctttagctttcctccagggcagtttcgcttacggggggtggaacttcctcaattacgtgaccgaggaactggtcgacccgtataagaaccttcccagagccatttttatttccattcctctggtcacttttgtgtacgtgttcgctaatgtggcttacgtgaccgcaatgtccccgcaagagctcctcgccagcaacgccgtcgcagttacctttggagagaagctgctaggagtaatggcctggatcatgcccatctcagtggctctgtctacttttggaggggtgaatggtagtctctttacgtcttcgcggctgttctttgcaggcgcccgggaagggcatctccccagtgtcttagccatgattcatgttaaacgctgtacccctatccctgcccttctgtttacctgcatcagcacccttctcatgttggtgacatcagacatgtatacactcataaactacgtgggcttcatcaactacctcttctatggcgttactgttgcaggccagatcgtattgcgctggaagaaacctgacataccaagacctatcaagataaatctgttgttcccaataatctacctgttgttttgggcctttttgcttgtgtttagcctgtggtcagagccagtagtgtgcggaattggcctggccatcatgctcaccggagtacccgtgtatttcctcggagtttactggcaacacaaacccaagtgcttcagtgacttcatagagctgttgactttagtgtcgcaaaaaatgtgtgtcgtcgtgtatccagaggtcgaacgcggttcaggaaccgaggaggctaacgaggacatggaagagcagcagcagcctatgtatcagccgacacctaccaaggacaaggacgtggctggacagccccagccgtag

SEQ ID NO: 135604 - DNA, 285 bp, synthetic construct
  misc_feature 1..285: note = Description of Artificial Sequence: Synthetic coding sequence
  source 1..285: mol_type = other DNA
atggaagagggagcgagacatagaaacaatactgagaaaaaacaccccggtgggggggaaagcgacgctagtcccgaggcaggctccgggggcggtggtgtggccctgaagaaagagatcggccttgtcagcgcctgcggcataattgtgggaaacattattgggtccggcatatttgtgtcaccaaagggcgtgttggagaacgccggctctgttgggctggctttgatcgtctggatcgtgacaggcttcatcacagtcgttggagccctctgctacgcatag

SEQ ID NO: 135605 - DNA, 237 bp, synthetic construct
  misc_feature 1..237: note = Description of Artificial Sequence: Synthetic coding sequence
  source 1..237: mol_type = other DNA
atggaggagggcgcacggcaccggaataataccgagaagaaacatcccggaggaggggaaagtgacgctagcccagaagcagggtcaggaggcggtggcgtcgccctaaagaaagaaataggcctggtgtcagcctgcggtatcattgtggggaatattatcgggtccggaatcttcgtcagccctaagggtgtccttgaaaacgctggatcggttgggctcgcactaattgtctag

SEQ ID NO: 135606 - DNA, 1293 bp, synthetic construct
  misc_feature 1..1293: note = Description of Artificial Sequence: Synthetic coding sequence
  source 1..1293: mol_type = other DNA
atgggtcagtatggccaggagcttagctggaagtgcctagtgaaagcagtttgtttgcaggagcattcacagccatctcagttgctgtgcactctgctgctctgttggtgcgtactgggaagagagaggccttttagaaaggcacaatctactagttcccctctggagggcgtgcctcgatttctaaaacgcctactcctgacatgggtcaattgttcatccgtgcgttgggcaaccagagttcaggatatctttactgcaggcaaactcttggcactcgccctgattatcattatgggcattgtgcagatctgcaaaggagagtacttctggctggaacccaaaaacgcctttgagaattttcaggaaccggatattggtctagtggcattggcgttcctccaggggtcctttgcttacggcggttggaactttctgaactatgtaacagaagaattagtggatccttataagaacctgccccgagctatcttcattagcatccccctcgtcactttcgtgtatgtgttcgccaacgtggcctatgtgaccgctatgtcaccacaggagcttctggcatcaaacgcagtggccgtgacttttggtgagaaactcctgggcgttatggcatggatcatgcccatcagcgtggctctttctacattcggaggcgttaacgggtccctatttaccagtagtcggctgttcttcgccggagcgcgcgagggccacctgccatcagtcttagccatgattcacgtgaaaaggtgcacccccatccctgccctgttgtttacatgcatttctacgctcctcatgctcgtgacaagcgatatgtacactctgatcaactatgtcggctttattaactacctattttatggtgtgacagtcgccggccagatcgtgctacggtggaagaagcccgacatacctaggccgatcaagatcaacctcttgttcccaatcatctacctcctattctgggcttttctattagtattctccctatggagcgagcctgtggtgtgcggcatcgggttggctattatgttgacgggtgtgccggtgtacttcttgggcgtttactggcagcacaaacccaaatgctttagcgatttcattgaactcctcactttggtcagccagaaaatgtgcgtagtggtttaccctgaagtagaacgcggaagcggcaccgaggaggctaacgaagacatggaagaacagcaacagccaatgtaccagcccactccaacaaaagacaaggacgttgccgggcagcctcagccatag

SEQ ID NO: 135607 - DNA, 1968 bp, synthetic construct
  misc_feature 1..1968: note = Description of Artificial Sequence: Synthetic coding sequence
  source 1..1968: mol_type = other DNA
atggtgctgtacactacccctttccctaatagctgcctgtctgcactgcactgtgtatcatgggccctgatcttcccgtgctattggttggttgataggctggcagcgtcctttattcccactacctacgaaaagcgacagcgggccgacgacccctgctgtttgcaattgctctgtactgccctgttcaccccaatctacctggccctgctagtcgcttcactgcctttcgccttcctcgggtttttgttttggagcccgctgcagtccgctaggcgcccatacatctatagtaggctcgaagataaaggcctggctgggggagctgctttattaagcgagtggaagggtacggggcctggcaagagtttttgcttcgcgacggcaaatgtgtgtctgcttccggactccctcgcccgggttaacaacctctttaatactcaggctagggccaaggaaattggccagcgcatccgtaacggtgccgctcgccctcaaataaagatctatatcgattctccaacaaatacgtccatcagcgctgcctcctttagctcattagtgtctccacaggggggcgatggtgtcgcacgcgccgtgcctggctctatcaaacggactgccagtgtagagtacaagggagatggaggacgacaccctggtgatgaggctgctaatggacccgcgtcaggagatcctgtagactccagctcccccgaggatgcctgtatcgttaggatcggaggcgaggagggcggcagaccacctgaggcagacgacccagtccccggcgggcaggcacgcaatggagctggtggtgggccccgcgggcaaacacccaaccataatcagcaggacggcgacagtggaagtcttggatcaccctcggcttctagggaaagcctagtcaaggggcgggcagggccggacacatcagcaagcggcgaacctggagctaacagtaaactcctgtataaagcaagcgtcgtaaagaaggcagcggcacggcggaggcgccaccccgacgaggcattcgaccatgaggtgtccgcatttttcccagcaaacctggactttctgtgtttgcaagaggtgttcgacaagagggccgccacaaagctgaaggaacagctgcacggctattttgagtatatcctctatgatgttggagtatacggctgtcagggatgttgttcctttaaatgtcttaattccggcctcttatttgcctcaagatatccgatcatggatgtcgcataccattgctatccgaataagtgcaacgatgacgcattggcctctaagggcgctctgttcctcaaagtccaggtgggatcaacccctcaggatcagcgcatcgtagggtacatcgcgtgcacacatctccacgctcctcaggaggactctgcaattcgatgtggacagctcgatttgttgcaggattggctggccgacttcaggaaaagcacttcgtcttcaagtgctgccaatcctgaggagctggtagcatttgacgtggtgtgcggcgactttaactttgataactgtagtagcgatgacaaattggagcaacagcacagcctgttcactcactacagagatccctgccgattgggtccaggagaagaaaaaccctgggctatcggcaccctcttagatactaatggtctgtacgacgaggatgtctgcacccccgataacctgcagaaggtgctagagtcagaggaaggcaggagggaatacctcgcattccccacctccaaatcatctggccaaaaaggtaggaaagagcttctcaagggaaacggcagacggatcgattatatgcttcatgccgaagaaggactctgcccggattggaaggccgaggtggaagagttctctttcatcacacagttgtccggcctcaccgatcacttacctgttgcaatgcgcctcatggtctcttccggagaagaggaggcctag

SEQ ID NO: 135608 - DNA, 690 bp, synthetic construct
  misc_feature 1..690: note = Description of Artificial Sequence: Synthetic coding sequence
  source 1..690: mol_type = other DNA
atggaagctagggagcctggccgccctactcctacctatcacttggttcctaatacatctcaatcacaggtcgaggaggacgtgagctcaccaccacagcgctcatcagaaaccatgcagttaaaaaaagagatcagccttcttaacggcgtgtctctggtcgtgggcaacatgatagggagcggcatattcgttagccccaaaggagtgctggtgcacacggcttcatatgggatgtccttaatagtctgggccattgggggcctgttttcagtggttggggccctttgctatgcagagttgggcactaccattacaaaaagtggggcttcatacgcatatattctggaagccttcgggggattcatcgctttcatcaggctgtgggtatccctgttagtcgtggagccaacaggacaggccataatcgccatcacattcgcaaactatataatccaaccctcgttcccatcttgtgatcccccatacctggcttgtcgccttctggctgctgcctgcatctgcttactgaccttcgtgaactgtgcttacgtgaagtggggaaccagggtgcaggatacgttcacctatgccaaggttgtcgccctgatcgccataatcgtgatggggctagtgaaactgtgccaggagatctgcccctggcctctcggatttctttgccagttatag

SEQ ID NO: 135609 - DNA, 1536 bp, synthetic construct
  misc_feature 1..1536: note = Description of Artificial Sequence: Synthetic coding sequence
  source 1..1536: mol_type = other DNA
atggtggactccaccgagtatgaggtggctagtcaaccggaagttgaaacgtctcccctgggcgacggggcgtccccaggtcccgagcaagtgaaactcaaaaaggaaatcagcctgctgaacggtgtctgtctaatagtcggcaacatgatcggctcggggatatttgtgagccccaaaggcgtgctgatctactcggcctcattcggcctctccctggttatttgggcggttggagggttattctcagtgttcggagcgctctgctatgccgaattgggcacaaccattaagaagagtggcgcatcctatgcctatatactagaagcctttgggggattcctggcgttcatcaggctctggacctcgctgttgattatcgagccaacaagccaggcgatcattgcaataactttcgccaattatatggtccagccgcttttcccctcatgcttcgctccctacgccgcttcacgattgctagccgccgcgtgcatctgtctgctcacattcatcaattgcgcgtacgtcaagtggggtactcttgtgcaggatattttcacgtacgcaaaggttcttgccttgatcgcggtcatagtcgctggcattgtacgtctgggccagggggcttccacccacttcgaaaactccttcgagggatcttcattcgctgtcggcgatatcgcccttgccctttactctgccctattctcctactccggatgggacactctgaactacgtaaccgaggagataaagaaccccgagagaaatctccctctttccatcggcatttccatgccgatcgtaactataatctatatacttacgaatgtcgcttactacaccgtgctggacatgagggatattcttgccagtgacgccgtcgccgtgaccttcgctgaccagatattcggcatttttaattggatcattcctctgagtgtcgcgctcagttgctttggggggctgaacgcctccatagtggctgcttctcggttgttttttgtagggagtcgagaaggccacctaccagatgctatttgtatgatccatgtggagaggttcacccctgtgccttccctgctgttcaacggtattatggcactcatctacttgtgcgtcgaggacatttttcagctgattaattattactctttcagttactggttctttgttgggctgagtattgtgggccaactatacctccgctggaaagagcctgacagaccacgtcctctaaagctgagcgtgtttttccccatcgtgttctgtctgtgtacgatttttctcgtcgctgtgcccctgtattctgatacgatcaatagcctgatcggcatcgctatcgccctgtcaggtctgccattttatttcttaatcattcgggtccctgagcataaaagacctctttatcttagacgtatagtggggagcgctacacggtacctccaggtgctgtgcatgtctgtggcagccgagatggatcttgaggacggcggggagatgcccaaacaacgcgatccgaagtccaattag

SEQ ID NO: 135610 - DNA, 1536 bp, synthetic construct
  misc_feature 1..1536: note = Description of Artificial Sequence: Synthetic coding sequence
  source 1..1536: mol_type = other DNA
atggtcgattccaccgaatatgaggtagccagtcagcccgaagttgagacatcccctctgggggatggagcaagccctggccccgagcaggtgaagctcaagaaggagatttcccttctcaacggagtttgtctcatcgtgggtaacatgattggctcaggcatattcgtctccccaaagggtgtactgatctatagcgcttccttcggcctgtcattggtcatctgggccgttggcggcctgtttagcgtgtttggagccctgtgttacgcagagttgggcacaacaatcaagaagagcggcgccagttatgcctacatcctggaagcctttggaggattcctcgcttttatcaggttatggacaagcctcctaattatcgagcccacctcacaggccattatcgccattacctttgctaactacatggttcagcctctgttcccatcttgcttcgcaccgtacgcagctagccgcttgctggctgcggcttgcatctgcctccttaccttcattaactgcgcctatgttaaatggggtaccctcgtccaggacattttcacctatgcgaaagtgttggccctaatcgcagtcattgtggcgggtatcgtacgccttgggcaaggggcttcgacacacttcgagaactcctttgagggcagctctttcgccgtaggcgatatcgccttagccctttatagcgctctttttagttacagcggctgggacaccctaaactacgttacggaagagatcaagaatcccgaaaggaacctgcctttatcaatcggtatttcgatgccaatcgtgaccatcatctatattttaacaaatgtggcttattataccgtcctggatatgagagatatcctggctagtgacgcagtcgctgtgacttttgctgaccagatatttgggatttttaactggataatcccgctgtcagtggccctgagctgctttggaggactcaacgccagcatagtggcagccagccggctgttttttgtgggttcaagagaagggcatcttccagatgctatttgtatgatccacgtcgagcggttcacgcccgtgcctagtctgctctttaatggcattatggccctgatctacctgtgcgtggaggacatcttccagttgatcaattattacagttttagttactggttttttgttgggttgtccattgttggacaactatatcttagatggaaggagcccgatagaccgagacccctcaaactgtccgtcttctttcccatcgtattctgcctgtgcaccatcttcctggtcgcggtgcccctgtactccgacacaataaactcccttataggaatagcgattgctttgtcgggactgccgttctattttctgataatccgggtgcccgaacataagaggcctttatatctccgccggatcgttggcagcgccacgcggtaccttcaggtcctctgtatgtccgttgccgccgagatggacctggaggatgggggagagatgcctaagcaaagggatcctaagtcaaattag

SEQ ID NO: 135611 - DNA, 1536 bp, synthetic construct
  misc_feature 1..1536: note = Description of Artificial Sequence: Synthetic coding sequence
  source 1..1536: mol_type = other DNA
atggtagactccacagagtatgaggtggcctcccagccggaggtcgagacatcacctctgggggacggcgcaagcccaggcccagagcaggtgaaattgaaaaaagaaattagccttctgaatggagtgtgcctgatcgtgggcaacatgatcggctctggcatcttcgtatccccaaagggcgtgctcatttatagcgcttccttcgggctgagtctggtgatctgggctgttggaggactgttctcagtgtttggcgctctgtgctacgccgagctcgggactacaatcaagaaaagtggcgccagctacgcctacattctggaggccttcggcggatttctcgcttttatcagactgtggacctccctccttatcatcgagcctacctcacaggcaatcattgcaataacgttcgccaattacatggttcagccactgttcccctcttgttttgctccttacgccgccagccgactcctcgcagcagcctgcatttgcctgttaacgttcatcaattgtgcatacgtgaaatggggcaccctcgttcaggatatctttacttacgctaaagtgctagcgctaatcgcagtcatcgttgcgggcatcgtgaggctgggacaaggcgcctccacccactttgagaacagctttgaaggatcttctttcgcagtcggggacatagcactggccttatactccgccctattcagctattccgggtgggataccctaaactacgtcaccgaggaaattaaaaaccccgagcggaatctgccattgagcataggaataagcatgcccatcgtgacaattatctacatccttaccaacgtggcgtactacactgtgttggatatgagagacatcctggcctcagacgctgtggccgtgacctttgcagaccaaatattcggaattttcaactggattattccattgagtgtggctctgagctgctttgggggcctgaatgcctccatagtggcggcttcacggctgttctttgtcgggtcaagggaaggccacctccctgacgccatttgcatgattcacgtcgaaagattcacccctgttccatcattactcttcaacgggatcatggccctgatttacctgtgtgtcgaggacatctttcagctgatcaattactatagcttctcctattggttcttcgtgggactgtccatcgtgggtcagttgtacctgaggtggaaagaaccagatagacccaggcctttgaagctatccgtgttttttccaatcgtcttttgcctgtgcacaatcttcctcgtggcggttcctctttactccgatactatcaatagcctgataggcattgctatagccctttcaggcctgcctttctacttcctcattatccgggttcctgagcacaagagacccctttacctgaggcggattgttggatcagccacaagatatcttcaggtcttatgtatgtcagtcgcagctgaaatggacctggaggatggaggggaaatgcctaaacagcgcgatcccaaatccaactag

SEQ ID NO: 135612 - DNA, 1536 bp, synthetic construct
  misc_feature 1..1536: note = Description of Artificial Sequence: Synthetic coding sequence
  source 1..1536: mol_type = other DNA
atggttgacagtactgaatacgaggttgcttcgcagcctgaggtggagacctctccccttggggacggggccagcccagggcctgagcaggtgaagctcaagaaagagatcagcttgctcaatggagtttgtttaatcgttggcaatatgatcggcagtggcatctttgtgagtcccaaaggagttctgatttactctgccagcttcggactgagcctagtcatttgggctgtcggcggccttttttccgtgttcggtgctctctgctacgctgaattaggcaccacaatcaagaagtctggcgctagctatgcttatatattagaagcctttggtggcttcctcgcttttatccggctttggaccagcttgctaatcatagagcccacctcgcaggccattatcgctatcacctttgccaattatatggtgcagcccctgttccccagctgcttcgctccctatgccgcttcccggcttctcgctgctgcttgtatttgtctgctaaccttcattaactgtgcatatgttaagtggggcaccttggtgcaggacatattcacctatgctaaagttctcgctctgattgcagtgattgtcgctggaattgtccggctgggtcaaggtgcatctactcacttcgagaactcattcgaagggtcatcctttgccgttggtgacatcgccctcgccctgtattccgcgctctttagttatagtggatgggatacactcaattacgttacagaggaaatcaaaaatccagaaagaaacctccccctgtccatcgggatatctatgccaatcgtcacgattatttacatactaaccaacgtagcctactacaccgtgctggatatgcgtgatatcctcgctagtgacgcggtcgccgttactttcgcagaccagattttcggaatctttaactggattatcccactgagcgttgcactctcctgtttcgggggacttaatgcctccattgtggctgcctcaaggctcttctttgtggggtccagagagggacatttgcccgacgcgatttgcatgattcacgtggagcgttttacaccagttccaagcctgctgttcaacgggataatggcgctcatctatctgtgtgtggaggacatttttcagcttattaattactattcattctcatactggttcttcgtggggctgtctatcgtgggtcagctgtacttaagatggaaagagcctgaccgaccacgccctctgaagttgtccgtgttctttccaatcgtgttctgtttgtgcacaattttcttggtggccgtgcctttatatagcgatacaattaactctctcatcggtatcgccatcgccttgtccgggctacctttctactttctgattatcagggttcccgagcataaacgcccactctatttgcgtcggattgtgggaagcgccacgcggtatcttcaggtgctttgtatgagtgtggccgctgaaatggatctggaagacggaggcgagatgcccaagcaaagggacccaaagagcaattag

SEQ ID NO: 135613 - DNA, 1455 bp, synthetic construct
  misc_feature 1..1455: note = Description of Artificial Sequence: Synthetic coding sequence
  source 1..1455: mol_type = other DNA
atggtagactccactgagtacgaggtagcgagtcagccagaagtggaaaccagccctctgggcgatggggcatcgcccggccccgaacaggtgaagctgaaaaaggagatctatagtgcctcttttggcctgtccctcgtcatttgggccgtgggcgggctctttagcgtcttcggggcgctctgctatgctgaattggggactactatcaagaagtccggtgcgagctacgcttatatcttggaggcatttggcgggttcctggccttcattcgtctttggacttcgctgctcattattgaacctacatctcaggccatcattgcaattacctttgccaattacatggtgcagcccctcttccctagctgctttgccccatatgccgcttctaggctgctagctgccgcctgcatctgcctgctaaccttcatcaactgcgcctacgtgaaatggggaacgcttgttcaggatatttttacgtacgccaaggtacttgcgcttattgccgtaattgtcgccggcattgttagactaggacagggagcctcaacacatttcgagaacagtttcgaaggcagcagcttcgccgtgggagacatcgccctagcactgtactccgccctttttagttattcaggctgggatactcttaattatgtcactgaagaaatcaagaacccagagcgaaacctgcccttgagcatcggcatctccatgcctatcgtgaccatcatctatattctgactaacgtggcctattatacggtgttagacatgagggatattctggcctccgacgcggtggccgtgacgttcgccgaccagatattcgggatctttaattggattatccccctgagcgtcgccttatcttgtttcggaggcctcaacgcttctatcgtcgccgcatctcggctgttctttgtaggtagtagagaagggcatctgccagacgccatctgtatgattcacgtggagcgcttcactccggtaccctccctgttatttaatggtattatggcccttatttacctgtgcgttgaggacatctttcagcttatcaactactattctttttcatactggttttttgtgggactgtctatagtcggtcaactctacctccggtggaaggagccagaccgaccccgaccgctgaaactctcggtattcttccctatcgtcttctgtctctgtaccatattcttagttgctgtgccactgtactcagatacaattaacagtctcatcgggatcgcgatcgcgctctccggacttccattctacttcctcatcatcagagtccccgaacacaaaagacctctgtatttacggcggatcgtgggtagcgccaccaggtacctgcaggtcctctgcatgagtgttgcggccgagatggacctggaggatggtggtgagatgcctaaacaacgcgaccccaagagcaactag

SEQ ID NO: 135614 - DNA, 426 bp, synthetic construct
  misc_feature 1..426: note = Description of Artificial Sequence: Synthetic coding sequence
  source 1..426: mol_type = other DNA
atggtggatagtacagagtacgaagtggcctcccagccagaagttgagacatctcctcttggtgacggcgcaagcccaggcccagaacaggttaaattgaagaaggagatttctctattgaacggcgtctgcttaatcgtcgggaacatgattggaagcggaattttcgtctccccgaaaggggtcctgatatacagcgccagcttcgggttgtcactcgtgatctgggccgtgggagggctattcagcgtcttcggtgccctctgttatgccgaattgggaaccacgatcaagaagagcggtgcctcctacgcttatattctagaggccttcggaggattcctggcttttattcgcctgtggacctctctgttgattatcgaaccgacttctcaggcgattattgctattacatttgcaaactag

SEQ ID NO: 135615 - DNA, 135 bp, synthetic construct
  misc_feature 1..135: note = Description of Artificial Sequence: Synthetic coding sequence
  source 1..135: mol_type = other DNA
atggttgattccactgagtacgaggtagccagccagccggaagtggagacctctcctctcggtgacggagcctcacctggtcctgagcaggtcaagctaaagaaggagatctccctgttgaacggtgtctgttag

SEQ ID NO: 135616 - DNA, 495 bp, synthetic construct
  misc_feature 1..495: note = Description of Artificial Sequence: Synthetic coding sequence
  source 1..495: mol_type = other DNA
atggttgacagcaccgaatacgaggtggcctctcaacccgaggtggagactagcccactgggagacggagcttctcccggcccagaacaagtcaagctgaagaaggaaattagtctcctgaatggcgtgtgtctcatagttggtaacatgataggatcggggatctttgtgtcgccgaagggcgtgctgatttattccgcctcctttggtttatctctggtgatttgggccgtgggaggcctctttagcgtgttcggtgcactgtgttacgccgaactggggactactattaaaaagtcgggggcatcctatgcgtatattctggaggcttttggcggttttctggccttcattaggctgtggacgtccctcttaatcatcgagcctacctctcaggctatcatcgctatcactttcgctaattatatggtgcagcccctcttcccctcatgtttcgctccctatgcagcttcaagactgctggccgcagcctag

SEQ ID NO: 135617 - DNA, 369 bp, synthetic construct
  misc_feature 1..369: note = Description of Artificial Sequence: Synthetic coding sequence
  source 1..369: mol_type = other DNA
atggtggacagcaccgagtacgaagtggccagtcagcctgaagtggaaactagccctctcggtgatggtgccagccccggccccgagcaggtgaaactgaaaaaggagataagccttctgaacggtgtgtgcttaattgtggggaacatgattggttccggcatcttcgtcagcccgaagggcgtgctgatttactccgcttcttttggtctgagcttagtaatttgggctgttggcggactgttcagcgtctttggggctctctgctatgcggaactggggaccacaatcaaaaagagtggggcctcttatgcctatatcctcgaggcctttggtgggtttctcgctttcatccggttgtggacttag

SEQ ID NO: 135618 - DNA, 1536 bp, synthetic construct
  misc_feature 1..1536: note = Description of Artificial Sequence: Synthetic coding sequence
  source 1..1536: mol_type = other DNA
atggtcgactccaccgagtacgaggtggcatcacagcctgaagtcgaaacaagtcctctgggggatggtgcctcccccggcccagaacaggtgaaactcaaaaaggaaatttccttgctcaacggcgtatgcctcatcgtcggtaatatgatcggcagcggcatattcgtgtccccaaaaggtgtactcatttattcggcctcctttggactctcattggttatttgggctgtgggtggcctattttccgtcttcggcgctctttgctatgcagagctggggactacaatcaaaaagagcggtgcgagctatgcttacatcctggaggcattcggaggatttcttgcctttatcaggctgtggacttccctgcttataatcgagccgacaagtcaggccataatcgcaatcacatttgctaattatatggtgcagcccctctttccatcctgctttgccccctatgctgccagccggttactggcagctgcgtgtatttgcctgctgacatttatcaattgtgcttacgttaagtggggcaccctcgtgcaggatatatttacctacgcgaaggtcctcgcacttatcgccgttatcgttgcaggtatagtgcgcctgggccaaggagcctctactcatttcgagaattcattcgaagggtcctccttcgcagtcggagatatcgccctggccctctactcagctttattttcatattcagggtgggacaccctaaactacgtaacagaagagatcaagaatcctgagagaaatctcccgctttccattggtatatccatgccgatcgtgacaatcatttacatcttgacaaacgtagcttactacacggtcttagatatgagggacattctcgcatctgacgcggtcgccgtgaccttcgctgaccagatctttggaattttcaattggattattccactgagtgtcgcattgtcctgctttggcgggcttaacgcttcgattgtggctgcatctcgactattttttgtgggctcacgagagggccatctgcctgacgcgatctgcatgattcacgtcgaaaggtttacacctgtcccttctctgctgttcaacggaattatggccctgatctacctctgtgtcgaggacatattccaactgattaattattactccttctcctattggttttttgtcgggctgtctatagtcggccagctgtatctccgctggaaagaaccagatcgtcctaggcccctcaaactttcagtcttttttcccattgtgttttgcctatgcaccattttcttggtcgccgttcctctgtattcagacacaatcaatagcctgatcgggattgccatagccctctcagggttgccgttttacttcctgataatccgtgtccccgagcacaagcgaccactgtatttgcggaggattgtaggcagtgctacacgttacctccaggtcctctgcatgtccgtggctgccgagatggatttagaggatggcggcgagatgcctaaacagagagatcccaaatctaattag

SEQ ID NO: 135619 - DNA, 348 bp, synthetic construct
  misc_feature 1..348: note = Description of Artificial Sequence: Synthetic coding sequence
  source 1..348: mol_type = other DNA
atggtggactctaccgaatacgaggtggcaagccagcccgaagtagaaacgagcccattgggagacggtgcctctcctggccccgagcaggtcaagcttaaaaaagaaatttccctgctgaatggcgtgtgcctgatcgtaggcaatatgattggttccggaatttttgtttcccccaagggagttctgatctatagcgcaagcttcggactgtctctcgttatttgggccgtcggggggttgttttcagtgtttggagccttatgttacgccgagctggggaccacaattaagaagtccggggcctcctatgcctacattctggaagcattcgggggatttctctag

SEQ ID NO: 135620 - DNA, 93 bp, synthetic construct
  misc_feature 1..93: note = Description of Artificial Sequence: Synthetic coding sequence
  source 1..93: mol_type = other DNA
atggttgacagtacagaatacgaagtcgcgtcccagcccgaagtggagacctcccccttaggcgatggcgcaagcccgggcccggaacagtag

SEQ ID NO: 135621 - DNA, 933 bp, synthetic construct
  misc_feature 1..933: note = Description of Artificial Sequence: Synthetic coding sequence
  source 1..933: mol_type = other DNA
atggtggatagtacagagtatgaggtggcctctcagccagaagttgagacaagcccattgggcgacggagcatccccggggccagaacaagttaaattaaagaaggagatctccctattaaacggagtgtgtcttatcgtcggcaatatgattggtagcggtatattcgtgagcccaaagggcgtgctcatttatagcgcctcttttgggctgagccttgtgatctgggcggtggggggactgttttccgtattcggtgccctctgctacgccgagttaggcaccactatcaagaagagtggggcatcttacgcctacattttagaggcatttgggggatttcttgcgtttattaggctttggacgagcctgctgatcatcgaaccaacgtcgcaggccatcattgccatcacttttgcaaactatatggttcaacctctcttcccctcttgttttgccccatacgctgccagccgtttgctggcggcggcctgcatctgcctcttaacatttattaattgcgcttacgtgaaatggggaacactggtgcaggatatcttcacgtacgccaaagtgctagccctcatcgcagttattgttgcgggaatcgtgcgactcggccagggggccagtacacattttgagaatagtttcgagggctcgtcctttgccgtcggcgacattgccctcgctctctactccgccctgtttagttactcaggctgggatacattgaactacgtgacggaagagattaagaaccccgaacgtaacctgcctctgtctattggcattagtatgcccatcgtgactatcatttacatattaacaaatgtcgcctactatactgtgttagacatgcgtgacatcctcgcgtctgatgccgtagcagtagccttcctttgcggacttaaacgtcgaccgtctccctag

SEQ ID NO: 135622 - DNA, 321 bp, synthetic construct
  misc_feature 1..321: note = Description of Artificial Sequence: Synthetic coding sequence
  source 1..321: mol_type = other DNA
atggtggatagcacagaatacgaggtcgcctcacagcccgaggtggaaacatctcctctcggggatggcgccagcccgggccctgagcaggttaagctcaaaaaagagattagtctcctgaatggcgtgtgtctcattgttggtaacatgattggatccgggattttcgtgagccctaagggagtcctgatatacagcgcgtcatttggacttagtctcgttatttgggccgtgggcggcttattctcagtctttggagccctatgctacgctgaactcggcaccaccatcaaaaagagcggcgcttcttatgcatactag

SEQ ID NO: 135623 - DNA, 351 bp, synthetic construct
  misc_feature 1..351: note = Description of Artificial Sequence: Synthetic coding sequence
  source 1..351: mol_type = other DNA
atggtagactcaacggagtatgaggtggcttcacaacctgaagtcgagacttccccccttggcgatggcgcgtccccgggcccagagcaggtgaaattgaagaaagaaatctctctactgaacggcgtttgcttaatcgttggtaacatgattgggtctgggatctttgttagccccaaaggcgtactgatttactccgcgtcttttggtttaagtcttgtcatctgggctgttggggggcttttctctgtattcggcgcactgtgttacgctgagttaggcaccaccattaagaagagcggggcatcgtacgcttatatcctggaggcttttgggggctttctagcatag

SEQ ID NO: 135624 - DNA, 1890 bp, synthetic construct
  misc_feature 1..1890: note = Description of Artificial Sequence: Synthetic coding sequence
  source 1..1890: mol_type = other DNA
atggggtgtaaggtcctgctcaatattggccaacagatgcttaggcgcaaggtggttgattgttctcgggaggagactcggctttctcggtgtctaaacacttttgatctcgtggccctcggggtcggatcgacgctgggagctggagtgtacgtattggccggggccgtcgcccgcgaaaacgccggtcccgctatcgtgatctcttttctgatcgctgcacttgcctccgtgctggccggactctgttatggcgaatttggggcccgagtgcccaagacagggtcagcatacctgtactcttacgtgaccgtgggagagctgtgggcattcattaccggttggaatctcatcctctcttatataatcgggacgtcatccgtggcgagagcctggtcagccaccttcgacgaactgatcggccgtcccatcggagagttcagccggacacacatgactctgaatgctcctggcgtgctggccgagaacccggacatttttgctgttatcataattctaattctcacgggcctactgacactcggcgtgaaggagagcgccatggtgaacaaaatctttacctgtataaatgtgctcgtactgggtttcatcatggttagcggcttcgttaagggcagtgtgaagaattggcagctgactgaggaggactttgggaacacatcaggccgcttgtgcctcaacaacgacacgaaggagggaaagccgggcgtaggcggcttcatgccattcggcttctccggcgttctgtcaggcgccgccacgtgcttctacgccttcgtgggctttgattgcatcgcgacaactggggaggaagtgaaaaacccccagaaagccattccagtcggtattgtggcctcactgttaatctgctttattgcttatttcggcgtgagcgccgcacttactcttatgatgccatacttttgccttgataacaactcgcccctacccgacgccttcaaacacgtagggtgggagggcgccaaatacgcagtcgcagttggatccctgtgtgcgctctctgcttccctgctgggctctatgtttcccatgcctagagttatttacgccatggccgaagatggactgctatttaaatttttggcgaatgtaaacgatcgaaccaagacaccaatcatagcgaccctggctagcggcgccgttgcagctgtaatggcatttctctttgatctcaaagacttggtggacctgatgagtatagggaccctgctggcttacagcttagtggctgcctgcgttctcgtgctgcgatatcagcctgaacaacctaacttagtctaccagatggcttcaacctccgacgagctcgaccccgcggatcagaatgaactggctagcactaatgatagccagctggggtttctgcctgaagctgaaatgttcagcctcaagaccatcttatcgcctaagaacatggagcctagcaagatttccgggctgattgtgaacattagtaccagcctgattgcagtgttgatcatcactttttgtatcgtgaccgtccttggacgggaagccttgacaaaaggcgccctgtgggctgtgtttctgctggccggcagtgccctgctctgtgctgtggtgacgggagtcatatggcgacagcctgagagcaagactaagctctcattcaaggtaccctttctgccagtgctgcctatcctcagcatctttgttaacgtgtatcttatgatgcaacttgaccaaggaacttgggtccgcttcgcagtttggatgttaattggattcatcatctacttcgggtatgggctatggcacagcgaggaggccagcctggacgctgaccaagctagaaccccagatgggaatctggaccagtgtaagtag

SEQ ID NO: 135625 - DNA, 366 bp, synthetic construct
  misc_feature 1..366: note = Description of Artificial Sequence: Synthetic coding sequence
  source 1..366: mol_type = other DNA
atgggctgcaaggtattactcaatatcggtcagcaaatgttgcggagaaaagtggtggattgcagcagggaagagacccgattatctaggtgtctgaatactttcgatctcgtggccctgggcgtggggagcactctgggcgccggtgtttacgtgctcgccggcgccgtggcaagagaaaatgctggaccagcaatcgtgatcagctttctgatcgctgctctggcttctgtgctggccggactttgttacggggaatttggtgcgagggtgccaaagaccgggagtgcctacttgtatagttacgtgacagtcggagagctatgggctttcattaccggttggaacctgatactctcctactag

SEQ ID NO: 135626 - DNA, 2097 bp, synthetic construct
  misc_feature 1..2097: note = Description of Artificial Sequence: Synthetic coding sequence
  source 1..2097: mol_type = other DNA
atgaagatagagacctcgggctataattctgacaagctgatttgccgaggctttattggtacacccgccccacccgtgtgtgattccaagttcctgctgtctccctctagtgatgttcgtatgatcccgtgcagagccgcactgaccttcgcccgatgtctgatcagacgcaagatagttacacttgatagcctcgaagataccaaattgtgtcgctgcctgtccaccatggacctgatcgccctcggagttggaagcaccctgggcgccggcgtgtacgtgcttgcaggggaagttgccaaagccgactctggcccctcaatcgtggtttcgtttctcattgctgcacttgcaagcgtgatggccggactatgctatgctgagtttggggcgcgcgtgcctaagacaggcagcgcatacctgtatacttacgtcacggttggcgaactgtgggcttttattacggggtggaacctgatccttagctacgttataggcacaagtagtgtggccagggcttggtccgggactttcgacgagctcctttccaagcaaataggtcagtttcttaggacctatttcagaatgaactatacaggtttggcagaatacccagattttttcgctgtgtgtttaattcttctgttggcaggacttcttagctttggtgtgaaggaaagtgcctgggtcaataaagtgtttaccgccgttaacatcctagtgctgctattcgtgatggtggccgggttcgtgaagggtaatgtcgctaattggaaaatctcagaggaatttttgaaaaatatcagtgcctcagccagagagccgccatctgagaatggaactagcatttatggcgcggggggtttcatgccgtatggctttactggaacactggctggagccgccacctgtttttacgctttcgtgggatttgattgcatcgctaccacaggcgaggaagttcggaacccccagaaggccatccctattgggatcgtgacatctctgctcgtgtgcttcatggcctactttggtgtgtctgccgccttgactcttatgatgccatactaccttctggacgagaaatctccgttgcccgtggcgttcgaatacgttgggtggggacccgcgaagtacgtggtcgctgccggctctctctgtgcgctgtccacatctctgctgggaagcatatttcccatgccccgcgtgatctatgctatggcagaagatggcctgctctttaaatgcctggcacagataaacagcaagacaaaaactccgatcatcgctaccttatcctccggcgccgtggcagcgcttatggccttcctgttcgacttgaaggccctggttgacatgatgtcaataggtactctaatggcatactccttggtagccgcctgcgttctcatactgaggtatcagcccggcttgtcctacgaccaaccaaagtgttctccagaaaaagacggcctaggctcctcgccacgcgtaacctccaagagcgagtctcaggtgacaatgctacagagacaaggattcagcatgcgaacactgttctgtcctagtctcttgcccacccaacagtcggcttccctggtgtcttttcttgttggcttcctggccttcctcgtcttaggcctgagtgtcctgaccacatacggcgtccacgcaatcactagactggaggcttggagcctggccctgctggccctcttcctggtgctcttcgtggccatcgtgctaaccatctggagacagccccagaaccaacagaaagtagcgttcatggtgcctttcctgccctttctacccgcctttagcattctggtgaatatctatcttatggtccaactgagtgcagacacttgggtgaggttctctatttggatggccattggattcttgatatacttcagctatggaattaggcattccctggagggtcatttgcgggatgagaacaatgaggaagatgcttaccctgacaatgtccacgctgcagccgaagaaaaatctgccatccaagcaaatgatcaccacccccgcaatctgagcagcccattcattttccacgaaaagacaagtgaattctag

SEQ ID NO: 135627 - DNA, 2094 bp, synthetic construct
  misc_feature 1..2094: note = Description of Artificial Sequence: Synthetic coding sequence
  source 1..2094: mol_type = other DNA
atgaagatcgaaacgagtggctacaactccgacaagctcatctgtaggggcttcattggaacacccgcccctcctgtgtgcgactcaaagttcctgcttagcccttcctctgatgtgcgcatgatcccctgtcgcgccgctctaacattcgcccgttgtctcattcgcagaaagatcgtgacgctcgactcactcgaggacaccaagctatgtcgctgtttaagtactatggacttaattgctctgggagtcggaagcacactgggcgctggcgtgtacgtgttagccggagaggtcgccaaggctgactctggccccagcatcgtagtgagcttcctgatcgcagctctggcctccgtgatggccggcttgtgttacgctgaatttggggcaagggtccctaaaaccggttccgcctacttgtacacctacgtcaccgttggtgagttatgggccttcatcacgggctggaatttgattctgagctacgttattggaacttcctcagtggcaagggcctggtccgggacttttgacgagcttctgtcaaagcagataggccagtttctaaggacttactttcggatgaactatactgggctggcagaatacccggacttcttcgccgtatgtctgatcttactattagctggcctgctttcatttggagtgaaggaaagcgcctgggtgaacaaggtgttcaccgccgttaatattctggtgctcctcttcgtgatggtcgcagggtttgtgaagggcaatgtggccaactggaagatttctgaagagttccttaagaacatctctgcttctgcgcgagaacctccgagtgagaacggaacctccatatatggggcaggggggttcatgccatacggtttcacgggaaccctggctggagccgcgacttgtttctacgcattcgtcgggtttgattgtatcgcaaccacaggggaggaggtgagaaatccccagaaagccattccgatcggcatagtaacaagtctcttagtgtgtttcatggcatacttcggtgtctccgcagctttgacactgatgatgccgtactacttgctggacgagaaatcccccctcccagtggcgtttgagtatgtgggttggggaccggctaagtacgtcgtagctgcagggagcctgtgcgcattgagtacatcattgctgggctcaatgtttcctcttcctcggatcctgtttgcaatggcaagggacgggcttctctttaggttcctggccagagtgagcaaaagacaatcacctgtcgcagccactttgaccgccggcgtaatctcggctttaatggcatttttgttcgaccttaaagctctggttgatatgatgagtattggcaccttgatggcctactccctggtggccgcatgtgtacttatactgcgttaccaacccggcctgtcatacgaccaacccaagtgtagtcccgagaaagatggccttggctcctctcccagggttacctctaaatccgagagccaggtgactatgttgcagcgacagggcttctccatgaggactctgttctgtccctcactgttgcccacacagcagtctgctagcttggtttcctttcttgtgggatttctggcctttctggtcctaggcctgagtgttttaactacctacggtgtccacgcaatcacacgacttgaagcttggagcctggccctgttagccctgtttcttgtcctgttcgtcgcaatcgtgctcacaatttggaggcaaccccagaaccaacagaaagtcgccttcatggtaccttttctgcccttcttacctgcctttagtatcctagtaaacatatatctgatggtgcaactgagcgccgacacatgggttaggttcagcatctggatggcgatcggcttcttgatctacttctcctacggcataagacactcgcttgaaggccacctgcgcgacgaaaacaatgaagaggacgcttatcctgataatgtgcatgccgcagcagaggagaaatctgccattcaggctaacgaccatcacccccgaaatcttagcagtccattcatttttcacgaaaaaacgagtgagttctag

SEQ ID NO: 135628 - DNA, 2094 bp, synthetic construct
  misc_feature 1..2094: note = Description of Artificial Sequence: Synthetic coding sequence
  source 1..2094: mol_type = other DNA
atgaagatcgagacgtccggctacaattcagacaagttaatttgcagaggattcatcggtaccccagctccaccagtctgtgattctaagtttctgctttcccccagcagcgacgtgcggatgatcccttgtcgcgccgctctcactttcgctaggtgtcttatccgccgaaagatcgtgactctcgactccctcgaggatactaaattgtgccgctgtctgagcactatggatctcatagctttgggggtcggttctacgctcggcgctggcgtgtatgtgctcgctggcgaggtggctaaagccgactccggacccagcatcgtggtgagctttcttatagcagcactagcctctgtcatggccgggctgtgctacgctgaattcggcgctcgggtgccaaagacgggctctgcatatttatatacatatgtgacagttggcgaactgtgggcattcattacagggtggaaccttatcctaagctacgttatcggtacgagtagcgtggcacgtgcctggagcggaaccttcgatgaactgctgtcaaagcagattggccaattcctaagaacatattttaggatgaactatacaggtttggcagagtaccctgacttctttgcagtttgcctgatcttacttttggccggcctgctaagtttcggggttaaagaaagtgcctgggtcaataaggtttttacggccgtgaacatcctggtgctgctttttgtgatggtggccggcttcgtcaaaggaaacgttgcaaattggaaaatctcagaggagtttctgaagaatataagtgcctctgcacgagagcctccatccgagaatggaacaagtatatacggcgccggcggcttcatgccatacggattcactggaacactagccggagccgctacctgtttctacgccttcgtcggcttcgactgcattgccacaacaggggaagaggtcaggaatcctcaaaaagccatacctatcgggatcgtgacttccctgctggtgtgcttcatggcttactttggcgtctccgccgcattgacactcatgatgccgtactacctactagacgagaaaagtcctcttcccgtggctttcgaatatgtcggctgggggcccgctaaatacgtagtggcggctgggtccctgtgtgcattaagcacttcactgctcggatcaatgttccctcttcctaggattttgttcgctatggccagggacggcctgttgtttagatttctcgctcgggtgtccaaacgccagagccctgttgcagccacactcacagctggagtaattagtgctctgatggctttcttgttcgacctgaaggcactagtggatatgatgtctattggaactctgatggcgtactccctcgtggcagcttgtgtgctgatcctgaggtatcaaccgggactaagttacgaccaacccaaatgctctccggaaaaggatgggttgggttctagcccaagggtgacctcaaaatcagaatcccaggtcactatgttacagcgtcaagggttttccatgcgcacactgttctgcccctccctgttgccgactcaacagtcagccagcttagtgtctttcctggttggatttcttgcgttcctggtcctgggactctccgtgcttacaacatacggcgtgcacgcaataacccgcctggaggcttggagtctggcactgcttgctctgttccttgttctcttcgttgctatcgttctgaccatatggagacagccccagaaccagcaaaaagtggctttcatggtcccatttctgcccttcctgccagccttcagtatactcgtcaacatctacctgatggtgcagctctccgccgatacgtgggtcaggtttagcatctggatggccatcggtttcctgatttatttctcctacggtatccgacattcgctggaggggcatctgcgcgatgagaataacgaggaggacgcttatcctgataacgttcacgctgctgctgaagagaagagcgccattcaggctaacgatcatcatccgcgcaacctgtctagcccttttatcttccacgaaaaaacatcagagttctag

SEQ ID NO: 135629 - DNA, 1977 bp, synthetic construct
  misc_feature 1..1977: note = Description of Artificial Sequence: Synthetic coding sequence
  source 1..1977: mol_type = other DNA
atgattccatgcagggccgccctgacatttgccagatgtctcatccgccggaaaatcgtaacacttgattcattggaagacaccaaactgtgtcgatgccttagcaccatggacctgatcgcactgggcgttgggtctactttaggcgctggtgtgtatgtgctcgccggtgaggtggctaaagcagacagcggtcccagcatcgtcgtgagctttctgattgctgcgttggctagcgtgatggctggtctgtgttacgctgagtttggagcacgcgttccaaaaaccggcagtgcctacctatatacttatgtgacggtaggggaactgtgggcgttcattacagggtggaacctcattcttagctacgttataggtacctcttctgttgctagagcttggtcagggacctttgacgagcttctgagcaaacaaataggacagttcctgcggacgtactttcggatgaattatacagggctggccgagtacccagacttctttgctgtatgtctcatcctactcctggcgggcctcctgtccttcggggtaaaagaaagcgcctgggtgaataaggtgttcaccgccgtgaacatcttggtcctcctctttgttatggtcgcagggtttgtcaaagggaatgtggccaattggaaaatctcagaagagtttctgaagaatatctctgcttctgccagagagccaccctctgaaaacggtactagcatctacggggcaggcggattcatgccctatggttttactggtacccttgccggagccgcaacctgcttctatgcctttgttggcttcgattgcattgctaccacaggcgaggaggttcgaaatcctcagaaagctatcccaatcggaattgttacctccctactggtttgttttatggcctatttcggggtttcagccgcattaacactaatgatgccatattatctgctagacgaaaagagtcccctccccgtcgcctttgagtacgttggttggggccccgctaagtacgtggtagctgcagggagcctctgtgcactgagcacctctctactggggtctatatttcctatgccacgggtgatctacgccatggccgaggacggactgctgttcaagtgcctggcccaaatcaatagcaagacaaaaactccaataatagcaacattaagtagcggagccgtggccgccttgatggcattcctgttcgatctgaaggcgctggtcgacatgatgagcatcgggactctgatggcatatagcctcgtggctgcttgcgttttaatcctgcggtatcagccaggcctgagttacgaccagcccaagtgttcaccagaaaaggatggattaggatcatcccccagggtgacatccaagagtgaaagccaggtcactatgctacaaaggcaggggttctccatgcggaccctcttttgtccatctctgctgccaacacagcagagcgcgtctctggtttctttccttgtggggtttcttgcatttctggtactgggactgagtgtgctgacgacatacggagtccacgccatcacacgactggaggcctggtcccttgctctgctcgccctttttcttgttctgtttgtggccattgtcctgacaatttggcgtcaaccacaaaaccagcagaaagttgcttttatggtgccttttttaccattcctgcctgcatttagtattctggtgaacatctatttgatggtgcagctctcagctgacacgtgggttaggtttagtatttggatggcaatcggctttctgatttatttctcctacggaatcaggcactctttggagggccacttgcgagacgaaaacaatgaagaggatgcatacccagataatgttcacgcagcggccgaagagaagagcgctattcaggcaaatgaccatcatcctaggaatctcagttccccattcatcttccatgagaagacatccgaattctag

SEQ ID NO: 135630 - DNA, 1977 bp, synthetic construct
  misc_feature 1..1977: note = Description of Artificial Sequence: Synthetic coding sequence
  source 1..1977: mol_type = other DNA
atgatcccatgccgagctgccctgaccttcgccaggtgcctcatcaggagaaagatcgtgacgttggactctctcgaggataccaagttgtgtcgttgtttaagtactatggacctcatcgcactcggcgtcgggtctacactgggcgcaggagtttatgtactggccggggaggttgccaaggccgattctggcccctccatagtcgttagcttcttgatagccgctcttgcgtctgtcatggctggactctgttatgcggagtttggggcacgtgtgccaaaaaccgggtcggcctatctctacacatatgtgacagtaggggaactatgggccttcatcacaggctggaaccttatcctgtcatatgttattggcacaagctctgtcgcgagggcctggagcgggacatttgatgagttactgtctaagcaaataggccagtttcttcgcacctatttccgcatgaactacacgggccttgcagagtatccagacttttttgctgtctgcttgattcttttgctggccgggctgttgagcttcggggtgaaagagagcgcctgggttaacaaggtgttcactgcggtgaacatcctagtcctgctgtttgttatggtagccggcttcgtaaagggtaatgtagccaattggaaaatcagcgaggagtttctgaaaaatattagtgcgagcgcaagggagcctccatctgagaacggcaccagcatatacggagcaggcggctttatgccgtacggttttaccggtactttagccggcgccgctacctgtttctatgccttcgtaggctttgactgtatagctacaaccggggaggaggtcaggaatcctcagaaagccattcctataggaatcgtgacaagcctcctcgtttgtttcatggcatatttcggggttagcgcagccctcacgctgatgatgccctactacctgttggacgaaaagagtccacttcccgtggcgttcgagtatgttggttggggccctgctaagtacgtggtggccgctggcagcctgtgtgcattgtctacgtccctgctgggatccatctttcccatgccaagggtgatctacgctatggctgaggacggcctcctttttaagtgcttagcccagattaactcaaagacaaagactccaatcatagccacgttatcaagcggcgctgtagccgcactcatggcctttttgttcgatctgaaggccctggtggacatgatgagtataggcactctaatggcatacagtcttgtcgctgcctgcgtactgatcttgcggtatcagccaggattgtcttatgaccagccgaaatgttctcctgagaaagatggtcttggctcaagtccacgggttacatcgaagtctgaatctcaagtcacgatgctgcaacggcaggggttctctatgaggaccctgttctgcccctctttgctccctacgcagcagagcgcctccctggtcagttttttagttggctttctggctttcttggttttagggctcagcgtgttgacaacctatggggtccatgcaattacgcgccttgaggcgtggagtttagccctgttggcattgtttctcgtgctctttgtagctatcgtgctgacaatttggcgtcagccgcaaaatcaacagaaagtggcttttatggttccattccttccctttttgccagcattctctatactggtaaacatctatttgatggtgcaactaagcgctgacacctgggtccggttttcaatttggatggccatcggatttctaatctacttctcttatgggattagacacagcttggagggtcatctaagggatgagaataacgaggaggatgcttacccagacaacgtgcacgccgccgctgaagagaaatccgctattcaggctaacgatcaccacccgaggaacctatctagtccctttatcttccatgaaaagactagtgagttctag

SEQ ID NO: 135631 - DNA, 1464 bp, synthetic construct
  misc_feature 1..1464: note = Description of Artificial Sequence: Synthetic coding sequence
  source 1..1464: mol_type = other DNA
atgggcgatacgggcctgcggaaacgaagggaagacgaaaagtccatccagagccaggagccaaagaccaccagtttacagaaagagctggggctgatttccgggatatctatcatagtggggacaatcatcggctccgggatctttgtgtctcctaagagcgtcctgtccaacaccgaagccgtcggcccttgcctgatcatttgggccgcatgtggcgtgctggcaactttgggggcactttgtttcgccgaattgggcacaatgattaccaagtccgggggggagtacccttacttaatggaagcctacggtcccatacccgcctacctcttctcatgggcctctctgatcgtaattaaaccgacctcattcgctatcatttgcttatcttttagtgagtatgtgtgtgcgcctttttacgtgggctgtaagccaccacagattgtcgtcaaatgtctcgcagctgccgcgattttgttcatctccaccgtgaactctctttcagtgcggctgggatcctacgtgcagaacattttcactgccgcaaagctcgtaatagtggctattataatcatctctggccttgtgctgttagcccagggcaacacaaaaaattttgacaatagctttgagggagcccaactttccgtgggggccatcagcctcgctttctacaatgggctgtgggcatatgatggttggaaccagctgaactatattaccgaggagcttaggaacccttaccgcaatctcccattggcaataattatcgggatcccgttggtgactgcctgctacatcctgatgaatgtatcctactttaccgtcatgaccgctaccgagcttttgcagtcacaggccgtcgccgtcacttttggcgatcgtgtgttgtaccccgcatcttggattgtccccctgtttgtggctttctcaacaattggggccgccaacggcacgtgcttcactgccgggaggttaatctatgtggctgggagagagggccatatgctgaaagtgctatcatatataagtgtgcgtcgcttgacacccgcccccgcaataatcttttacgggataatcgccaccatttacattatcccgggcgacatcaactcattggtgaattactttagtttcgctgcctggttgttctacggcctaactatcttgggactgatagtcatgaggttcacgcggaaggaattagaaaggcccatcaaagtcccagtcgtcatcccagttcttatgacccttatctctgtgttcttggtgcttgccccaataatcagtaaacccacctgggagtatctttactgcgtcctctttatcctatctggcctccttttttacttcctgtttgtgcactataagttcggatgggcacaaaaaatcagcaagcccatcactatgcacctgcagatgctcatggaagtggtcccacccgaggaagacccagaatag

SEQ ID NO: 135632 - DNA, 1464 bp, synthetic construct
  misc_feature 1..1464: note = Description of Artificial Sequence: Synthetic coding sequence
  source 1..1464: mol_type = other DNA
atgggggataccgggctccgcaagagaagagaggatgaaaaatctattcagtcgcaggagcccaaaacaacctccctccagaaggagcttggcctgatctccggcatctccatcatcgtcggaaccatcatcggctccggaatttttgtctcccccaagtccgtactgtccaatacagaggccgtggggccctgtctaatcatctgggccgcttgtggcgtcctcgccaccctgggggctttgtgttttgcagaactaggtacaatgatcacaaaaagtggaggggagtatccctatttgatggaagcttatggccccatccctgcgtatctcttcagctgggccagcctcatcgttataaaacccacctcttttgctatcatctgcctgtcattcagcgagtatgtatgtgcacccttttatgtaggttgtaagcccccacagattgtcgtgaagtgtctggccgccgcggcaattttattcatatctactgtgaattctctaagtgttcgcctcggctcttacgttcagaacatctttacagccgctaaattggtcattgtcgctataattatcatatcgggtctggtactgttggcacagggtaacaccaaaaacttcgacaattctttcgagggcgctcagcttagcgtcggtgccattagcctggcattttacaacggtctgtgggcatacgatggttggaaccagctcaactatattactgaggagcttagaaacccctatagaaacttaccactggccattattattggaataccactcgtcactgcctgctacatcctcatgaacgtgtcgtactttaccgtgatgaccgcgacagagctactgcagagccaggctgtggccgtaaccttcggcgatcgcgttctataccccgcgagctggattgtgcccctttttgtggccttttctaccatcggggccgcaaatgggacttgtttcacagccgggaggttgatctatgtggccggacgcgagggacacatgttgaaagttctctcgtacatcagcgtccggaggctgactccagcacctgccatcatcttttatggtatcatagccaccatctatatcataccaggcgacattaactccctggtgaattatttcagtttcgccgcatggctattctacggactcaccatccttggattaattgtaatgcgtttcacacgcaaggagctcgaaaggcccatcaaggtcccagtggtgattccagtgctgatgactcttatctcagtgttcctagtgttggccccaatcattagtaagccaacctgggagtacctgtattgtgttctatttatcttgagcggattactgttctacttcttgtttgtgcactacaagtttgggtgggcacaaaagatatccaaacccataacaatgcatctgcaaatgctcatggaggtcgtgcccccggaggaagaccctgagtag

SEQ ID NO: 135633 - DNA, 1908 bp, synthetic construct
  misc_feature 1..1908: note = Description of Artificial Sequence: Synthetic coding sequence
  source 1..1908: mol_type = other DNA
atggcgcgtgggctccctacaatcgcatccctagcgaggctttgtcagaaattgaatcggttgaaacccttggaagactccacaatggaaacatcgcttagacgctgtctaagcacactggacctgaccctgttaggcgtgggtgggatggtcggctctggcctctatgtcctgactggagccgtagctaaggaggttgcaggccctgcggtgttgctctccttcggagttgccgcggtagcaagcctattggctgcactgtgctacgcagagttcggcgcccgtgtgccaagaacgggatctgcttacctgtttacttacgtttctatgggtgagttatgggcttttctgatcggatggaatgtcctgctcgagtacatcatcggtggagcggctgtggcccgagcttggagtggctacttagatagtatgttttcgcacagcattagaaactttactgaaactcacgtcggatcgtggcaagtgcctcttctgggccactatccagattttctagctgccggaatcatcctcctggcctcagccttcgtctcatgtggagctagggtctcatcctggttgaatcacactttctcggccattagtctcttagtgatacttttcatagtcatcctcggcttcatcctggcacagccccataactggtcagctgacgaaggcggattcgcccccttcggatttagcggggtcatggcaggcacagccagctgcttctatgctttcgttggttttgacgtgatcgcagccagctccgaggaggcccagaatcccagacgcagcgtccccctggctatagctataagtttagctattgcagcaggggcctacatcctggttagcacagtgctcactcttatggttccttggcacagtctggatcctgacagtgccctggcagacgctttctaccagcgcggatataggtgggcgggcttcattgtggcggccggttccatctgtgctatgaacactgtgcttctctccttgctcttctcattaccacgtatagtctatgcaatggcagctgatggcctgttttttcaggtgtttgcacacgttcatcccaggacacaggtaccagtcgcagggactctggcgtttggcctcctgactgcatttttagctctcctgttggacttggagtcgctggtccagttcctgtctttgggcaccctgctggcatacacatttgtggctacgtctatcatcgtgctcagatttcaaaaaagcagtccacccagcagcccaggaccggcctccccaggaccgctgactaagcagcaatcctcattttcggaccatctgcagctggtgggtacggtgcacgcctcagtgcctgagcccggcgagcttaaacccgcacttcgcccctacctcggattcctggatggatattctcctggcgccgtcgtcacctgggccttaggggttatgctggctagtgcgataaccatcggctgcgttcttgtctttggaaactctaccctccatttgccccactgggggtatatactgctgctactcttaacatctgtaatgttcctccttagcctgctggtactcggggcccaccagcagcagtatcgcgaggacctgttccagattccaatggtccctctgatacccgcgctcagcatcgttttgaatatctgcctcatgctgaagctctcttatctgacatgggtaagattttccatttggctgctgatgggtctggctgtgtacttcgggtatggaattcggcattccaaagaaaaccagcgcgagctcccaggtctcaactccacacattatgtcgtgttccctcgcggatccctggaggaaaccgtgcaggcaatgcagcctccaagtcaggccccggcacaggaccccggacacatggaatag

SEQ ID NO: 135634 - DNA, 1908 bp, synthetic construct
  misc_feature 1..1908: note = Description of Artificial Sequence: Synthetic coding sequence
  source 1..1908: mol_type = other DNA
atggcccgaggactgcctactattgcctccttagcccggttgtgccagaagcttaaccgacttaagccactggaggatagcactatggagacatcactcagaaggtgcctaagcaccctcgacctgactctgctgggtgtaggcggcatggttggctctggactgtatgtactgactggcgccgtggcgaaagaggtcgcaggccctgcagtcttattaagcttcggggtcgccgctgttgcctcattgttagctgctctgtgctacgcagagtttggcgccagggtcccgaggacagggtccgcctatctgttcacttacgtctccatgggtgaactgtgggcgtttcttattggatggaatgttctgctggaatacatcattggtggggctgctgtggcgagggcatggagcggatacctggactccatgttctcccactccatcagaaactttacagagacgcatgtaggctcgtggcaggtgccacttctgggacactacccagatttcttggccgccggcattatcttgctcgccagcgcattcgtgtcgtgtggagcaagggtgagtagttggctaaaccatactttttccgccatcagcctacttgttatcctgtttattgtgatcctggggttcatcctggcccagccacacaattggagcgccgacgaaggaggatttgctccattcggcttctctggagtgatggcaggtacagcctcctgcttttatgctttcgtgggatttgatgtgatcgcagctagctcggaggaggcgcagaatccgcgccggagcgtgccattggctattgccatcagtctggccatcgccgccggggcgtacattcttgtctccaccgttttgactctcatggtcccctggcactctctagaccctgacagtgctttagccgatgccttttaccaaaggggctaccgctgggcagggttcatcgttgccgcaggctccatttgtgcaatgaacacagttttgctctcactgctgttttccctgccccgcatcgtgtacgctatggccgccgatggactgtttttccaagtttttgcacatgtgcacccaaggacacaagtgcctgtggccggcacactagccttcggcctgctcaccgccttcttggcacttctgctggatttggaatccctcgtgcaattcctgagccttggtaccctcctagcttacacattcgtcgccactagcatcattgtgttgcggtttcaaaagtccagccctccttcaagtcctggccccgccagtcccgggcccctgactaagcaacagtcctcctttagcgaccatctgcagctcgtcggcaccgtgcatgcgtcagtgccagagcccggggagctgaaacccgccctgcggccttatctggggttccttgacgggtactcaccgggcgccgttgtgacatgggcgttgggcgtaatgttagcgtccgccattactattggctgtgtgctggtctttggcaattctaccctacatctgcctcactggggctacatactcctgctgctgctcactagtgtcatgtttctgctctccttgttggtcttgggtgctcaccagcagcagtaccgcgaagatctgtttcaaattccgatggtccccctgatccctgcgctctccattgttcttaatatctgtctgatgctcaaactttcctacctcacgtgggtgagattcagcatctggttgctcatgggactggcagtttattttggctacgggattcggcatagtaaggaaaaccaacgggagctacctggactcaactcaactcattatgtggtatttccacgcggctcactggaggagactgtgcaggccatgcagcctccttctcaggcgccagcgcaagatccaggccacatggaatag

SEQ ID NO: 135635 - DNA, 249 bp, synthetic construct
  misc_feature 1..249: note = Description of Artificial Sequence: Synthetic coding sequence
  source 1..249: mol_type = other DNA
atggccagagggctccccacgattgcgagcctcgcacgtttatgccagaagctgaaccgcctgaaaccactggaggatagcaccatggaaacgagtctcaggaggtgtttaagcaccctggacttgactttgcttggggtgggaggcatggtggggtcaggcctctatgtattaactggggctgtggccaaagaagtcgctggccccgctgtcctgctgtcattcggggtggccgccgtggcttcttag

SEQ ID NO: 135636 - DNA, 2922 bp, synthetic construct
  misc_feature 1..2922: note = Description of Artificial Sequence: Synthetic coding sequence
  source 1..2922: mol_type = other DNA
atgtacaacatgcgccgcttgagcctgagccctaccttttcaatggggttccacctgctcgtcacagtttcactgctgttttcccacgtcgaccacgtgatcgccgagactgagatggagggggaaggtaatgaaaccggcgaatgcacgggttcttattattgtaagaagggggtaattctcccaatctgggaacctcaggaccccagtttcggagacaagatcgcccgggctacggtgtatttcgttgccatggtgtatatgtttttaggagttagcatcatagctgaccggtttatgagctccatcgaggttatcacatcacaggaaaaggagattactattaaaaaaccaaacggagaaacgacaaaaaccacagttcggatttggaacgagaccgtgagcaatttgaccttgatggcactagggagctccgccccagagattttactgagtgtgatcgaggtgtgtggccacaatttcactgcaggcgatctggggccttccactatagtgggcagcgcagcttttaatatgtttataatcattgctttgtgtgtatatgttgttcccgacggcgagaccaggaaaatcaaacacctgcgcgtgttctttgtcaccgcagcgtggtccatattcgcttacacatggctctatataatcctatccgtaatctccccaggagtggtagaggtgtgggagggcctcctgacattcttcttcttcccgatttgcgttgtcttcgcttgggtagccgatcggagactcctgttctacaagtatgtgtacaaaagatacagggccggtaagcaacggggaatgatcatcgagcacgaaggggatcggccgtcttccaaaactgagatcgagatggatgggaaagtcgtgaattctcacgtggagaactttctcgatggcgcactagtgttggaggtggatgagcgcgaccaagacgacgaggaggcaaggagagagatggcaagaatcttaaaggagctgaagcagaagcaccccgacaaagagattgagcagctgatagaactcgccaactaccaggtgctgagtcaacagcagaaatcccgagctttctacaggatccaagcaactagactgatgacgggcgccggcaatatcctgaaaaggcatgctgctgatcaggcccgcaaagcggtgtctatgcacgaagttaacacagaggtcaccgaaaatgatccggtgtcaaagatcttttttgaacaggggacttaccagtgtttggagaattgcggcaccgttgcactcacaataatccggcgtggaggggacctcactaataccgtttttgtagacttcagaaccgaggacggaaccgccaacgccgggtcggactatgagtttactgaagggacagtggtttttaagcccggggatacacagaaagagattcgcgtcggcatcattgatgacgatattttcgaggaggatgagaactttttggtgcacttatccaatgtgaaagtctctagcgaggcctccgaggatggcatcctggaggccaaccacgtgtcaacactcgcctgcttagggagcccctccactgccacagttactatctttgacgacgaccatgctggaatcttcactttcgaagagcctgtaacacatgtaagtgaaagtatcggaattatggaggtcaaggtcctgcgcaccagcggggctagagggaatgttatcgttccatataagactatagaaggaaccgcacgggggggaggagaggattttgaggacacatgtggtgaattggaattccagaacgatgaaatagtgaagacgatctcagtcaaggttattgacgatgaagagtacgaaaaaaataagacattcttcttggagattggcgaacctcggcttgtggaaatgagtgaaaagaaagctctcctactgaacgagcttggcggatttactataacaggaaagtatctcttcggacaacccgttttccgcaaagtgcacgcccgtgagcatcctatactctcgactgttatcacgattgctgacgagtacgacgacaaacagcccctgaccagcaaggaagaggaagagcgccggatcgctgaaatgggacgaccgattttaggagagcacactaagctcgaagtgattattgaagaatcgtatgagttcaaatctacagtggataaactgattaagaagactaacctggccctcgttgtcgggacaaattcctggagagagcaatttatagaagctatcactgtgtctgccggtgaggacgacgatgatgacgagtgcggcgaggaaaagttaccaagctgctttgattacgtgatgcatttccttactgtgttttggaaggtccttttcgctttcgtgccacccaccgagtattggaacgggtgggcctgtttcattgtatccatccttatgattggactgcttacagcattcataggcgatctagcctcacatttcggttgcactatcggtttgaaggactcagtgactgccgtggtcttcgtggcactgggaactagcgtccccgatacttttgctagcaaagttgcagcaactcaggaccagtacgcagatgcttcaatcggaaatgtaaccgggtccaatgcggtcaatgttttcctgggcatcggcgtcgcctggtccattgctgcaatctatcatgccgctaatggagaacagttcaaggtctccccgggcaccctggctttttccgtgaccttgttcactatcttcgccttcatcaatgtcggcgtgctgctataccggcgacgtcccgagattgggggggaactgggtggaccccggactgccaaactgcttacttcttgcctattcgtgctcctctggctgctctacatctttttcagcagtttggaggcatattgtcacattaaaggtttctag

SEQ ID NO: 135637 - DNA, 2922 bp, synthetic construct
  misc_feature 1..2922: note = Description of Artificial Sequence: Synthetic coding sequence
  source 1..2922: mol_type = other DNA
atgtacaatatgagaaggttgagcctgtctccgaccttcagcatgggttttcacttgctcgtgaccgtgtccctgctgttttcgcatgtcgaccacgtgattgccgagactgagatggagggcgaagggaatgaaactggggagtgtacagggagttattactgtaaaaagggagtgatcctgcccatttgggaaccacaggatccctcctttggcgacaagatagcgcgagccaccgtgtacttcgttgccatggtgtatatgtttctgggagtgtccatcattgctgaccgcttcatgtcctctattgaggtgattacatcccaggagaaggagataacaattaaaaaacccaacggcgaaaccaccaagactacagtgcgtatctggaatgaaaccgtatcaaatctaactcttatggcattagggtccagcgcccccgagattctgctctccgtgatcgaggtgtgtggacataatttcaccgccggggatttgggcccaagtactattgttggaagcgccgcttttaatatgttcattattattgcactatgcgtgtatgtagtacccgatggcgaaacacgcaaaatcaagcacctgcgtgttttttttgtcacggctgcatggtctatcttcgcgtacacctggttatacattatcctaagcgtgatttcacctggcgtggtggaagtgtgggagggtcttctcaccttcttcttttttcccatctgcgtcgtttttgcctgggtggcagatagacggctcttgttttataagtacgtctacaaacgctaccgcgcaggaaagcagcgcggcatgattatagagcacgaaggcgaccgcccgagctcaaaaactgaaattgaaatggacggaaaggtggtcaatagccacgtcgagaatttccttgacggggctctcgttctggaagtggacgaacgggatcaagacgacgaggaagcgagacgggagatggcccgaatccttaaggagttgaaacaaaaacaccctgataaggaaatcgaacagctgatcgagctcgcaaattatcaggtcctgagtcaacagcagaaatccagggcattttaccggatccaagccaccaggcttatgactggagccggcaatattctgaaacgccatgccgcggaccaggctcgtaaggcggttagcatgcatgaagtgaatactgaagtcactgagaatgacccggtatccaagatattcttcgagcagggcacttaccagtgtctcgaaaactgcgggactgtggcgctcacaatcatcagaaggggtggagacctcacgaacacggtcttcgttgatttcagaactgaagacgggacagccaatgcaggctctgactacgaatttactgaaggcacagtcgttttcaagcccggcgatacccaaaaagagataagggtgggaattatcgatgacgacatcttcgaggaggatgagaactttctggttcatctctccaacgtcaaggtctcttccgaagcatctgaggacgggatcctggaggccaatcatgtgtcgacattggcatgtctgggctcaccaagtacagccaccgttactatttttgatgacgatcacgctggaatttttactttcgaggaacccgtgacgcacgtgtccgagagtatcgggataatggaagtgaaagtgctgcgaacatccggggcgagaggaaacgttatagtcccatacaagaccattgagggtactgcaaggggtggaggggaggattttgaggacacctgcggcgagctagagtttcagaatgatgagatagttaagaccattagtgtgaaggtgatcgacgatgaggagtacgaaaaaaataaaacattctttctggaaatcggggaacctcggctggtcgaaatgtctgagaagaaagcattactattgaacgaactgggaggatttactattacagggaaatatctgttcggccagccagtcttcagaaaagtccatgcaagagagcatccaatcttgtcaacagtgataactattgcggatgaatatgacgacaaacaacccttaacatcaaaagaggaggaggagaggagaatcgcagaaatgggcagacccattcttggggagcatacgaagctagaggttatcatcgaggaaagctacgaatttaaatctacggttgataaacttattaaaaaaacaaaccttgccttagtagtggggaccaattcgtggcgcgaacagttcattgaagctatcactgtatccgctggcgaagatgatgacgatgatgaatgtggagaagagaaattaccttcttgcttcgattacgttatgcatttccttacggtcttctggaaagtactgtttgcttttgtcccccctactgagtattggaatggttgggcttgtttcattgtgtccatcctcatgatcgggcttctgacagcattcattggagacttagctagccacttcggatgtaccatcgggctgaaagactctgtgaccgctgtcgtgttcgtggccctgggcacatctgtccccgataccttcgccagcaaagtagccgctacccaggaccagtatgccgacgcctctattggcaacgtgactggatcaaatgccgtgaacgtcttcctgggaattggggtggcctggtctatcgctgctatctatcatgcagccaacggagaacagtttaaagtcagccccgggactctcgcatttagcgtgacattattcacaatcttcgcctttatcaacgtgggggttctgctgtaccggcgtcgacctgaaatcggcggagaactcggcggacctcggactgccaagctgctgactagctgtctttttgtgctgctgtggctgctttacatcttcttcagcagcctggaggcctattgccatatcaagggcttctag

SEQ ID NO: 135638 - DNA, 2814 bp, synthetic construct
  misc_feature 1..2814: note = Description of Artificial Sequence: Synthetic coding sequence
  source 1..2814: mol_type = other DNA
atgtacaatatgaggcgactgtccctctccccaacatttagcatgggttttcatttgttagtcaccgtgtctctgctcttttctcacgtggatcatgtgattgctgagacagaaatggagggagaaggaaatgagaccggtgagtgcaccgggtcctactattgtaagaaaggcgtgattctgcctatatgggagcctcaggacccaagctttggcgataagatcgctcgggccacggtttacttcgtggccatggtgtatatgttcctgggggtcagcatcattgccgacaggttcatgtcgtcaattgaggttatcacaagccaggagaaagagattactatcaagaaaccgaacggagagactacaaagacaaccgtgagaatttggaatgagacagtgtccaacctgacactgatggcgctgggatctagcgcccccgaaatcctgctgtcagtgatagaggtgtgcgggcataacttcactgccggcgacctgggtcccagtaccattgtgggcagcgcagccttcaacatgttcattattattgccctgtgcgtgtacgtggtgccggatggagagacccggaagattaagcacttgcgggtgttctttgtcaccgctgcatggagcatcttcgcttatacctggctatacattatactgtccgtgatctctccaggtgtcgtggaggtttgggaggggcttttaacttttttcttctttcctatttgtgtggtgtttgcttgggtcgccgatcgaagactgcttttctacaaatatgtctacaagcgatatcgggctggaaagcagcggggaatgatcattgaacacgaaggggaccggccatcctcaaaaaccgaaattgagatggacggtaaggtcgtgaacagccatgttgaaaatttccttgacggcgcactcgtactggaggtggatgagcgagaccaggacgacgaggaagccagaagagagatggctaggatactcaaggaactaaagcaaaaacaccctgacaaagagattgaacagctgattgagctggccaactaccaagtcctatctcagcaacagaagagtcgcgctttctaccgaatacaagctacacggttgatgacaggcgcaggaaacatccttaagcgacatgcggctgaccaggcccggaaagccgtgtctatgcatgaggttaacacagaggtgaccgagaatgatccagtcagtaaaattttttttgagcaaggtacctaccagtgcctggaaaattgcggaacggtggcactgaccatcatccgccggggaggggatctgacgaatactgtctttgtagatttccgtaccgaggatgggaccgccaacgctggatccgattatgagttcacagagggtactgtagtatttaaaccaggcgatacacagaaagagattagagtcggtatcattgacgatgatatttttgaggaggacgagaattttttagtgcaccttagcaacgtgaaggtgtcttcagaggcttcggaggacggtattctggaggctaaccacgtgtccacactggcgtgcctgggtagcccctctaccgcaacggttaccattttcgacgatgatcacgctggaatcttcactttcgaggagcccgtgacccacgtcagcgaaagcatcgggatcatggaggtcaaagtgctaagaacttcaggggctaggggaaatgtgatcgtaccatacaaaactattgagggtaccgctcgaggaggaggcgaggactttgaggatacatgtggtgaacttgaatttcaaaatgatgagatagtgaagatcatcaccattcggatatttgacagagaggagtacgagaaggaatgcagtttttcattagtgcttgaagagcctaagtggattcggaggggtatgaagggcggctttacaataactgatgagtatgatgacaagcaaccactcacttccaaagaggaggaagagcggcgcattgccgagatggggcggcctatcctcggtgagcatacaaaattagaggtgattattgaggagagttacgagttcaaaagtaccgtggacaaactgatcaaaaagaccaacctggccctagtggtggggaccaactcatggcgggagcagtttattgaagcaatcacagtgtccgctggcgaagatgatgacgatgatgagtgcggggaagaaaaacttcccagttgctttgattacgtaatgcatttcctgaccgtgttctggaaggttctgtttgcgttcgtccccccaaccgaatattggaacggctgggcctgctttatcgtgagtattttgatgatcggtcttctcacagcattcattggcgatcttgcatcacacttcggctgcactatcggtttgaaagacagcgtgaccgcagtggtgtttgtggcactggggacaagcgtgccagacaccttcgctagtaaagttgccgcgactcaagaccagtatgcagacgcatccattggaaacgtgacaggctctaacgcggtcaatgtattcctaggtattggcgtcgcctggtctatcgccgccatctaccacgccgccaatggtgagcagtttaaagtgagtccgggtaccctggcgttcagcgtcaccctgttcacaatctttgcattcataaacgtaggagtcctgctgtacaggcgacgaccagagatcggaggagaattaggaggccccagaacagcaaagctgctgaccagctgcctctttgtgttgctttggctgctgtacatctttttctcaagtttggaggcatactgtcacatcaaggggttctag

SEQ ID NO: 135639 - DNA, 2922 bp, synthetic construct
  misc_feature 1..2922: note = Description of Artificial Sequence: Synthetic coding sequence
  source 1..2922: mol_type = other DNA
atgtacaacatgcggaggctcagtctatcacccacatttagcatgggtttccacctgctcgtaacagtgtcattgctgttcagtcacgtggaccatgtaatcgccgagactgaaatggagggtgagggcaacgagactggggaatgcacggggagttattattgcaaaaaaggcgtgatactgccaatatgggaaccccaggacccaagcttcggggacaagattgctcgtgcaactgtctactttgtcgccatggtttacatgtttctgggtgtgtcgatcatagccgatagatttatgagttcgatcgaggtgattacgtctcaggaaaaggaaatcaccattaaaaagcctaacggagagacaaccaagacaaccgtgcgaatatggaatgagaccgtatcaaacctgactttgatggcactgggctccagcgccccagaaatcctgttgtccgtaattgaagtgtgcggacataacttcacggcgggcgatctaggaccctctaccatagtaggaagcgccgctttcaatatgttcattattatcgccctttgcgtctatgtggtcccagacggggaaactagaaagatcaagcatttgcgcgtgttctttgtcactgccgcatggagcattttcgcctatacatggttatacattatactctcagtgatttcccccggtgtggtggaggtatgggaaggactcctgaccttcttcttctttcccatatgtgtcgtgttcgcatgggtcgcagatcggcgcctcttattttataaatatgtgtataagcgataccgcgcaggcaagcaaagggggatgattatcgagcatgaaggagatcgacccagcagtaagactgagattgaaatggacggaaaggtcgttaactctcatgtggaaaactttctcgacggtgctctggttcttgaagttgacgagcgggatcaggatgatgaggaagccagacgggagatggctagaatcctcaaagaattaaagcagaagcaccccgacaaggagatcgagcagcttatcgaactggccaattaccaagtgctgtctcaacagcagaagagccgtgccttctatcgtattcaggcaacacgtctaatgaccggagcaggcaacattctgaagcgccatgcagccgaccaagcacgcaaggccgtttccatgcacgaagtgaacaccgaagttacagagaatgacccggtgagcaagattttttttgagcagggaacataccagtgtttggagaactgtgggaccgtggcgctgacaatcatcagacgcgggggagacctgactaacaccgtgtttgtggatttcaggaccgaagacggtaccgccaacgccggttcggactacgagtttaccgaaggaactgtcgttttcaaacccggagacacgcagaaagagattcgggtgggcattatagacgacgacatctttgaggaggacgaaaacttcctcgttcatctatccaatgtcaaagtgtcaagtgaggccagcgaggatgggatattggaggcaaatcatgtgagcactttggcatgtctgggctcccccagcacagccacagtgacaatcttcgatgatgatcacgcaggcattttcacctttgaagaacctgtcacacatgtgagcgagtctataggtatcatggaggtgaaagtgctacggacctcaggagctcgggggaacgtcatcgtcccatataagacaattgagggaactgccagaggaggaggggaagacttcgaagatacatgcggcgagctcgaattccaaaatgacgaaattgtgaagactattagcgttaaggttattgatgacgaagaatatgaaaagaacaagacattctttctcgagattggcgagccacgactggtggaaatgtccgagaaaaaagccttactgctgaatgagctgggaggcttcacaatcacaggtaagtatctcttcggccagcctgtctttcgtaaggtacacgccagggaacaccctattctgtctaccgtaattactatcgctgacgaatacgacgataaacagcctctcacctcaaaagaggaagaagaaaggcggattgccgaaatgggacgccccatcctgggagagcacacgaaactggaggtgataattgaggagagctatgagttcaagtccaccgtggacaagttaataaagaagacgaatcttgcactcgtcgtaggcaccaattcatggcgggagcagttcatcgaggctatcacagtctccgccggggaggacgatgacgacgacgaatgcggagaagagaaactgcccagctgtttcgactacgtgatgcatttcttgactgtgttctggaaggttctgtttgcctttgtgccgcccaccgagtactggaatggctgggcttgtttcatagtcagtattttaatgattggcctgctgacggcctttatcggggacctcgcctcacacttcggatgtaccatcggacttaaggactccgtgactgccgtcgtttttgtagctctgggcacgtctgtgcccgacacgttcgcttccaaagtagctgctacacaggatcagtatgcggacgcatctatcggcaacgttacggggagtaatgcagtaaacgtctttctgggcattggcgtggcttggagcatagccgccatctaccacgcagctaacggcgagcagttcaaggtgagccctgggaccctggccttctcagtaaccctgtttacaattttcgcctttatcaatgtgggcgtgctgctgtacaggcggaggcccgagattggaggagaacttgggggtcctcgcacagccaagctgttgacctcctgtctttttgtgcttctttggttattgtacatttttttctcatccctggaggcctactgtcatataaagggattttag

SEQ ID NO: 135640 - DNA, 2814 bp, synthetic construct
  misc_feature 1..2814: note = Description of Artificial Sequence: Synthetic coding sequence
  source 1..2814: mol_type = other DNA
atgtataacatgcggaggctgtctctcagtccaaccttttctatgggtttccacctccttgttactgtgagtctcttgttttcacatgtagatcatgtgatcgcggagactgagatggagggggaggggaatgagacaggtgagtgcacaggttcctattattgcaaaaaaggcgtcattctccccatttgggaaccccaggatcccagctttggggacaagatcgccagggcaactgtgtacttcgtagctatggtatacatgttcctgggcgtatctattatagccgacagattcatgagctctattgaggttatcactagccaggaaaaagaaattacaattaagaagcctaacggcgaaacaaccaaaactactgtgcggatctggaacgagacagtcagcaacttgacactgatggctcttggcagcagcgcccctgagattctgctatctgtgatcgaggtgtgtggtcataactttactgccggggacctgggccccagtaccattgtcggaagtgcagccttcaatatgttcatcatcatcgcgctgtgtgtttacgtggtgcccgacggggagactcgtaaaattaagcacttacgcgtgttttttgtcacagccgcatggtctatcttcgcgtacacctggttgtatatcatcctgagcgtaatcagccccggagttgtagaggtttgggaagggctcctcacattcttcttcttcccgatctgcgttgtgtttgcatgggttgccgacagacggctgctgttttataagtatgtctataaacgctaccgagccggtaagcaaagaggtatgatcattgagcatgaaggagaccgtcctagtagcaagaccgaaatcgagatggacggcaaggttgtgaacagccacgtcgaaaattttctggatggggcgctcgtgctggaagtagatgaaagagatcaggacgacgaagaggctagacgggaaatggctaggatactcaaggaactgaagcaaaaacacccagataaagagattgaacagttaattgagctcgccaattatcaggtgctgagtcaacagcaaaagtccagggctttctataggatccaggccacccgcttgatgactggtgctggaaacattctgaaacgtcatgccgctgaccaagctcgtaaggccgtctccatgcatgaagtgaacaccgaagtgacggagaatgatccagttagcaagatcttcttcgagcagggcacctatcagtgtctagagaattgtggtaccgtggcactgacaattatccgtcgcggaggagacctcaccaacactgtttttgtggacttcagaacggaggatggaactgccaatgccggaagtgattacgaattcactgaaggcaccgtggtgttcaagcctggcgacacccagaaggagataagggttggtattatcgacgatgatatttttgaggaagatgaaaacttcctcgtgcatctgtcgaatgttaaggtttcctccgaagccagcgaggacggaatccttgaggcgaaccacgtctctactctggcctgcttaggctctcccagcactgccaccgtcaccatatttgacgatgatcacgctggaatctttacatttgaggagcccgttacccacgtgtcagagtccattggaattatggaagtgaaagtcctaagaacctcaggtgctcggggaaacgtgattgtgccctataaaaccattgaggggacggcaagaggcgggggagaggatttcgaggatacctgtggggaattagagtttcaaaatgatgaaatcgtaaaaattatcactataagaatatttgacagggaggagtatgagaaggaatgcagctttagtctcgtgttagaagagcccaaatggattcgaaggggcatgaaggggggctttacaattaccgacgaatatgacgataaacagcccctcacaagcaaggaggaagaggagcgccgtattgcagagatggggaggccaatattaggggagcatacgaaactggaagttattattgaggaaagctacgagtttaaatccaccgtagacaaactgatcaagaaaaccaatctggccctggtggttgggaccaatagctggagggagcagtttatcgaagcaattaccgtttccgccggcgaagatgacgatgatgacgagtgcggcgaggagaaactaccctcttgcttcgactatgttatgcactttttgaccgttttctggaaagtgctgttcgcttttgtgccgcctacagaatactggaacggttgggcctgttttatagtcagcatcctcatgatcgggctgttaactgcctttatcggtgatctggcttctcacttcggctgcactattggtttgaaagactccgttaccgccgtggtgttcgtagccttaggaaccagtgtgccggatacttttgctagtaaggtggcagccactcaagaccagtatgccgacgccagcattggtaatgtgactggcagcaacgctgtaaacgtgttcctaggcattggcgtggcgtggtcaattgcggctatataccatgcagcgaacggcgagcaatttaaggtgtccccgggaaccttagctttctctgtaacactattcactatttttgctttcattaatgtgggggtcctcctttatcggaggcgtcccgaaattgggggagagctgggtggcccccggacagctaagctgctcaccagctgtctgttcgtactgctgtggttgttgtacatctttttctcaagtctcgaggcatactgtcatatcaaaggattttag

SEQ ID NO: 135641 - DNA, 2907 bp, synthetic construct
  misc_feature 1..2907: note = Description of Artificial Sequence: Synthetic coding sequence
  source 1..2907: mol_type = other DNA
atgtacaacatgagacggctttcactttcgccaaccttctccatgggcttccaccttttggtgacagtctcactgttattttcccacgtggaccatgttatcgctgagacagagatggaaggcgagggtaacgaaaccggcgagtgcaccggctcttattactgcaagaaaggggtgatcctccccatctgggaacctcaagacccctccttcggcgataaaattgctcgggctacagtgtatttcgtggccatggtctacatgtttttgggggtgagcatcattgctgatagattcatgtccagcattgaggtaatcactagccaagagaaggagattacaatcaaaaaacctaatggagagacaactaaaactactgtgcggatctggaatgagactgttagcaatctgaccctcatggccctgggtagctcagcccctgagatccttctgtctgtcattgaggtgtgcgggcacaatttcactgcgggcgatcttggcccttcgaccatagttggctctgccgcttttaacatgtttattataatcgccctttgcgtttacgtcgtccctgacggcgagacacggaaaataaaacacctacgcgtgttctttgtcactgccgcctggagtatttttgcttacacttggctgtacataatcttgagcgtgatctcgcctggcgtggttgaggtatgggaggggctcctgacgtttttcttctttccaatttgcgtcgtgttcgcatgggttgcggatcgcagattgctattttataaatatgtctataaacgctaccgggctggaaagcagcgaggcatgatcattgagcacgagggcgacaggccatccagcaagacagagattgaaatggatggcaaggtcgttaacagtcacgtcgaaaactttctcgatggcgctctggttctggaagtcgacgaaagggatcaggacgacgaggaggcacggagagagatggctaggattcttaaggaattgaagcagaagcatccagacaaggaaattgaacagctcatagaactggcaaactatcaggttttgagccaacagcagaaatctcgcgccttttaccggatccaagccacccgccttatgaccggtgccggtaacattctgaagcgacacgccgctgatcaggcacggaaggctgtgagcatgcatgaagtaaacaccgaagtcactgaaaatgatcctgtcagcaaaatcttttttgaacaagggacttatcagtgtctggaaaactgtggtaccgtagcactgactattattcgcagaggtggtgacttgacgaatacagtctttgtggactttcgcacagaggacggcacggctaatgccgggagtgactacgagtttacggaggggacagtggtgtttaagccgggtgacacccaaaaggaaatcagggtggggattattgatgacgacatatttgaggaggatgagaacttcttggtgcatctcagcaatgttaaggtgagttccgaagcctcagaagacggtattctggaggctaaccacgtgtccactctggcttgtttggggagcccatccactgccacggtgacgatcttcgatgacgaccacgccgggattttcacattcgaagaaccagtaactcacgtatccgagtccataggaataatggaagtgaaagtgttacggacaagtggtgccagagggaacgtcattgtgccttacaagaccatcgagggcacggccagaggaggcggtgaggactttgaggacacatgcggagagttggaatttcagaacgatgaaatagttaagaccatttccgtcaaggttatcgacgacgaggaatacgagaaaaataagactttcttcttagaaattggggagcccaggctggttgagatgtccgagaagaaggcacttctgctaaatgaattgggagggttcacaatcactggccagcctgtctttagaaaggtgcacgctcgggagcacccgatcctgagtaccgtgatcacaatcgctgacgaatacgatgacaagcagcctctcaccagcaaggaggaagaagaaaggcgtatagccgagatgggcaggcccatcttaggtgagcatactaagttagaggtcattatcgaagagagttatgaatttaagtccactgtggacaaactcatcaagaaaaccaatctagccttggtggtgggcaccaacagctggagagagcagtttattgaggccatcacagtatcagccggggaggacgacgacgatgacgagtgcggagaagaaaaactaccatcatgcttcgactatgttatgcatttcttgaccgttttttggaaggtactctttgcattcgtaccaccaactgagtactggaatggatgggcctgcttcattgtcagtattctgatgatcggcctcttgacagcgttcatcggagacctggctagccattttggatgtaccatcggcttgaaggacagcgtaacagctgttgtgttcgtcgccctggggacgtccgtaccggacacctttgcatctaaagtggctgccacccaggaccagtacgccgacgcttccatcggtaatgtcaccggttcaaatgcagtgaacgtgttccttggtatcggtgtcgcgtggagcatagcggccatttatcatgctgctaatggggaacaattcaaggtgagcccgggaacacttgcctttagcgtgaccctgttcacaatctttgccttcataaatgtcggggtgctgctctaccggaggaggccagaaattggcggggagctgggcgggccacggaccgcgaaacttctaacctcttgtctcttcgtgctgctctggcttctgtacatcttcttcagtagtttagaagcttactgccacattaagggattctag

SEQ ID NO: 135642 - DNA, 2814 bp, synthetic construct
  misc_feature 1..2814: note = Description of Artificial Sequence: Synthetic coding sequence
  source 1..2814: mol_type = other DNA
atgtataacatgcggcgcctttcactaagccctactttctccatggggttccacttgctcgtaacagtgagtcttctgttctcccacgtggatcatgttattgctgaaaccgagatggaaggtgagggcaacgagaccggggagtgcacaggatcctattactgtaagaagggggtgatcttgcctatttgggaaccgcaggacccatcattcggcgacaaaatcgctcgtgctaccgtgtatttcgtggcgatggtctacatgttcttaggcgtgtctatcatcgcggatagatttatgagctcgatcgaggtgattacttcacaggaaaaggaaatcacaatcaagaaacctaatggcgagacaacaaagacaacagtgcggatctggaacgaaactgtcagcaacctgacactaatggctcttgggagcagtgctccagaaattctattatccgtcatcgaggtttgtggacacaatttcaccgctggcgatctcggccctagcacaattgtgggcagtgcggccttcaacatgttcatcatcatcgccctgtgcgtttacgtagttccggacggggagacaaggaaaatcaaacatttaagagtcttcttcgtgaccgccgcctggtccatctttgcgtatacatggctgtatatcatcctctcagttatttctcccggcgtggtggaagtttgggagggactcttaaccttcttcttcttccctatctgcgtggtctttgcatgggtggcagaccgaaggttgcttttctataagtacgtatacaagaggtaccgagcaggcaagcagagaggcatgattattgagcacgaaggagatcggcctagtagcaagactgaaatagagatggatggtaaagttgtaaacagtcatgtggagaattttttggacggcgccttggtgttagaggtggatgagagggaccaggatgacgaggaagccagaagagaaatggcacggatccttaaagaactcaagcagaaacaccctgataaagagatcgagcagcttatcgaactcgccaattatcaagtcctgagccagcagcaaaaatccagagccttttacaggatccaagcaacaagactgatgactggtgccgggaatatactgaaacgacatgctgcagaccaggcgcggaaagccgtgagtatgcacgaggtcaacactgaagtgactgaaaacgatccagtgtccaaaatcttctttgaacagggtacttatcagtgtttagagaactgcgggaccgtcgcattgacgataataaggagggggggtgacttaacgaatactgtgtttgtggacttcaggacagaagacgggacagctaatgctgggtcagattatgaatttaccgagggaaccgtggtttttaaacccggcgatacacagaaagaaatccgagtagggattatcgacgacgacatcttcgaggaagacgagaacttcctggtgcacctctctaatgttaaagtaagttcagaggccagcgaggatggcatccttgaagccaaccatgtgagcaccctggcatgcctagggtcaccttccaccgctacagtgacgatctttgatgacgaccatgcaggtatattcacttttgaagaaccggtcacgcacgtcagtgagagtatcggcattatggaggttaaagtactccgcactagtggcgcgcggggaaatgttatagtaccttacaaaacaatagaagggacggcaaggggaggtggtgaagacttcgaagacacctgtggtgaactcgagtttcaaaacgacgagatagttaagatcattaccattcgcattttcgatcgggaagagtacgaaaaggaatgctcctttagtttggtgcttgaggaaccaaaatggattagacgtggtatgaaggggggtttcacaattaccgacgaatacgatgacaaacaaccgctgacaagtaaggaggaggaggagcggaggattgcggagatggggagacccatcttgggcgaacacacaaagttggaggtgatcatcgaagagtcctacgagtttaaatccacagtcgataagctaatcaaaaaaactaatctcgccctcgtggtgggcaccaatagctggagggagcaatttattgaagcgattaccgtatctgcgggcgaagatgacgatgatgatgaatgcggtgaagaaaaactgcctagctgcttcgattacgtcatgcattttctgacagtgttctggaaggtgctgttcgctttcgtgccaccaaccgaatattggaatggatgggcttgctttatcgtttctatcctcatgatcgggctcctcacagccttcattggggatctggcctctcacttcggctgtactatcggactcaaggatagtgtgaccgcagtggtgtttgtggccctcggcactagcgtcccggacacatttgcttccaaagtggccgcaacacaggaccaatacgcagacgccagcatcggcaacgtgaccggaagtaacgcagtgaacgtctttctcggtataggcgttgcctggtcgatcgcggctatctatcatgcggccaatggagaacaatttaaagtaagtcccggcacacttgccttttctgtgaccctcttcacaatttttgcttttattaatgtgggcgtgttactttaccggcgaaggccggaaattggtggcgaattgggcggcccacggaccgccaagttactcacaagttgcctgtttgtgttgctctggttgttgtacatctttttttccagcctcgaagcatactgccatataaaaggcttctag

SEQ ID NO: 135643 - DNA, 2814 bp, synthetic construct
  misc_feature 1..2814: note = Description of Artificial Sequence: Synthetic coding sequence
  source 1..2814: mol_type = other DNA
atgtataatatgagaaggctctcactatctcctactttcagcatgggttttcatttactggttacagtgagtctccttttctcccatgtcgaccacgtgatagcagagacggagatggaaggggagggaaacgaaaccggagagtgtacaggaagttactactgtaagaaaggtgtgattctccctatctgggaacctcaagacccctccttcggcgataagatagctagagccactgtgtattttgttgcgatggtgtacatgttcctcggcgtgtccattattgcggaccgatttatgtcaagcatcgaggtcattacttctcaagagaaggagattacaatcaagaaacctaatggtgaaaccaccaagactacagtgagaatttggaatgagactgtttctaacctgactctgatggctttggggagcagcgcgccagagattctgctgagcgtgatcgaagtctgcggacacaattttacggccggagacctcggtccatctactatcgtggggagtgccgcctttaatatgttcattatcattgctctttgcgtctatgtagtgccggatggggagacacggaagattaagcatttacgggtgttctttgtaaccgctgcctggagcatctttgcctacacttggctttatattatcttgtcagtcatctcacctggcgttgttgaggtgtgggagggactcctaactttctttttctttcccatctgcgtcgtgtttgcttgggtagctgacaggcggttgctgttctacaagtatgtttataagaggtaccgagcgggtaaacagcggggtatgatcatagaacacgagggggatcgacctagctcgaagaccgaaatagagatggacgggaaagttgtcaattctcatgtagagaacttcctagacggggccctggtattggaagtagatgagcgtgatcaggatgacgaggaagccagacgggaaatggcccgcatattgaaggaactgaaacaaaaacatcctgataaggaaatcgaacagctgatcgagcttgccaactaccaagttttatctcagcagcaaaaatctcgcgctttttaccgcatccaggccactagattgatgacaggggccggaaacatccttaaacgccacgctgccgaccaggcgaggaaggctgtgagcatgcacgaggtaaacactgaagtgaccgaaaacgaccccgtgtccaagatcttcttcgaacagggcacatatcagtgcctcgaaaactgcggcaccgtggccctaactatcatccggcgcgggggtgacctgactaacaccgtttttgtcgattttcgcactgaagacgggactgcgaatgcagggagcgattacgagttcaccgagggtacagtggtgttcaagccgggggatactcagaaagagatcagagtcggtattattgatgacgacattttcgaagaggacgagaacttcctcgtccacctctctaatgtgaaagtttcatcagaagccagcgaagacggtatcctcgaagccaaccacgtctccacattagcttgtttgggctcgcctagcaccgccaccgtcaccatcttcgatgatgatcatgctggcatttttacctttgaggagcctgtgacccatgtttccgaatccattggcattatggaagttaaggtccttagaactagcggggctaggggaaacgtgatcgtcccttacaagactatagagggcactgctaggggcggaggggaagacttcgaggatacttgcggagaattggagtttcagaacgacgagatcgtaaagatcattacaataaggatctttgatcgcgaggaatacgagaaggaatgcagctttagcctggtcctggaggagccaaagtggattagacgcggcatgaagggaggatttactattaccgatgaatatgatgacaagcagcctttgacatctaaggaggaggaagaaaggagaattgctgagatggggcgccctatccttggcgagcatacgaaactggaggtgatcatcgaggagagttacgaatttaaatcaaccgttgacaagctcataaagaagacaaacttagccctagtggtgggcactaatagttggagagagcagtttatcgaagctatcaccgtgtccgctggtgaagacgatgatgatgatgagtgcggtgaagagaaactaccaagctgctttgactatgtgatgcactttttgacagtcttctggaaagtgctgtttgctttcgtcccacccaccgagtattggaacggctgggcctgcttcatcgtgtctattctgatgattggactgctgactgccttcatcggagatctagctagccatttcggttgtaccattgggctgaaggacagtgtgaccgcggtcgtgtttgtggccctaggcacaagcgtgcccgacaccttcgcatctaaggtagccgccacccaggaccagtatgctgatgcttctatagggaacgtgacagggtccaacgcggtgaacgtattcctgggaatcggagtggcatggagtatagcggcaatataccacgcggccaacggtgagcagttcaaagtgagtcccggcacactggcatttagcgtgacattgtttacgatcttcgcttttattaacgtcggggtcctgctgtatcggcggagaccagagataggcggtgagctcgggggcccacgtaccgcgaaactcctgacatcctgcttgttcgtgctcctatggctcctgtacatctttttctcctcgctggaggcttattgtcacataaagggattctag

SEQ ID NO: 135644 - DNA, 1995 bp, synthetic construct
  misc_feature 1..1995: note = Description of Artificial Sequence: Synthetic coding sequence
  source 1..1995: mol_type = other DNA
atgagaaggctcagcctttcaccgacattctcaatgggattccacctgctagtcaccgtctctctcctgtttagccacgtcgaccacgttatcgcggagaccgagatggaaggggaagggaacgaaaccggggagtgcactgggagttattattgcaaaaagggcgtgatcctgccgatctgggagccccaggatccatccttcggcgataaaattgcgcgcgccaccgtatatttcgtcgcaatggtgtacatgttcttaggggtgagtattatcgccgaccgatttatgtcttctattgaggtcattacatcacaggagaaggaaatcactatcaaaaaacctaacggggagacgaccaaaacaactgtacgtatatggaacgagaccgtgtccaatttgacactgatggccctcgggagtagcgcacccgaaattttgctgagtgttattgaggtgtgcggacacaactttaccgcgggcgacctgggcccctctactattgtgggaagcgcagcctttaatatgtttatcattatagctctttgcgtttatgtcgtccccgacggtgaaacaaggaaaattaaacacctgagggtgttctttgtcacggctgcttggtcaatcttcgcatacacctggctttacatcatcctgagcgtaatatcccctggagtggtggaggtgtgggaaggtctgctgacgttttttttctttcccatctgtgtagttttcgcatgggttgccgacaggcgactcctgttctataagtatgtgtataagaggtaccgggctggtaaacagcgtggaatgatcattgaacatgagggagataggcctagttccaagaccgagattgagatggatgggaaagtggtcaactcccacgtggagaactttttggacggagccctggtgctggaggtggacgagcgggaccaggatgacgaggaagccagacgcgagatggcccgcatcttgaaagagctgaaacaaaagcaccctgacaaggagatcgagcagttgatcgaactggccaattatcaggtgctgtcccagcagcagaagagtagagcattctatcgaatccaggccaccaggctaatgaccggtgcgggtaacatactgaagcgccacgccgcggaccaggctcgcaaagcagtaagcatgcatgaggtgaatactgaagtaactgaaaacgatccagtatctaaaatttttttcgagcagggaacataccagtgcttggaaaattgtggcacagtggcactgacaattatccgccgaggcggcgatcttaccaataccgtcttcgtggactttagaacagaggatggcacagccaatgcgggctctgactacgaattcaccgaggggaccgtggtgtttaaacctggtgacacccaaaaagaaattagagtcgggattatcgacgacgatatcttcgaggaagacgagaacttccttgtgcacttaagcaatgtgaaggtcagctcagaggctagtgaggacggtatcttagaggctaaccatgtgtcaacattggcttgtttgggcagcccttcgacagcaaccgtcactatctttgacgacgaccatgccggaatattcaccttcgaggagcccgtgactcacgtaagcgagtccataggtattatggaagtgaaagttctccgtactagcggtgcccgagggaacgtcattgtcccctataagaccatagaagggactgcacggggaggcggggaagactttgaagatacgtgtggggaacttgagtttcagaatgacgaaatcgtgaagactatcagcgtcaaagttatagacgatgaagaatatgaaaagaacaagacgttcttcttggagataggcgagcctcggcttgtggagatgtctgaaaagaagggcagaagtcttcccctggaatatctaaccgtgcggaacatgcgaaaatccgcagtgagtccgctctgtctgagaaaccagaatggatag

SEQ ID NO: 135645 - DNA, 2898 bp, synthetic construct
  misc_feature 1..2898: note = Description of Artificial Sequence: Synthetic coding sequence
  source 1..2898: mol_type = other DNA
atgtataatatgaggcgcttgagcttgtcaccaaccttctccatgggctttcacctactggttaccgtgagcctgctgttcagtcatgttgaccatgtaatcgcggagactgaaatggagggggagggcaatgaaaccggggagtgcactgggagttactactgcaaaaagggtgtgatcctgcccatctgggagccccaggaccccagctttggagataaaattgctagagcgactgtgtatttcgtcgcgatggtttacatgtttctgggcgtgtccatcatcgcggatcgttttatgagcagtatagaggttataacttcccaggaaaaagaaatcacaatcaagaagcctaacggagagaccaccaagaccacagttcgtatctggaacgagacggttagcaacctgactctgatggcacttggttcttcagcgcctgagatcctactgagcgtgattgaggtgtgcggtcacaacttcactgccggtgatcttgggccctcaacgattgttggctctgccgctttcaacatgttcataatcatagcactgtgcgtctacgtcgtaccagatggtgaaaccaggaagatcaaacacctcagagttttcttcgtaacggccgcctggagcattttcgcttatacttggctctatataatcctgagcgtcattagccctggtgtggtggaagtctgggaggggcttctgacatttttttttttcccgatctgcgtggtcttcgcttgggtcgctgatcgacgcctgctgttctacaagtatgtctataaaagataccgcgccggcaaacagcggggcatgatcatcgaacacgagggcgatagaccctcgagcaagactgagatagagatggatggcaaagtggttaacagccacgtcgagaactttctcgatggcgcactagtcttagaagtcgatgaaagggaccaggacgacgaggaagcccgccgcgaaatggctcggattctgaaggaattaaagcagaaacatcccgacaaggaaatagagcagctaatcgagctggctaactaccaggtgctgagccaacagcagaagtcgagggctttctatagaatccaggccactagactgatgacaggcgctggtaacatcctgaagcggcacgccgcggaccaagctaggaaagcagtttcgatgcatgaggtaaatactgaagtcacagagaacgacccagtgtcaaagatattcttcgaacaagggacataccagtgtctggagaactgcgggaccgtggcactgaccatcataagacgggggggcgacctgactaacaccgtctttgtagatttcagaacagaagacggtaccgctaatgccggtagcgactatgaatttactgagggaacagtggtattcaaacctggggacacgcaaaaagaaatacgcgtgggtattatcgatgatgatatttttgaagaggatgaaaacttcttggttcacctatctaatgtcaaagtgagcagtgaagcgtccgaagatggtatcctcgaggccaaccatgtgtcaacactcgcttgcctgggaagtcccagtacggctactgtgacaatctttgacgatgaccatgccggtatttttacatttgaggaacctgtaacccacgtgtcggagagtatcgggatcatggaagttaaggtgctgcggacatctggagccaggggtaatgtgatcgtaccatataaaactatcgagggcacagcccgaggcgggggggaagacttcgaagatacatgcggcgaacttgaattccagaacgacgaaatcgtcaaaattatcaccatcaggattttcgaccgggaggagtacgagaaggagtgttcattctccttggtgctggaggagcctaaatggatcaggcgcggtatgaagggggggttcacaatcacgggcaaatacctatttggacagcccgtgtttcggaaggttcacgcacgcgaacatcctatcttatccaccgtgataactatcgcggatgagtatgacgacaaacagccccttacatcgaaggaggaggaggagcggcgcattgcagagatgggccgaccaatcctgggagagcataccaagctcgaagtgataatagaggagagctatgagtttaagtcgacagttgataagctgatcaaaaagaccaacttggccctcgttgtaggcacaaatagctggagggagcaattcattgaggcaattactgtcagcgcgggcgaagacgacgatgacgacgaatgcggcgaggagaagctgccttcatgttttgattatgtcatgcacttcctgactgtgttctggaaggtcctatttgccttcgttccacctacagaatactggaacggctgggcatgcttcatcgtaagtatacttatgatcggactgctgaccgccttcattggcgacctggcttctcatttcgggtgcactattggccttaaggatagtgtcaccgcagttgtgttcgtagccctgggcacttcagtgcccgacacgttcgcatcaaaggtcgctgccactcaggatcagtatgctgatgcgagcattggcaacgtcacggggtctaacgccgtcaacgtgtttcttggtataggcgtcgcatggtccattgccgcaatataccacgccgctaatggcgagcagtttaaagtttcgccaggcactcttgccttttccgtgactctgttcaccatttttgcgtttattaacgtgggcgtcctgctgtacaggcgacgacctgagatcggcggcgagctgggaggcccacgcacagctaaactcctcacgtcatgtctcttcgtgctgctctggctgttgtatatatttttcagtagcttggaggcatactgtcacatcaaaggcttttag

SEQ ID NO: 135646 - DNA, 222 bp, synthetic construct
  misc_feature 1..222: note = Description of Artificial Sequence: Synthetic coding sequence
  source 1..222: mol_type = other DNA
atgtacaacatgagacgactctccttatctcccacttttagcatggggttccacctgcttgtcaccgtctcactgctcttcagccatgttgatcatgttattgctgagaccgagatggaaggagaagggaacgagactggagagtgtaccggctcctactattgtaagaagggagtaatcctgccaatttgggagcctcaggatccatccttcggcgattag

SEQ ID NO: 135647 - DNA, 264 bp, synthetic construct
  misc_feature 1..264: note = Description of Artificial Sequence: Synthetic coding sequence
  source 1..264: mol_type = other DNA
atgtacaacatgcgtcgtctgtcactatcccccaccttcagtatggggtttcatctgctggtgacagtcagcctgctattttcacacgtggaccacgtaattgccgagacggaaatggaaggagagggaaacgaaacaggtgaatgcaccggaagctactactgcaaaaaaggggtaattttgcccatttgggaaccccaggacccatctttcggggataagattgcccgagccacagtgtacttcgtggctatggtctactag

SEQ ID NO: 135648 - DNA, 264 bp, synthetic construct
  misc_feature 1..264: note = Description of Artificial Sequence: Synthetic coding sequence
  source 1..264: mol_type = other DNA
atgtacaacatgcgtagactatcgctcagcccgactttcagcatggggttccatcttttagtgacagtgtccctactgttttctcacgttgaccacgtcatcgccgaaacagagatggagggcgaaggcaatgagaccggggaatgcacgggatcttactactgtaaaaagggagtaatcctgccgatctgggaaccccaggacccgagctttggggacaaaatagccagggcaacagtgtattttgtcgccatggtctactag

SEQ ID NO: 135649 - DNA, 2883 bp, synthetic construct
  misc_feature 1..2883: note = Description of Artificial Sequence: Synthetic coding sequence
  source 1..2883: mol_type = other DNA
atgtataatatgcggcggttaagcctgtccccaacattctccatggggtttcacttactagtcactgtttccctgctgttcagtcatgttgaccatgtgattgcagagaccgaaatggagggcgaaggtaacgagacaggcgagtgtactgggagctattattgcaagaagggagtcatcttgcctatttgggaacctcaggatccttcgtttggcgacaaaattgcgagagccactgtttacttcgttgcaatggtgtacatgtttttaggcgttagtatcattgcagatcgctttatgagcagcatcgaagtgattaccagccaggaaaaggagatcacaatcaagaaacctaacggggagaccacgaagaccacagttagaatctggaatgagaccgtaagtaatctgactctcatggcgctgggcagctcagcccctgagatactgttgagtgtcattgaggtttgcggtcacaatttcaccgccggcgatctcggaccgtcgactattgtgggcagtgccgcctttaatatgtttattattatcgcactttgtgtctatgtggtgccagacggtgagaccaggaagatcaagcacctgcgagttttcttcgttacggccgcctggagtatctttgcgtacacctggctgtatattatcctaagtgtcatatcccccggcgtggtagaggtttgggaaggcctcctgaccttttttttctttcccatctgcgtggttttcgcctgggtagctgatcggagactgctgttctacaagtatgtgtataaacgctatcgagcaggaaagcagcgtgggatgatcatcgaacacgagggcgaccggccgagctccaagacagagatcgagatggacggaaaagtcgtcaactctcacgtcgagaatttcctcgatggagcgctggttctggaggtagacgagcgggaccaggacgatgaggaggccagacgggagatggcacgaatcctgaaagagctgaaacagaaacatccagataaagaaattgagcagctaatcgagctcgcaaattaccaggtcctgtctcagcaacaaaagagccgcgccttctacagaatccaggcaacacgccttatgaccggtgctggcaacatcctgaagagacatgcagccgaccaggctcgcaaggcagtctctatgcacgaagtaaatactgaggtgacagaaaacgacccagtgtcaaaaatcttctttgagcagggtacatatcagtgcttagagaactgtgggacggtggctcttaccattattaggagagggggcgacctgacgaacaccgtgtttgtcgacttccgcactgaagatggcacagctaatgcagggtccgactacgagttcaccgaaggaactgtagtctttaaaccaggcgacactcagaaagagattagggtcggtatcatcgatgatgacatattcgaggaagacgagaactttttggtgcacctgtccaatgttaaagtgagttccgaagcaagcgaggatggaatcttagaggccaaccacgtaagcaccctggcctgcctggggtctccatctactgctacagttactatcttcgacgacgaccacgccggtatctttacgtttgaggagcctgtaactcatgtctcagagagtattggaattatggaagtcaaggtactcaggaccagtggggctcgaggaaacgttattgtcccttataagacaattgagggtaccgccagaggtgggggtgaggattttgaggatacttgtggagagctcgagttccagaatgatgaaatcgtaaagataattactatccgtatcttcgaccgggaagagtacgagaaggaatgcagcttctcactggtccttgaggaaccgaagtggatccggagaggaatgaaagaaggattctggctgtcctctcagcctgtgtttagaaaagtccacgcgagagaacacccaatcctgtctacagtcatcactatcgcagacgagtacgacgacaaacagcccctcacatctaaagaagaggaagagagaaggatcgccgagatggggaggccaatcctgggggagcatacaaagcttgaggtgattattgaggagagttatgaattcaaaagtacagtggacaagcttatcaagaagactaaccttgcactggtggtaggcactaacagctggagggagcaattcatagaggctatcactgtgtctgctggggaagatgatgacgacgacgaatgtggagaagagaagctgccctcttgttttgattacgtaatgcactttcttacagttttttggaaggtcttattcgcctttgttccccctaccgagtactggaacggctgggcatgcttcatcgtatccatattgatgataggcctgctaactgctttcatcggtgaccttgcgtcccattttggctgtactatcgggctcaaagacagcgtgactgctgtagtcttcgtggcactgggaacgagcgtgcctgacacttttgcttcaaaggtggccgccacccaggaccagtacgcagatgcaagtataggcaatgtaaccggaagcaatgccgtcaatgtgtttctgggcatcggggtggcttggtcgattgccgctatttaccatgccgctaacggcgaacagtttaaggtttctcctggaactctcgccttcagcgtgactttgtttacaattttcgcttttataaatgtaggagtactcctgtatcgaaggagacctgagatcggaggcgaattgggagggccacggacagccaagcttttaaccagctgtctgtttgtacttttatggctcctctatatttttttttcttccctggaggcatactgtcacattaagggattctag

SEQ ID NO: 135650 - DNA, 2814 bp, synthetic construct
  misc_feature 1..2814: note = Description of Artificial Sequence: Synthetic coding sequence
  source 1..2814: mol_type = other DNA
atgtacaacatgcgtcgattgagtttgtctccaactttcagtatgggcttccaccttctggtaacagtgtccctgttgttttcacatgtggaccacgtgatcgccgaaacagaaatggaaggcgaggggaatgagaccggcgaatgtaccggcagctattactgcaagaaaggtgttattctccccatctgggagccccaagacccgtctttcggtgataaaatcgcccgagccacggtttatttcgtggccatggtctatatgttcctgggcgtctctattatcgctgacaggtttatgtcgtccatcgaggtgatcacatcccaggagaaggaaatcaccataaagaaacccaacggcgaaaccactaagacgactgtgcggatttggaacgagacagtcagtaacctgaccttgatggcactgggatcctcagccccagaaatcctcctgagtgtcatcgaagtgtgcggacacaatttcacagccggcgatctgggcccatctaccatcgttggttcagctgctttcaacatgttcataataatagccctttgcgtgtacgtcgtgccagacggcgagacacggaagatcaaacaccttagggtcttctttgtgactgcagcatggtcaatttttgcttatacttggttatacataatcctgtcagtcatttcacccggagtggtcgaagtgtgggaaggcttgctaacctttttcttctttccaatctgcgtggtcttcgcatgggtggcagacaggaggctgctgttctacaaatacgtgtataagcgctacagagcaggcaagcagcgcggtatgattattgagcacgaaggcgaccgcccatcttcaaagaccgaaattgagatggatggaaaggtcgtgaactctcacgtggagaatttcctcgatggcgcgctggtcctagaggtggacgagagggaccaagatgacgaggaggctcgtcgggagatggccagaattcttaaggagctgaaacagaaacacccagataaagagattgagcagctcatagagctcgcgaactatcaggtgctgtcacagcagcaaaaaagtagggcgttctataggatccaggccacaaggctcatgactggtgccgggaacatcttgaagagacacgcagccgaccaggcccgtaaagctgtatctatgcatgaggttaatacggaggtgacagagaatgacccagttagcaagatcttcttcgagcaaggtacttatcagtgtctcgagaactgcggaaccgtggctctcacaatcattagaagggggggcgatctgacaaatacggttttcgtcgattttaggactgaggacggtacggctaacgcaggatccgattacgaattcacagaggggacagtcgtgttcaagcccggcgatacacagaaggagatccgggtaggaataattgacgacgacatcttcgaagaagacgaaaattttcttgttcacctgagcaatgtgaaggtgagttctgaagcatctgaggatggcattttggaagctaaccacgtgagcaccctcgcttgcctggggtctccctcaactgctacagtaaccatcttcgatgatgatcacgccggcatattcacgtttgaagaaccagtgactcacgtgtctgaaagtattggaatcatggaagtgaaggtactcaggacctcaggtgcccggggaaacgtcatcgttccatataaaacaattgagggcactgcaaggggcggcggcgaagatttcgaggacacatgcggggaacttgaattccaaaacgacgagattgtcaaaatcattaccatcagaatttttgacagggaagagtatgagaaggaatgcagcttctccctcgtgttggaggaacctaaatggatccgaaggggtatgaaggaggggttctgttttacggatgagtatgatgataagcaacccctcacttctaaggaggaggaagaaaggaggatcgcagagatgggccgccccatcctgggcgaacacaccaagttggaggtcatcatcgaagagagctacgagtttaaatccaccgtggataaactcatcaagaagactaacctggccctcgttgttggtaccaatagctggcgggaacagttcattgaggcaatcacagtctccgcgggtgaggacgacgatgacgacgagtgtggtgaggaaaaactgccctcgtgctttgactacgtgatgcattttctgaccgtgttctggaaggtgctgttcgcatttgttcctcctacagaatattggaatggatgggcatgcttcattgtgagcatcctgatgattggcctgttgaccgcatttattggagatttagcatcacatttcggatgtacaataggccttaaagattcagttactgcagttgtgtttgtagcgctagggaccagcgtcccagacacgtttgcaagcaaagtggccgccactcaggatcagtacgctgatgcttccatagggaacgtaacaggttcaaatgccgtgaatgtgttccttgggattggcgtggcgtggagcatagcggccatttaccatgctgcaaatggggaacaattcaaagtcagccccggaaccctggcattctcagttaccctgtttactatcttcgcgttcattaatgtgggcgtgctactgtatcggcgaaggccggagattgggggggaactgggcggacctagaacagcgaaactcttgacctcatgtctgtttgttttactgtggctgctgtacatctttttctcctctctcgaagcatactgtcacataaagggtttttag

SEQ ID NO: 135651 - DNA, 417 bp, synthetic construct
  misc_feature 1..417: note = Description of Artificial Sequence: Synthetic coding sequence
  source 1..417: mol_type = other DNA
atgtacaacatgaggagactgtccttgtccccaacgttctccatgggcttccacttgcttgtcactgtgtcactgctcttttcacatgtggatcatgttattgctgaaaccgaaatggagggagaaggaaatgagacgggcgagtgcaccgggtcctattattgtaagaagggggttattctgccaatatgggagccacaagacccttcttttggcgataagatcgcccgcgccactgtgtactttgtggctatggtgtatatgttcctcggggtgagcattatcgccgaccggttcatgagtagtatcgaggttatcacttctcaggagaaggaaattaccattaagaagcctaatggggaaactaccaaaactactgttcgaatttggaacgaaacagtaagtaacctgacctag

SEQ ID NO: 135652 - DNA, 2907 bp, synthetic construct
  misc_feature 1..2907: note = Description of Artificial Sequence: Synthetic coding sequence
  source 1..2907: mol_type = other DNA
atgtacaacatgaggaggctcagcctttccccaaccttttcaatgggtttccatctactggtaacagtgagcctgctgttctctcatgtcgatcatgtcatcgctgagactgagatggagggtgaaggtaatgaaacaggagagtgtacaggaagctactactgcaagaagggtgttatcctgcctatatgggagccgcaggaccctagttttggtgacaaaattgctcgcgctaccgtgtactttgtagccatggtttatatgtttctgggagtctctattatcgcggacagattcatgtctagtatcgaggtcataactagccaggagaaggagatcacaatcaagaagccgaacggggaaacaactaagaccacggttcggatttggaatgagacagttagcaacttgactctgatggcgctggggtcaagcgcccctgaaatcttgttgagcgttatcgaggtatgcgggcataactttacggccggagatctggggccgagcaccatagttggatcagcggccttcaacatgtttataatcatcgcgctttgtgtgtacgtggttcctgatggggaaacaagaaagatcaaacatctgcgcgtgttcttcgtgaccgccgcttggtcaattttcgcctacacctggctgtatatcatactcagcgtgattagccctggagtggttgaagtgtgggagggcctattaacattcttctttttccccatatgtgtcgtgtttgcatgggtagccgaccgccgcctcctgttttataagtacgtctataagcgctaccgggccggcaagcaacgaggcatgatcatcgagcatgagggagatcgcccctcctcaaagacagagattgaaatggatggtaaggtggttaatagccacgtcgaaaacttcctggatggagctctggttctggaagttgacgagcgggaccaggatgacgaggaagcccgtagggagatggctcggatcttgaaagagttaaaacaaaaacaccctgacaaggaaatcgagcagttgatagagctcgccaattaccaagtcctgagccagcaacagaagtcccgggccttctaccgcatccaggcaacgcggctgatgacaggggcaggcaatatccttaaaaggcacgcggcagaccaggcccggaaggccgtgagcatgcatgaggtcaacacggaagtcaccgagaacgatcctgttagcaagatcttcttcgagcagggcacttatcagtgtcttgaaaattgcggcactgtggctttgacaattattcgcaggggtggagacctgaccaacacagtttttgtcgattttcggacagaggatggcacagccaatgccgggagtgattatgaatttactgaggggaccgttgtctttaaacccggcgatacccagaaagaaattagagtggggatcattgatgacgatatcttcgaggaggacgagaactttctggtacatctctccaatgttaaggtgtcatccgaagctagcgaggatggaattcttgaggctaaccatgtgagcactctagcctgcctgggaagcccatctacagccactgtgaccatttttgatgatgaccacgcagggatctttacattcgaggaaccagtcacacatgtatcggaatcaattgggattatggaggtgaaggtcttacggacttcaggcgcgcggggaaacgtcattgtaccttataagactatagagggtactgctcgagggggaggcgaggacttcgaggacacatgcggcgagctggaatttcagaacgatgagatcgtcaaaacaatatccgtcaaagtaattgacgatgaggagtatgagaagaacaaaacctttttcctggagattggagagccaaggcttgtggaaatgagcgagaagaaagcgctgctgctgaacgagctcggaggctttacgatcactggccagcccgtgttccgcaaggtccatgcccgggaacaccccatccttagcacggtcataacaattgctgacgaatatgatgataagcaaccactaacgtctaaggaggaggaggagaggcggatcgccgaaatggggagacctatcttaggcgagcatactaagttggaagtgattatcgaagagtcctatgagttcaaatctaccgtggacaagctgattaagaagacaaacctggctcttgtcgtgggaaccaattcttggcgggagcaattcattgaggctattacagtgtctgctggcgaagatgatgatgacgacgagtgcggagaggagaaacttccttcttgcttcgactatgtcatgcactttctcacagtgttctggaaagtgttgtttgcatttgtcccacccactgaatattggaacggctgggcatgttttattgtctccattctgatgatcggtttgctgactgcgttcatcggggaccttgccagccactttggctgcaccatcggattaaaggatagcgtaactgctgtggtttttgtcgcgctcggcaccagcgttcctgatacctttgcatcaaaagttgctgctacccaggaccaatatgccgatgcatctatcggtaacgttaccgggagtaacgcagtgaacgtgttcctgggcattggggtggcttggagcattgccgccatataccatgccgcaaacggcgaacagttcaaggtgagccccggtacattagcctttagcgtcaccctgttcactatattcgccttcattaacgtcggagtcctgctgtacaggcgccggccagaaataggtggggagctgggcggccccagaactgcgaaactgctaacctcctgcttattcgtgttgttatggctactgtatattttcttctcgtccctggaggcttactgccatattaagggattctag

SEQ ID NO: 135653 - DNA, 2766 bp, synthetic construct
  misc_feature 1..2766: note = Description of Artificial Sequence: Synthetic coding sequence
  source 1..2766: mol_type = other DNA
atggctccactggcgctcgtcggcgttaccctgctgcttgctgcaccaccttgctctggagccgcaacacccactcccagcctgcctccaccacccgccaatgacagtgatacaagcaccggaggatgtcaagggtcttaccgctgtcaacccggtgtgttactgcctgtgtgggaacccgacgatccatccctgggcgataaagccgctcgggctgtagtgtatttcgtagccatggtctacatgttcctaggcgtatctatcatcgctgaccgctttatggcggccattgaggtgatcacatccaaagagaaagagattactatcaccaaagccaatggagaaacctcagtgggcaccgtgcgcatttggaatgagactgtgagtaaccttactcttatggcactcgggtccagcgcccccgaaattttactcagtgtgatcgaagtctgtggacacaactttcaggcaggcgagctgggcccaggcaccatcgttggaagtgccgcttttaacatgttcgtggttattgccgtgtgtatctatgttatcccagccggcgagtctaggaagatcaaacacctgcgagttttcttcgtaactgcttcttggtccatttttgcctacgtgtggctgtacctcatcctagcggtcttcagtcctggtgttgtccaggtgtgggaagctttgctcaccctagttttttttcccgtctgtgtggtgtttgcctggatggctgataagcgcctgcttttctataagtatgtctacaagcgatatagaaccgatccccgctcaggcatcattatcggcgccgaaggcgatcctcccaagtcaattgaactcgacgggaccttcgtgggtgctgaagcacccggtgagctgggggggctggggcccgggcctgccgaagcgagagagcttgatgcgtcacgccgcgaagtgattcagatcttgaaagatcttaagcagaaacatcccgacaaggacctagagcaactggtggggattgcaaattactacgcactcctccatcagcagaagtccagggctttctaccggatccaggctacgaggctaatgacaggcgctgggaatgtgctgcgcaggcacgccgctgacgcttcccgacgtgcggcgcctgctgaaggagctggggaagacgaagatgatggcgcatctagaatcttttttgagccatccctgtaccattgcctggaaaactgtggttcagtccttctctcggtcacttgtcagggcggggagggcaacagcacattttacgtcgattacaggacagaggatgggtccgccaaagcagggtcggactacgagtactctgaaggtacacttgtgttcaaaccaggcgaaacacagaaggaactgaggattgggattatcgatgacgatatctttgaggaggacgagcacttcttcgtgagactgctcaatctccgggtaggggacgcccagggaatgttcgaacctgacggcggaggccgccccaagggcagattggtcgcaccactgttggctactgtgaccatactcgatgatgaccacgctggtatcttcagttttcaggatcgcctcctacatgtttccgaatgcatggggacggttgatgtgagggtcgtgagatctagcggcgcacgaggcactgtccgcctgccctatagaacagtggatggcacagcaagaggaggcggggtccactacgaggatgcctgcggcgagctggaattcggggatgacgaaacgatgaagacattgcaagtcaaaatcgtggacgatgaagaatatgaaaagaaagataatttcttcattgagttgggtcagcctcagtggctcaagagaggcatctccgctctcctccttaatcagggcgatggagataggaaactcacagccgaggaagaggaagcacggcggatcgcagaaatgggaaaaccagtgcttggcgagaattgccgactcgaggttatcatcgaagaaagctatgattttaaaaataccgtggacaagttaatcaagaaaacaaaccttgcactggtgatcgggacacactcatggcgggagcagtttctggaagcgataactgtctccgcaggcgacgaagaggaggaggaagacggcagccgagaggaacggctgccatcttgtttcgattatgtcatgcactttctgaccgtgttttggaaggttttatttgcatgcgtgcctcctacagaatattgtcatggatgggcatgtttcggagtctctatcctggtgatcggactcctgacagccctgattggggatctggcctcccattttggatgcacggtgggcttgaaggatagcgtgaacgctgttgttttcgttgcactggggacatcaatacccgatacatttgcctccaaagtggccgcattgcaggatcagtgcgcagacgcttccatcggcaacgtgacagggagcaacgcagtcaatgttttcttggggttaggagtggcctggagcgtggcagccgtgtactgggccgtgcagggcaggccttttgaagtgcgaacagggacacttgcattctctgtgactctgtttacagtctttgctttcgtggggatcgctgtgctgctgtaccgtaggcgccctcacataggcggagaactcgggggtcctagaggccccaagttagctactactgcgctatttctaggactgtggctactctatattctcttcgccagtctggaggcatattgccacattcgcggcttctag

SEQ ID NO: 135654 - DNA, 2478 bp, synthetic construct
  misc_feature 1..2478: note = Description of Artificial Sequence: Synthetic coding sequence
  source 1..2478: mol_type = other DNA
atgttcgtcgtgattgctgtctgcatctatgttattcccgccggagaatccaggaagatcaagcatctcagagtcttctttgttaccgctagctggagtatctttgcctatgtgtggctgtacttgatactggcagtgttcagtcctggggtggtgcaggtgtgggaggctttgctgacactggtcttcttcccagtgtgcgtggtatttgcatggatggctgacaaaaggttactgttttacaagtacgtttacaagcggtaccgcactgaccccagatctggaatcatcataggtgctgaaggggaccccccaaaatcaatcgaattagatggaacctttgtaggtgcagaagcgcctggagaattaggaggcctcggtccgggacccgctgaagcaagggaactagatgcttcacgccgggaggttatccagatattgaaagacttgaaacaaaagcatcccgataaggaccttgagcagttagtgggcatcgcaaattactatgcactactgcatcagcagaagagcagggctttctaccgaatacaggccactaggctcatgactggcgccggaaacgtgctgcgccggcatgctgcggatgccagtcggagagctgcacctgccgagggcgcaggggaggacgaagatgatggtgcatcaagaattttctttgaaccttccctctatcattgcctggagaattgcggatcagtgctcttgtcagtgacatgccagggcggggagggaaacagcaccttttacgtcgattacaggacggaagacggctctgcgaaagctggcagtgactatgaatacagcgagggaactcttgtgttcaaacctggagagactcagaaagaactgcgcattggtataatcgacgatgatatcttcgaagaggatgaacatttcttcgtgaggctcctgaatctgagagtgggggatgcccaaggaatgttcgagcccgatggaggggggcgccccaaaggccggttggtcgcacccctcctcgctactgtgactatactcgacgatgaccatgccgggattttctcctttcaggacagacttcttcacgtgtccgaatgcatgggtactgtggacgttcgtgtggtccgcagcagtggtgcgcgcggtactgtgcgccttccctaccgcactgttgacggtaccgcacgggggggcggggtgcactacgaagacgcatgtggggaactggagtttggtgatgacgagacaatgaaaactttgcaggtgaagatcgtcgacgacgaggagtatgaaaaaaaggataatttctttatcgagttaggacagccccagtggctgaaacggggcatttctgccctgctccttaatcagggcgatggtgatcgcaagcttactgctgaggaagaggaggcccgtagaattgcagagatggggaagcctgtactgggggagaattgcaggttggaggtcattatcgaggagtcctacgatttcaagaacacggtggataagctaataaagaagacgaacctggcattggtcattgggacacatagttggcgggagcagtttctcgaggcaatcactgtgtctgcaggggatgaagaagaagaggaagacgggtctcgggaggagcgactccctagctgttttgactatgtgatgcactttctcactgtcttctggaaggtactgttcgcatgtgtgccgcctacggaatattgccatggatgggcttgctttggagtcagcatactagttattggccttctaactgctctgatcggagacttagcatcacacttcgggtgtactgtagggctgaaggatagcgtgaacgctgtggtttttgtggccctcggtacaagtatccctggtaacaccctcggagatttcggcggtgtgggatctcagatgagccaggccggggccacccaggacccagctaaaatgcggcatgtgcgacagcaaggcgggggggcagcggggccagtcagacgtcgcgtccacagacagagggaccgactacaacgcggcgaaagagtgccctggccaggcaggcggcttgtctgtggccggagagtgctgggcggagccgggcctccactgcggggagctcattggcatgcaggcctgttaagacacgccctccaccgactcagactacgtggacactgccgagccgccgttcccgcacccgctgctcacaggcggagagctggacgaccagcaagaacccaggctcggcaccacagggccttgccggggccattagcaccagttcatcctttgcgacagcccggcggggtgctgccacatccaggtctccttggtcctcgagctgagactagaccccataggcctcccggagccagggacagtgcagctccagcattaggcccttggagcccctttccaccaagactgggattgctttcatgggatagcgcaagcctgttgagaccgctcccctggctgtag

SEQ ID NO: 135655 - DNA, 1155 bp, synthetic construct
  misc_feature 1..1155: note = Description of Artificial Sequence: Synthetic coding sequence
  source 1..1155: mol_type = other DNA
atgggcactgtcgacgtcagagtcgtgagaagctccggtgcacgggggacggtccgcctgccctacagaactgtcgatggaactgcccgggggggaggagttcattatgaggatgcttgcggcgagctggaatttggggacgacgagactatgaaaacattgcaggtgaagatagtggacgatgaggaatacgaaaaaaaggacaatttttttatagagctgggacagccacaatggctgaagcgagggatctcggctcttctgctgaaccaaggcgatggtgacaggaagctcaccgcggaagaagaggaggccagaaggattgctgagatgggcaagcccgtactcggcgagaattgcaggctcgaagttattattgaagagagttacgacttcaagaacacagtcgataaattaattaagaaaacaaacctcgcccttgtgatcggcactcatagctggcgggaacagttcctggaggctataacggtgagtgccggcgatgaggaagaagaggaagacggttcccgcgaggagcggctccccagttgtttcgactatgtgatgcatttcctgactgtgttttggaaggtcctgttcgcgtgtgttcctccaaccgaatactgtcatggatgggcatgctttggggtgagtatacttgtgatcggcttgctaaccgcattaatcggggacctcgcgtcccattttggatgtacagtaggcttaaaagattccgttaacgccgttgtgttcgttgccttagggacctcaatcccagacacatttgcctccaaggtggccgccctgcaggaccagtgcgccgatgcttccatcggcaacgtgaccggatccaatgccgtgaatgtctttctgggactgggcgttgcatggagcgtagcagcagtgtactgggccgtacagggacggccattcgaagttcgtaccggaacactggcctttagtgttacactgttcacagtcttcgccttcgtgggcatagcagtgctcctctatcggcgaaggcctcacattggaggagagcttggcgggccccggggccctaaactcgccaccactgccctgttcttgggactgtggctgctgtatatactgttcgcaagcctggaggcttactgccacatcaggggcttttag

SEQ ID NO: 135656 - DNA, 2034 bp, synthetic construct
  misc_feature 1..2034: note = Description of Artificial Sequence: Synthetic coding sequence
  source 1..2034: mol_type = other DNA
atggcagataaaaggctgcttttttataaatatgtgtacaagaggtaccggaccgaccctcgttccggcatcatcattggtgctgagggggacccccctaagtcgatcgaattagatggtacgttcgtgggagcagaagcgcctggtgaacttgggggactcgggcccggccctgccgaagctagggaattggatgcgagcagacgggaagtgattcagatcctaaaagatttgaagcagaaacacccggataaggacctagaacagctggtgggtattgccaattactacgccctactgcaccagcagaagtcgagagccttttatcgcattcaggcaacacggcttatgacgggagctggcaacgtgttgagacgacacgctgctgatgcatcgagacgagccgcccctgccgagggggccggagaagacgaagatgatggggcctcccgcattttttttgaacccagtctctaccactgtctggagaattgtggaagtgtactgctttcagtcacgtgccagggcggggagggcaactctaccttttatgtcgactatcgcaccgaagacggaagcgccaaagccggaagtgactatgagtattccgaaggaactctggtatttaaacctggagagacacagaaagagctcaggataggcataatcgacgacgatatttttgaagaggatgagcactttttcgtgcgcctgttgaacctgcgcgttggggacgctcagggtatgttcgagcccgatggaggaggtagacctaaaggaaggttggtcgcacctctcctggctacggtgacaatcttagatgacgaccatgccggcattttctcatttcaagaccgtctactgcatgtgagcgagtgcatgggcaccgtggacgttcgcgtagtcagatcatctggtgcacgaggtacagtgagactgccatacaggacagttgacggaactgctcgcggcggtggtgtgcattacgaggatgcgtgcggcgaacttgagttcggcgacgacgagaccatgaagactctccaggtaaagattgtggacgacgaggagtatgaaaaaaaggacaatttcttcatcgagttagggcagcctcagtggttgaagagaggaattagcgccttgttgctaaaccagggggacggtgaccgtaaactgaccgcagaggaggaggaggccaggcggatagcagaaatgggcaagccagtgctgggtgagaactgccgacttgaagtgataattgaggagtcctacgatttcaaaaatacagtagacaagctcatcaagaagaccaatctagccctggtcattgggactcattcttggagggagcagttccttgaagcaatcacagtaagcgcaggagacgaagaagaagaggaagatgggtccagggaagaacggttgcccagttgtttcgactatgtgatgcactttctgacagtattctggaaggtgttatttgcctgcgtgcccccaactgagtattgtcacggatgggcgtgtttcggtgtgtctattctggtcatcggcctcttaacagctcttatcggggatctggcttcccactttggctgtaccgtggggctgaaggacagcgtgaatgcagtcgtttttgtggcacttggaactagcatccctgatacatttgcctcgaaagtcgcagcgctgcaagaccagtgtgccgacgcatctattggcaacgtcacaggttcgaatgcagtgaacgtatttctgggactaggcgtggcttggtcagtcgccgcggtatactgggctgtccagggccggccatttgaggtgagaaccggcacactggccttctccgttactttgttcaccgtgttcgctttcgtagggattgctgtcctactgtaccggagacggcctcacatcggtggcgagttgggtggaccaagagggcctaaactggccacaactgcactgttcctgggtctgtggctattgtatatcctcttcgcttccctagaggcttattgccatattcggggattttag

SEQ ID NO: 135657 - DNA, 2448 bp, synthetic construct
  misc_feature 1..2448: note = Description of Artificial Sequence: Synthetic coding sequence
  source 1..2448: mol_type = other DNA
atggtactgcggagcggcatatgcggtttgagcccacatcgcatctttcctagtttactcgtggtcgttgcgctggtcggccttcttccagtgctccgatctcacggcctgcagctctcccctactgcatctaccattcggagcagtgaacctcctagagaacggtctataggcgacgtgacaaccgccccaccagaggtgactcccgagtcccgccctgtgaatcattcagtcaccgatcatggcatgaagccacgcaaagccttccccgtcctggggattgactacacccacgtcagaactccatttgagattagtttatggatactacttgcctgcctcatgaagataggctttcacgtcattccgactatcagttcaatagtgcccgagtcatgtctgttgatcgttgtgggccttcttgttggtggactgataaagggtgtgggagaaacccctcccttcctccagagcgatgtgttctttctgtttctgctcccccctatcattttagacgctgggtacttccttccattgaggcagtttacagagaaccttggaacaattctgatctttgctgtggttggaaccctctggaatgcattttttctgggcggactaatgtacgccgtctgtcttgtgggtggagagcagattaataatatcggccttctcgataacttgttgtttggaagtattatctccgctgtcgatcccgttgcagtgcttgcagttttcgaagagattcacatcaatgagctcctccacatattggtgtttggtgagtccttactgaatgacgccgtcaccgtggtcctctatcatctgttcgaggagttcgctaactatgaacatgtcgggattgtggacatctttctgggttttctctctttctttgtggtggccttggggggcgtgctggttggcgttgtttatggtgtcattgccgcatttacttcaagattcacatcacacatccgagttatcgagccactgtttgtcttcctctattcctacatggcttacctgtcagccgaattattccatctgagcggcattatggcccttatcgctagcggagttgtaatgcggccttacgtggaggccaatattagtcacaagtcccacacaacaattaagtacttcctaaagatgtggagctctgtgtccgaaaccttgatctttattttccttggggtttctaccgtagccggtagccaccattggaactggactttcgtgatctccacgttgttattttgtctgatagcccgcgttttgggggtcctgggccttacatggttcattaacaagttccggatcgtaaaacttacaccaaaggaccaatttatcatcgcctacggaggattgagaggcgcgatcgcgttcagccttgggtatctgctggataaaaagcactttcctatgtgcgacctcttcttgaccgcgatcataacggtcatctttttcacagtgtttgtgcagggcatgactatcagacctctggtggatctgctagcagtgaaaaagaagcaggagaccaaacgctccattaatgaagagatccacacgcagtttctcgaccatctgttgacgggaatagaggacatttgtggacactacggacaccaccactggaaagataagctgaatcgatttaacaagaaatacgtcaagaagtgccttatcgctggggaacggtcgaaggaacctcagctgattgccttctatcacaagatggagatgaagcaagccattgaacttgtcgagtccgggggaatgggcaaaatcccctcagctgtgagcacagtgtctatgcagaatattcatccaaaaagtctgcccagcgagcgaatcctaccagctctgagtaaggacaaggaagaggaaattaggaagatactccgaaacaaccttcagaaaactcggcagcgtcttaggagttacaaccgtcacaccttagtcgccgatccttacgaggaggcctggaatcaaatgcttttgaggcgccagaaggcaaggcagctcgagcaaaagatcaataactatttaactgtgccagcgcacaaattggactcacccacaatgagtagggctcgtattggatccgatccgctggcctacgaacctaaagaggatctcccagtcatcacaatcgatcctgcgtcaccgcagtctcctgaatctgtcgatttggtaaatgaggaactgaagggcaaggtcctggggctctcacgcgatccagcaaaggtggccgaggaagatgaagatgacgatggtgggattatgatgagatcaaaagagaccagctcccccggtactgatgatgtgttcacccctgctccctccgattcccccagttcccaacgcatccagagatgtctgtccgatcccgggccacacccagaaccgggcgagggtgagccatttttccccaaaggccagtag

SEQ ID NO: 135658 - DNA, 408 bp, synthetic construct
  misc_feature 1..408: note = Description of Artificial Sequence: Synthetic coding sequence
  source 1..408: mol_type = other DNA
atggtcttgcggagtggtatctgcgggctgtctcctcatagaattttcccttccctcctggtggtggtggctttggtggggctcctaccagtcttaagatctcatggtctacagctgtcacccacagcctctaccattcggagttcggaaccgcccagagaacgttctattggagacgtgaccacagccccacccgaggttacccctgaatctcgccccgtgaaccactccgtcacagaccacggaatgaaacctcgtaaggcctttcccgtccttggaattgactacacccacgtccgtactcccttcgagatcagtctttggattctgctcgcatgtctcatgaagatcggctttccatgcgacccccactacttgaaacaccgccccggagaactgccagcctag

SEQ ID NO: 135659 - DNA, 1668 bp, synthetic construct
  misc_feature 1..1668: note = Description of Artificial Sequence: Synthetic coding sequence
  source 1..1668: mol_type = other DNA
atggtgctgagatccggcatttgcggactgtctcctcaccgaatttttcccagcctgctggtggtagttgcactggtggggctgttacccgtgcttagaagccacggcctgcaattatcacccacagcctccactattcgaagttccgaacccccacgcgagcgtagcattggagatgtgaccacggctcccccagaagtgactccggaatcgcgcccggtaaaccattccgttaccgaccacggcatgaaacctaggaaagctttcccagtacttgggatcgactatactcacgttcggacacctttcgagatcagtctgtggatactcctcgcttgcttgatgaagattggctttcatgtaatacccactatttcctccatcgtgcccgaaagctgccttctaattgtcgtggggctgttggttggaggccttatcaaaggggtaggagaaaccccacccttcttacagtcagacgtgttcttcctgttcttgctcccaccaatcatcctagatgccggctactttcttccattgaggcaattcacggagaatttggggaccatactgattttcgctgtggtgggcacactttggaacgcatttttcctgggtggactgatgtatgcagtttgcctcgtggggggcgaacagataaataacattggacttctggacaacctcctgttcgggtcaataatctcagcggtcgaccctgtcgccgtactcgctgtgtttgaggaaatacacatcaacgaactcctgcacatcctggtttttggagagagcctgcttaatgatgccgtaactgtggtcctctaccacctgttcgaagagtttgctaattatgaacacgtggggattgtcgacatctttcttggattcctctcctttttcgtcgtcgcacttggcggcgtcctggtcggagtggtgtatggggttattgcagcgttcacaagccgctttacctcgcacatccgcgtgattgaacccctcttcgtattcttgtacagctatatggcctacctgagcgctgagctgtttcacctgtcaggcatcatggcacttatagccagcggtgtggttatgagaccttacgtggaggcaaacatctcacacaaatcccacactaccatcaaatactttctgaagatgtggagctctgtgtccgagacactgatttttattttcctcggcgtgtctactgtagccgggagccaccactggaattggacattcgtgattagcaccttactgttttgcctcattgctagggtactgggagtactcggcttaacatggtttatcaataagtttcggatcgtgaagctcactcctaaagaccagttcataatcgcttatggcggtcttcggggagctatcgctttcagcctaggctatttgcttgataaaaaacactttcccatgtgcgacttgttcctgaccgcgataatcacagtgatcttctttaccgttttcgttcaggtgctgggtcaaggccgagctggcccatgccttggggatccccatagactgttcccctggaaagaaaggaaggcgtgtgacctgaagtgcgattcctctccgagctcgacaaccaatctgctgtgtgacctggggagagccacccccccattttgggcctcagtgtccagcatagtgaagtag

SEQ ID NO: 135660 - DNA, 960 bp, synthetic construct
  misc_feature 1..960: note = Description of Artificial Sequence: Synthetic coding sequence
  source 1..960: mol_type = other DNA
atgaccatccgccccctcgtcgatctgttggcggtgaaaaagaaacaagagacaaagaggtcaatcaacgaagagatccacacccaattcttggatcacttattaacaggcattgaagatatatgtggacactacgggcaccaccactggaaagacaaactgaatagattcaataaaaagtacgtaaagaaatgtctcattgcaggcgaacgttctaaggaaccacagcttatcgccttttatcacaaaatggaaatgaaacaggcaatcgagcttgtggaatcaggaggcatggggaagattcccagcgccgtaagcactgtgtctatgcagaatatacaccctaagtcactgccctccgagagaatacttccggctcttagtaaggacaaagaggaggagatcagaaagatcctaaggaataacctgcagaaaaccaggcagcgccttaggagctacaaccgtcacaccttagtggccgatccctacgaagaggcttggaaccaaatgcttcttcgcaggcagaaagcccggcagctggaacagaagatcaataattacttgactgttcccgcccacaagttagactctcccacaatgagtcgcgcccgcattggcagtgaccctcttgcatacgaaccgaaagaagacttgcccgtcattacaatcgaccccgcctcacctcaaagcccagagtctgtggacctggtcaatgaggaactgaaagggaaggttctaggcctgtctagagatcccgccaaggtagccgaggaggatgaggacgatgatggcggtatcatgatgcgcagcaaagagacctcctctcccggaactgatgacgtgtttaccccagcccctagtgactcccctagctcccaacgcatccagcgctgcctcagtgaccctggcccccaccctgagcccggagagggtgagcctttcttccctaaaggccagtag

SEQ ID NO: 135661 - DNA, 675 bp, synthetic construct
  misc_feature 1..675: note = Description of Artificial Sequence: Synthetic coding sequence
  source 1..675: mol_type = other DNA
atggagatgaagcaggcaatcgaactagtggagagtggagggatgggaaaaattcccagcgcagtatctactgttagtatgcaaaacatacatccaaagtctctgccctccgagaggatacttcccgcgctttccaaggacaaggaagaggagataagaaagattttacgaaataaccttcaaaagacgaggcagcggctgagatcttacaatcgccacacactggtagccgatccttacgaagaagcctggaaccagatgcttcttaggcgccagaaggcacggcagctggagcagaagattaacaattacctgactgtgccggctcataagttggactcccccaccatgtctagggccaggattgggtctgacccacttgcctatgagcccaaggaggacctgccagtgatcaccattgacccagcctcaccacagtcaccggaatccgtggatctcgtgaatgaggagctcaagggtaaagtgcttgggctatcccgcgacccagctaaggtggctgaagaggacgaagatgatgatggaggcattatgatgaggtccaaggagaccagcagtccaggtactgatgatgtgttcacacccgctccttccgactcaccgtctagccagcggattcagcgttgcctgagcgaccctggtccacaccccgaatag

SEQ ID NO: 135662 - DNA, 1431 bp, synthetic construct
  misc_feature 1..1431: note = Description of Artificial Sequence: Synthetic coding sequence
  source 1..1431: mol_type = other DNA
atggcctatctctctgcggaactgttccatctctccggaatcatggccctgatcgcatctggcgtggttatgcgcccttacgtggaagctaatatctcccataagagtcacacaaccatcaagtacttcttgaagatgtggtcctcagtatccgaaactcttatattcatctttcttggcgtgtccaccgtggccggtagccaccactggaactggacctttgttatctcaaccctgctgttctgcttaattgcacgcgtgctgggggtcttaggtctgacctggttcatcaacaagtttaggattgttaaactgacccctaaagatcaatttataattgcatatggcggactccggggggctatagcgttctctctggggtaccttctcgacaagaaacatttccccatgtgcgatctgttcctgactgccataattacggtgatatttttcaccgtcttcgtgcagggaatgaccatccggcctctggttgacctgttagcagtgaagaagaagcaggagacgaagagaagtattaatgaagaaatccatacccaatttttggaccatctactgacaggaattgaggatatctgtgggcattacggccaccatcactggaaagacaaactgaataggttcaataagaagtatgtgaaaaagtgcttgatcgctggggaaaggtctaaggaaccccagctaatcgccttttaccataagatggaaatgaaacaggccattgaactggtggagtcaggcggtatggggaaaatcccttcagccgtgtcaacagtgtcaatgcagaacattcatcctaagagcttgcccagtgagcggattttgcccgccctgagtaaggacaaggaggaagagatccgcaaaattctaagaaacaatctacagaagactcgccagcgcctgcgaagctacaaccgtcacactctggtagccgacccctatgaagaagcctggaaccaaatgttacttcggcgacagaaggcaaggcaactcgaacagaagatcaacaactacctgaccgtgcccgcacacaaattggatagccctaccatgtctagggccagaatagggagcgaccctctggcctatgaaccaaaagaagaccttccggtgatcaccatcgatccggcaagccctcagtcccctgagagcgtggatcttgtgaatgaggagctcaagggcaaggtgctcgggctgagtagggacccagccaaagtcgccgaggaggatgaggatgacgatggcggcattatgatgagatccaaggagactagctctcctggcactgatgacgtattcacgccagcccctagcgattccccctccagccagcgcatccagaggtgcctgagtgaccctggcccacaccctgaacctggggaaggggagcccttttttcccaagggtcagtag

SEQ ID NO: 135663 - DNA, 1626 bp, synthetic construct
  misc_feature 1..1626: note = Description of Artificial Sequence: Synthetic coding sequence
  source 1..1626: mol_type = other DNA
atgaattgtcgggagttgccattaacactgtgggttctgattagtgtttcaacagctgagtcctgtacaagccgtccccacatcaccgtggtggagggggaaccattctatttgaagcattgcagctgttcattggcgcatgagatcgagacaactactaaatcttggtacaaatcatctggcagccaggagcacgtcgaactgaatcctaggagctcctctcggatcgctctccatgattgtgtgctcgagttctggcctgtcgagctaaatgacacggggtcttatttttttcagatgaagaactacacccaaaagtggaagctgaatgttataagaagaaacaagcactcctgcttcaccgaaagacaagtgacaagtaaaattgtggaggtcaaaaagtttttccagattacctgcgagaatagctattaccagactctggttaacagcaccagtctgtataaaaactgtaagaagttgctcctggagaataacaagaaccctaccatcaagaagaacgctgaattcgaggatcagggctactactcttgtgtgcactttctacatcacaacggcaagttattcaatataacaaaaacattcaatattacaatcgtggaagaccggtcaaatatcgtccccgtgctgctgggtcccaagctgaaccatgtggcagttgaactgggcaagaatgtgagacttaactgcagtgctctgctcaacgaggaagatgtgatctactggatgttcggtgaggagaatggaagcgatcctaacatccacgaggagaaagagatgaggattatgacaccagagggaaaatggcacgcttccaaggtcctgagaatcgagaacattggcgagtcaaatcttaacgtcctctacaactgtactgtggccagcacgggtgggaccgatacgaagagctttatcctggtcaggaaggctgacatggccgacattcccgggcacgtgttcactaggggaatgattattgctgtgctgatactggttgccgtggtatgcctggtcaccgtctgtgtcatttatagggtggatctggtcctattctacaggcatttaactagaagggatgagactcttacagatggcaagacctatgatgcttttgtgtcctatttgaaggagtgtcgccctgagaacggcgaggaacatactttcgctgtggaaatcctgcctcgtgtcctcgagaagcactttggatacaaactgtgtatttttgagcgtgatgtggtgcccggaggcgctgtcgttgatgagattcactcgctcatcgaaaaatccagacgccttatcatcgtgctgagtaaatcatacatgtccaatgaggtgcgatatgagttggaaagcgggctccacgaagctcttgtggagcggaagatcaaaatcattttaattgaatttacgcccgtcacagactttacttttctgccacaatctcttaagctcctcaagagtcaccgcgtgctgaaatggaaggccgataaaagcctaagctacaactcaagattttggaagaatctgctctacctcatgccggctaagacggtgaaaccgggcagggatgagcccgaagttctgccagtgctatctgagagttag

SEQ ID NO: 135664 - DNA, 2505 bp, synthetic construct
  misc_feature 1..2505: note = Description of Artificial Sequence: Synthetic coding sequence
  source 1..2505: mol_type = other DNA
atgtggggccttggagcgagaggtccggataggggtctcttactggcacttgccctgggcgggctggctcgggctggcggagtagaggtcgagcctggaggcgcccacggagaatccggtggattccaggtggtaacatttgagtgggctcacgtgcaggacccgtacgtaatcgccctgtggattctggttgctagtttggccaaaataggattccatctaagtcacaaagtgacctccgttgtaccagaatccgctcttcttattgtgctggggctggtacttggaggtattgtgtgggccgccgatcacatcgcctctttcacactaaccccgacagtattcttcttttacctcctccctcctatcgtgctagacgccggctactttatgccgaaccggctctttttcggcaacctgggaacgattctgctatacgccgtggtgggtaccgtgtggaatgccgccaccaccggactgtctctatatggtgtgttcctatcaggcctcatgggggatctccagattggtttgctggattttctgctgttcgggtcactgatggcagcagtagacccagtcgcagtcctggccgttttcgaggaagtgcacgtaaacgaggttctctttattattgtattcggcgagagcctgttgaatgatgcggttaccgtagtactgtacaacgtgttcgaaagtttcgttgcactcggtggtgacaatgtaaccggcgtggactgtgtaaaagggatcgtctccttttttgttgtaagtctcgggggtactctggtcggcgtggtgttcgctttcctgttgtcacttgtgactagatttaccaagcatgttaggattatcgaaccagggttcgtcttcattattagttatttatcctatctgacatcggagatgttaagtttgagtgccatcctcgcaattacattctgtggtatctgttgccagaaatacgtgaaggccaatattagcgagcagtcagctaccacagttcgttacacgatgaaaatgctagcctcgtccgcagaaacaatcatctttatgttcttgggaatcagcgcagtcaaccctttcatctggacgtggaacacagccttcgtgctcctgacgcttgtgtttatctcagtctaccgagccattggagtcgttctacagacatggctcctgaataggtacagaatggttcaattagagccgattgatcaagtggtcctctcatacggcggtttgcgaggtgcggtggctttcgccttagtcgtgttgttggatggggataaggttaaggagaagaatctgttcgttagcacgacaataatagttgtgttttttacagttatctttcagggtctgactatcaagcccctggtccagtggcttaaagtaaaacgttccgaacaccgggagccgcgcttaaacgaaaaactgcacggtagagccttcgaccacatcctttccgccatagaggatatctcagggcagatcggccacaactacctgagggataagtggtctcacttcgatcgaaagttcctctcacgcgtgctaatgcggcgctctgctcagaagagcagggatagaatcctgaatgtgttccatgagcttaacctcaaggatgccatttcatacgtggctgagggggagagaagagggagtcttgcattcatacgtagcccaagcaccgacaacgtggtgaacgtggatttcacaccccggagttctaccgttgaagcaagcgtgtcatacctgctccgggagaacgtgtcagcagtatgcttggacatgcaaagcctggagcaaagacgacgtagtatccgtgatgctgaagacatggtcacccaccatacactgcagcagtatctgtataagccccgacaggaatacaaacacctgtattcccgtcacgagctgacaccaacggaggacgagaaacaagaccgagagatatttcatagaacgatgcgcaaacgcctggagtcattcaagtccactaagcttggactgaatcagaacaaaaaagctgcaaagctatacaagagggagcgggcgcaaaagagaaggaattcatccatccccaatggaaagttgcctatggagagccctgcacagaacttcaccatcaaggaaaaggatctggaactcagtgacacggaagaacctccgaattacgacgaggaaatgagcggcggaattgagttcttggcctcagtgacaaaagataccgcttctgattctcccgccggcattgataacccggtgttttccccagacgaagcactggaccgttcgctgctggctcggctacccccctggctctcccctggcgagaccgtggtgccatcgcagcgggctcgcacccagattccttactctccaggaacattttgccgcctcatgccatttcgactgagtagtaagtccgtggacagtttcctgcaggccgacggacccgaagaacggcccccggccgcattgccagagagcacgcatatgtag

SEQ ID NO: 135665 - DNA, 1077 bp, synthetic construct
  misc_feature 1..1077: note = Description of Artificial Sequence: Synthetic coding sequence
  source 1..1077: mol_type = other DNA
atgtccgctgatgctgctgccggtgctccccttccaagattgtgttgtttggagaagggacctaatggctacggcttccacttgcacggggagaagggcaaactggggcagtacatcaggcttgttgagccaggatccccggcggagaaagcgggactcttggccggagatcgattggtggaggtgaatggagaaaatgtggagaaggagacacatcagcaggtggtgtctcggatcagagcggccctgaatgcggtgagactcctggtggtagatccagagactgatgagcagctccagaagctgggcgtgcaggtccgagaagagctcttgcgggcccaggaagctccgggccaggccgagccccccgccgctgctgaagtccaaggcgccggaaatgaaaatgaaccacgggaggccgataagtcgcaccccgagcagcgcgaactgagacccaggttgtgtacaatgaagaagggcccgtcaggctatgggttcaacctacacagtgacaagtccaagcctggtcaattcataagaagcgtggacccggattctccagccgaagctagcggcttaagggcgcaagatcgcattgtggaggtaaatggagtgtgcatggaaggaaaacagcacggagatgtggtcagtgctattcgggcagggggagacgagactaagctcctggtcgtcgaccgagaaaccgacgagttcttcaaaaaatgcagagtgattcccagccaggagcacctgaatgggcccttgcccgttcccttcactaacggagaaattcagaaagagaactctcgcgaggctttggcggaagccgcactggaatccccaaggccagctttggtaaggagtgcgtcctccgatacaagcgaagagctcaattctcaagatagccccccgaaacaggacagtacagcacccagctctacctctagcagcgaccccatcctcgacttcaacattagcctggccatggccaaagagcgggcacatcaaaaacgatcttccaagcgcgctccccagatggattggtctaagaagaacgagctgttttctaatctctag

SEQ ID NO: 135666 - DNA, 822 bp, synthetic construct
  misc_feature 1..822: note = Description of Artificial Sequence: Synthetic coding sequence
  source 1..822: mol_type = other DNA
atgagcgctgacgcggcagccggtgctccactccccagattgtgttgtctggagaaagagacccatcaacaggtcgtcagtaggatccgcgcagccttgaatgccgtccgccttctggtggttgatcccgagactgatgagcagcttcagaagctcggagtacaggtcagggaggagctgctccgtgcccaggaggcccccggccaggccgagcccccagcggcagctgaagtccaaggggccggaaatgagaacgaacctcgcgaagctgataagagccaccccgaacagagggaactgaggccacggctgtgtactatgaagaagggcccctccggttacggatttaatttgcactctgataaatcgaagccaggacagtttatcagaagtgtggatccagacagtccagccgaggccagcgggctgcgagcgcaggataggatcgtggaggtcaacggggtgtgtatggaagggaagcagcacggggacgtcgtcagcgccatcagagcaggcggagatgggagcggaggtggtaaccagcgcggggccgagtttccacgccaaccgccgaagaccgggctgcactcagccctggtgtacctgttgttgaggcctcatcctagactgcagcacctccccggacacggacagcgtgaggggcctcccgaaacacaacagcaaacagggcctgcagatggactggaacaggagaaaagaacactgcagcagcctctctctgcactgctgccaccttccgactggcagggccgagcttcaatccctcctcatctattcccatctcctcagctccttccttag

SEQ ID NO: 135667 - DNA, 1014 bp, synthetic construct
  misc_feature 1..1014: note = Description of Artificial Sequence: Synthetic coding sequence
  source 1..1014: mol_type = other DNA
atggcggcacctgagccgctgcggccgcgcctgtgtcgtttggtgcgaggagagcagggctatgggttccatctccacggcgaaaaggggcgcaggggtcagttcataagaagagtcgagcctggttcccctgctgaagcagctgctttgagagccggtgatcgccttgtggaggtgaatggcgttaacgtggaaggcgagacacaccatcaggttgtgcaacgcattaaggccgtggagggccagactcgacttttggtggttgaccaggaaacagatgaggaactgcgccggaggcagctcacctgcacagaggagatggcgcagagaggcctgcccccagcccatgatccttgggaaccgaagcctgactgggcccataccggtagtcactctagcgaagcaggaaaaaaagacgtgagcggaccactaagagaactgcgaccacggctctgtcatctgagaaaaggccctcagggctatggatttaatctgcatagtgataagtccaggccaggccagtacattcgatccgttgatcctgggtcccctgcggccaggtctggactgagagcacaggatcgtctgattgaagtcaatggccagaatgtggagggcctccggcacgccgaggtagtcgctagtattaaagcacgggaagacgaagctagacttttggtagtggatcctgaaactgacgagcattttaaacgcctgcgtgtgacacccacggaggagcacgtcgaggggcccctcccaagtcccgtgacgaatgggacctcccccgcccagcttaacggcggatccgcttgctcgtcccgtagcgaccttcccggaagcgataaggataccgaagacggctctgcgtggaagcaggatccctttcaggagtcaggactgcatctgagtcccaccgccgctgaggccaaggaaaaggccagggcaatgagggtcaataaaagagccccacagatggattggaacagaaaaagagagatcttctctaacttttag

SEQ ID NO: 135668 - DNA, 981 bp, synthetic construct
  misc_feature 1..981: note = Description of Artificial Sequence: Synthetic coding sequence
  source 1..981: mol_type = other DNA
atggctgcccccgagcccctccgacccagactttgccgtctggtgagaggggagcagggttacggtttccacctacacggagaaaaagggcgcagaggtcagttcatcagaagggtggagcccggatcacccgcagaggcagcggccctgcgcgcaggcgatcgtcttgtggaggtgaacggcgtaaacgttgagggggagacccatcatcaggtcgtgcagcggatcaaggccgtggagggtcaaacacggctgctggtggtcgatcaggaaactgacgaggagctgcggaggcgccagctaacttgcacagaagaaatggcccagaggggtttaccccctgcacacgacccctgggagcccaagccagattgggctcatactgggtctcactcctccgaggcagggaagaaagatgtctctggcccactgcgcgaactccggccccgtttatgtcacctccgcaaaggaccgcagggctacgggtttaatctgcattccgataagagccgacccggccagtatatcaggtccgtcgatcctggcagccctgcagcgcgatcaggactgcgggcccaggataggctaatcgaggtcaacggccagaatgtggaaggactccgtcacgcagaagtcgtggctagcatcaaggctcgggaagacgaagctaggctcctggtcgttgacccagaaactgatgagcattttaagcgactccgtgtcacacccacagaggagcacgtcgagggccctctcccgtcacccgtaacgaacggcacatcacctgcccaacttaatggcggatccgcttgctcgtcaaggtctgatttgcctgggagcgacaaggacactgaagagtcaggcctccacctgagccctacagcggccgaggcaaaggaaaaagcacgggcaatgagggtcaataaacgagcaccccagatggattggaatagaaaacgcgagatattcagcaacttctag

SEQ ID NO: 135669 - DNA, 2397 bp, synthetic construct
  misc_feature 1..2397: note = Description of Artificial Sequence: Synthetic coding sequence
  source 1..2397: mol_type = other DNA
atggccctgcagatgttcgtcacttactcaccttggaattgtctgttgctcctggtggccctggagtgctccgaggcaagtagtgacctcaacgagagtgcgaatagtactgctcaatatgctagcaatgcatggtttgccgcagcctctagtgaaccggaggaagggattagcgtgttcgaactggactatgattatgtacaaattccatacgaggtaaccctgtggatcctccttgcgtccctggcaaaaattgggttccatctgtaccacaggctcccggggttgatgcccgagtcatgcctgttaattctggtgggagccctcgtcggcggtataatattcggtaccgaccacaagagcccccctgtcatggattcctccatttattttttatacctgctccctccaatcgtcttggaggggggttactttatgcccacacggcccttttttgaaaatattggatctattctgtggtgggccgtgttgggggcactgataaatgccctcgggattggattgagcctgtacctgatttgccaggtcaaggccttcggcctgggagacgtaaacttactacaaaacctgctgttcgggtcccttatctcagcagtggatccagtggccgtattagccgtatttgaggaggctcgcgtaaacgagcagctgtacatgatgatatttggagaggcgctcctcaatgacggcatcacggttgtcctgtataatatgttaatagctttcacaaagatgcacaagttcgaggatattgagaccgtagatatcctggcaggttgcgctcggttcatcgtcgtaggattggggggtgtgctgttcggaatagtgttcgggttcatctctgcattcatcacaaggttcacgcagaacatcagtgcaattgaaccactgattgtgttcatgttctcttacctgtcttacctggctgctgaaaccttatacctgtccgggatccttgctataactgcctgtgcggttacaatgaaaaaatacgttgaagagaatgtctcccagaccagctacactacaattaagtattttatgaaaatgctgtcttccgtgagcgagaccttgatattcatattcatgggagtctccacagtcgggaaaaaccacgagtggaattgggccttcatctgtttcacgctggctttctgtcagatttggcgggccatcagcgtgttcgcactcttctacatctctaaccagtttcgcaccttccccttcagcatcaaggaccagtgtataattttctattcaggagttcgcggcgctggttcttttagcctcgcattcctccttcctctttccctgtttcctagaaaaaagatgttcgtcactgcaaccctggtggtgatttatttcacggtgtttatacaggggattaccgtcggtccactggtgcggtacctggatgtgaaaaagacgaacaaaaaggagtcaatcaatgaggaactgcatattcgcctcatggatcacctcaaggccggcattgaggatgtttgcgggcactggtctcactaccaggtgcgagacaagtttaagaagttcgaccaccgttatctccggaagattttaattcggaaaaaccttcccaagtcctccatagttagtttgtacaagaaactagaaatgaaacaagcaatcgagatggttgaaactggaatcctaagctctactgccttcagtatccctcaccaggcacagcgcatccagggcattaagcggcttagtcccgaggacgtcgagtccattagggatattctgacaagcaacatgtaccaggtgagacagcgcactctatcttacaacaagtataatctgaagccacagacatcagaaaagcaagccaaggagatcttaataaggaggcagaacacactacgggaatcaatgagaaagggacacagtttgccatggggcaaacccgcaggcacaaagaatatacgatacttgtcgtacccctacggaaatccacagagcgctggcagggacacaagggccgctgggttctctgacgatgacagtagcgaccccggatcccccagtatcaccttctcagcttgtagccgtataggcagcctacaaaaacaggaagcacaggaaatcattccaatgaagtcactgcaccgcggccgcaaggccttctcttttgggtaccaacggaatacatcccaggaagagtaccttggaggcgtccggagagttgctcttagacccaaacctctctttcatgccgtggacgaggaaggggaatctggcggagagtctgagggtaaggcctcgcttgtggaggtcaggtccagatggacagccgaccacgggcacggacgtgatcatcaccgctcacatagccccttgttgcaaaaaaaatag

SEQ ID NO: 135670 - DNA, 2691 bp, synthetic construct
  misc_feature 1..2691: note = Description of Artificial Sequence: Synthetic coding sequence
  source 1..2691: mol_type = other DNA
atgttaagggcagcccttagtctgttggccttgcctcttgccggggcagccgaggaacccacccagaagcctgagagccctggtgaaccacctccgggcctcgaactgttccggtggcagtggcatgaagttgaggctccttacctggtagctctgtggattttagtggccagcctagccaagatagtatttcatctttccaggaaagtcaccagtctggtcccagagagctgcctgctaatactactgggcctggtactaggcggcattgtcctcgcagtagcaaagaaggccgagtatcagctggagcccgggaccttctttttgttcctcttgccccccatcgttctggactcaggttactttatgccttctcgtttatttttcgataatctgggtgcgatcctcacctatgccgtcgtgggcaccctgtggaacgcattcacaaccggggctgcactttggggtctacagcaggccggtttggtggcacctagggtgcaggctgggctcctggacttcctgctatttgggtcacttatcagcgcagtcgatcccgtggcggtattggcagtcttcgaggaggtccacgtgaacgaaacactgtttatcatcgtgtttggcgagtctttactaaacgacgcggttactgtggtgctgtacaaggtttgcaactccttcgtggagatgggaagcgctaatgtgcaggctacggattacctcaagggcgtggcgtccctgtttgtggtaagtctggggggagctgctgtgggcctggtcttcgctttcctgcttgccctaacaacccgtttcaccaagcgagtacgcataatagagcccctgctcgtttttttactggcctacgcagcctacttgacggccgagatggcgtcactgagtgcaatcttggctgtcacgatgtgtggtctgggttgtaagaaatatgtggaagctaatatttcgcataagtcacgcacaactgtgaaatacactatgaaaactctggccagttgtgccgagaccgtcatcttcatgttacttggtatttcagcagtggactcatccaaatgggcgtgggatagcggtctcgtgctaggtactctgattttcattttgttcttccgtgcattaggggtagttttacaaacatgggtgctgaatcagttcaggctggtgccccttgacaagattgatcaggtggtgatgtcatatggcgggctcagaggcgctgtagcattcgctctggttatactgttggaccgcacaaaggtgccagcgaaggactatttcgtcgcaaccaccattgttgtggttttcttcacggtgatcgttcagggtctgaccattaaacctctggtgaaatggctcaaagtgaaacgaagcgaacaccataagcctaccctgaaccaggagctacatgagcacacttttgaccatatcctcgccgccgtggaggacgtagtgggccaccatggctatcattattggcgcgatcggtgggaacagttcgacaaaaagtatctgtcccaactgttaatgcgccgttccgcctacaggattcgggaccagatttgggatgtgtattataggttaaacattagggatgcaatatcatttgttgatcagggcgggcacgtgttatcaagcaccggcctaactctgccctcgatgcccagtagaaatagcgttgctgagacaagcgtgactaacctgctgcgtgagtccggaagcggggcatgtctcgaccttcaggtgattgatactgtgcgatcaggtagagatagggaagacgccgtgatgcaccatctgctgtgcgggggactgtacaagcccaggaggcggtataaggcctcttgtagccggcatttcatctctgaggacgctcaggagcggcaagacaaagaggtcttccagcagaatatgaagcgtaggcttgaatcgttcaaatctacaaagcataatatctgttttacaaaaagcaaaccccgccctcggaagactggacgccggaagaaagatggcgtcgcaaatgcagaagcaaccaatggaaaacacagaggattgggattccaggatacagcagccgtgatactgacggtcgaatcagaagaggaagaggaggaaagcgattcctcggaaaccgaaaaggaggatgatgaaggcataatattcgtcgcgcgggcgaccagcgaggttctgcaggaaggcaaggtctcagggagtttagaagtatgtccttccccccgcatcataccaccttcacctacttgtgctgaaaaggaactgccctggaagagtggacagggcgatctcgccgtatatgtttcctccgaaactacaaaaatcgtgcctgtggatatgcaaaccggatggaaccagagcatcagtagcttagagagtctagctagccccccctgcaaccaggctcccattctaacttgcctgccaccccatcccagaggaaccgaagaacctcaagtaccattgcatttgccctctgacccaaggagttcgtttgctttccctccctctctggcgaaagccggcaggtcacgaagcgagtctagcgcggatctgccccaacagcaggaactgcagcctcttatgggccacaaggaccacacccatctgtccccaggtacggcaaccagccattggtgcatccaatttaaccggggctccaggctgtag

SEQ ID NO: 135671 - DNA, 1308 bp, synthetic construct
  misc_feature 1..1308: note = Description of Artificial Sequence: Synthetic coding sequence
  source 1..1308: mol_type = other DNA
atgcgaaggtccgcctatcgtatccgggatcagatctgggatgtctattaccgtctgaacatcagggatgctatctcatttgtggatcagggcggacatgtcttgagctccacaggcctgacgctgccatccatgccaagccgcaacagcgtagctgagacctctgtcacaaatctgctgagggaaagcggctccggtgcctgcttggaccttcaggtgattgacacagtgaggtctggcagggaccgagaggatgccgttatgcaccacctgctgtgtggaggcttatataaacctaggcgacggatcgaactccgcacggagccttgcggcatgcttctcaagacgtttcttcagaccgatatggatcaggccttcctgggcaccaaaccagctgccgtggccaccagctctcagcggatgagacggtccgggcgtacgcgacgcagtagtagccgtatgaagcggagactggaaagctttaaatccaccaagcataatatatgctttaccaaatccaagccacgaccacggaaaactggacggcggaagaaagacggggtggcaaacgccgaggcaactaatggcaagcaccggggactgggatttcaggatactgctgccgtgatcctgacagtggaaagtgaggaggaagaagaggaaagtgatagctctgaaacagaaaaggaggatgatgagggcattatctttgtggcgcgcgccaccagcgaggtgctccaggaagggaaagtatcgggatccttggaggtgtgtccatcaccacgcattatccctccctctcctacttgcgctgagaaggagctcccatggaagtcgggacagggcgacctggcagtgtacgtctccagcgaaacgacaaagatcgttccggtggacatgcagaccgggtggaatcaaagcatttcaagcctagagtctttagcttctcctccttgtaaccaagccccaatcttaacatgcctgcccccccacccccgcggcaccgaagagccccaggtaccgcttcacttgccttcagatcctcggagtagcttcgcatttcctcccagtttggccaaagctggcttggcagtaagagcagccttgacttctcctagcagtcggtcctgttctcccagctgggctacaaggaccacccccattagtgctcaggctcccctaccacctacgggagcgtcgtcttcgacagaggctgctggctgctcttcccgccctaggggaggggccggagggggcatccccgtcggctcagccccatgggtgatgggacgagcattagagacttag

SEQ ID NO: 135672 - DNA, 2106 bp, synthetic construct
  misc_feature 1..2106: note = Description of Artificial Sequence: Synthetic coding sequence
  source 1..2106: mol_type = other DNA
atggcaagacgtggttggagacgggcccctcttcggagaggagtggggagctcacctcgcgccagacgccttatgaggccactctggctgctcctggccgtgggcgtgttcgactgggctggagcgtcagatggtggcggcggcgaagcacgggcgatggatgaggagattgtgtctgaaaagcaggcagaagaatcccaccggcaggactctgcaaatctgctgatcttcatcctcctactcaccttgaccattttaacaatctggttgttcaaacaccgtagggctcgatttcttcacgagactggtttggccatgatctacggactgctggtaggactggtgttacgctacgggattcacgtgccaagcgatgtgaacaatgtaactttatcttgtgaggtgcaatcttcacctacaacattgctggtaaatgtatccgggaagttttatgagtacatgcttaagggggagatatcatctcacgagcttaacaacgttcaggataatgagatgttgcgcaaagtgaccttcgatccagaagtattcttcaacattcttttacctccaattatcttctacgccggctattccctgaagagaaggcattttttccgtaacctgggaagcattctggcctatgcctttctgggcactgctatctcttgttttgtcattgggtccattatgtacggatgcgtaaccctaatgaaggtcacgggacagctggctggagacttctatttcacagactgcctgctttttggagcaatcgtttccgcaactgacccagtgactgtcctcgccattttccacgagttgcaggtcgatgtcgaactgtacgcactcctgttcggcgagtctgtgctgaacgatgcagtggctatagtgctttccagctctatagtggcctaccagccggctggagacaatagccataccttcgatgtaaccgcaatgttcaaatccataggcatttttttgggcatcttttctggatccttcgccatgggggccgccacgggtgtggtgaccgcactggtgactaagttcacgaagctgagagaattccagctactggagacggggcttttcttcctgatgtcctggagcaccttcttgctggcagaagcgtgggggtttacaggagtggtcgcggtgctgttttgcggaatcacgcaggcgcactatacttacaacaatctctccactgaatctcagcacaggacgaaacagttattcgagttattgaacttccttgcagaaaattttatcttctcctatatgggtctgacgctctttactttccagaaccatgtgttcaaccctacttttgtggttggcgcctttgttgccatattcctagggcgcgccgccaatatctatccactgtctttattgctcaacctcgggagaagatctaagattggatccaactttcagcatatgatgatgttcgcaggcctcaggggagccatggctttcgcactggctattcgggacacagccacttatgcccgccagatgatgtttagcaccactctgctgatagtgttttttacagtgtgggtttttggcgggggcacaaccgctatgctgtcatgcctccatatcagagtgggcgtcgactccgaccaagaacatctgggcgtacctgaaaatgaacgtcggactactaaagccgaatctgcctggctgttccggatgtggtataatttcgaccataattacctgaagccactgttgactcattcaggaccacctctgacaacaactctgcctgcctgttgcggacccatagcccgttgcttgacgtcaccccaggcatatgagaaccaagaacagctgaaggacgacgattcagatttgatactgaatgatggcgacatcagtctcacatatggagatagtactgtcaacaccgagcccgccacatcttcagccccgcgaaggttcatgggtaattcatctgaggatgctttggatcgcgagctggcctttggggaccatgaactcgtcatccgaggaacaaggctggtgctccccatggacgactccgaacctcctctcaatcttctagacaatacacggcacggacctgcttag

SEQ ID NO: 135673 - DNA, 2010 bp, synthetic construct
  misc_feature 1..2010: note = Description of Artificial Sequence: Synthetic coding sequence
  source 1..2010: mol_type = other DNA
atggcccgtagaggatggagacgcgcgccgttgaggagaggcgtaggttcgtctccacgggcccgcagactgatgcggcccctttggctgctcttggcggtcggtgtgttcgattgggctggggcgtccgacggtggtggaggtgaggcgagagcaatggatgaggagatcgtatcagaaaagcaggcagaagagtctcataggcaagattcagcaaacttattgatttttatcctgctcctcacgctgacaattttgactatttggttgtttaagcaccggcgcgctcggttcctgcacgaaaccggtctggctatgatctacggtttgctcgtgggcctggtattgcgctacggtatccatgtgccctccgatgtgaataatgtgactctgtcatgcgaagttcagtcttccccaacgaccctcctagtgacgttcgatcctgaggtcttttttaatatcctgcttcccccaattatattttacgccggctacagcctaaagagacggcacttctttagaaacctgggctctatactagcctacgcctttcttggaacagcaatatcctgttttgtgattggctccatcatgtacgggtgcgtgaccctgatgaaagtcactggtcagcttgcgggcgatttttactttacagactgtctgctcttcggtgcaatcgtaagtgccacagatcctgtcactgtcctggcaatcttccatgagcttcaggtggacgtcgagttgtatgcgctgctgttcggggaatcagtgctgaatgacgctgtcgccattgtcctgagcagcagcattgtggcctaccagccagcaggggacaactctcatacttttgatgttacagccatgtttaagagtatcggcatttttctcgggatctttagcgggtcttttgctatgggagccgcaacgggcgtcgttaccgctctcgttacgaaatttactaaactccgggaatttcaactgctggagacaggtctgtttttcctcatgtcttggtccaccttcctattagcagaggcttggggatttactggcgtggttgcagtcctgttctgtggcattacgcaagcgcattacacctataataacctgagtacggagagtcaacacaggactaagcagttatttgagttgctcaacttcctggccgagaatttcatcttctcatatatgggcctgactctgttcaccttccagaaccacgtatttaaccctacattcgtagttggggcgtttgtagctatctttttaggcagggccgctaacatataccctttgtccttactcctcaaccttgggagaaggtcgaagatcggatcaaactttcagcacatgatgatgttcgctgggctgcgcggggcaatggcttttgctctggccatacgggacaccgctacatatgcccgccagatgatgttctctaccacacttctgatcgttttttttactgtgtgggtgtttgggggtggtactaccgccatgctaagctgtctgcacattcgcgtcggggttgactcagaccaggaacacctgggcgtcccagaaaatgagcgtagaactaccaaagccgaatccgcatggcttttccgcatgtggtacaacttcgaccataattatctgaagcccctgttaacccactcaggaccacctctgacaacaaccctgcccgcctgttgcggtcccatcgcacgatgcctgacaagcccacaggcttacgaaaatcaagagcagctgaaagacgacgacagcgatctgattcttaatgatggagacatttcattaacatatggcgattccaccgtcaatacggagcccgccacttcgtcagccccccggagattcatgggcaacagttctgaagacgccctggaccgagagcttgcctttggcgatcacgaattggtgatacgaggcaccaggttagttcttccgatggacgatagcgagcctcccctgaacctcctcgacaacactcgccacgggccagcgtag

SEQ ID NO: 135674 - DNA, 1950 bp, synthetic construct
  misc_feature 1..1950: note = Description of Artificial Sequence: Synthetic coding sequence
  source 1..1950: mol_type = other DNA
atggacgaagagattgtgtcagaaaagcaagcagaagagagccatcgacaagactccgccaatttgcttatcttcatcctacttttaacattgaccattctgaccatctggcttttcaagcaccggcgggcccgattcctgcacgagactggccttgcgatgatttatggcctccttgtggggcttgtattgaggtatggcatacacgttccgagcgatgtgaataacgtaacgttatcttgcgaagtccagagctctcctaccaccctactggtgaacgtgagtggcaaattttatgaatacatgctgaaaggagaaatctctagccacgagctaaataatgtccaggacaatgagatgctgcgcaaggtcacatttgaccccgaggttttttttaatattcttctgcctcccattatattctacgctggatattccctaaagagacgtcatttttttcggaacttgggttccatcctcgcttatgcattcctcggtacagcaatcagctgctttgtaattggtagcattatgtacggatgtgtgactctgatgaaagtaacaggccagctagctggagatttttacttcacagactgtttattgtttggcgctatcgtgtcggctacggaccctgtcacagtactcgccatctttcacgaattacaagtcgatgtggagttatacgcgctcttgtttggtgaatctgtgttgaatgatgccgtggccatagtcctgtcatctagcatcgtggcctaccagccggccggggataactctcatacctttgatgtgacagccatgtttaagtcaatcggcatcttcctaggaatcttcagcggaagtttcgccatgggagccgccacgggcgttgtcacagcgttggtgaccaaattcaccaaacttagggaattccaactcttggaaactggcctgttttttctgatgtcttggtctacctttcttctggccgaggcgtggggcttcactggcgtcgtagccgtgctgttctgcggaattacacaggcccattatacctataacaacttgagcaccgagtcacagcatagaaccaagcagctttttgagttgctgaactttctggctgagaatttcatcttctcttacatgggcctgactctgttcacgttccagaatcacgtctttaaccctacattcgttgtgggagctttcgtggccatcttcctcggccgcgcagctaacatttacccactgtctttgctcctgaatttggggcggcgttccaagatcggctccaattttcaacatatgatgatgttcgccggcctccgcggcgcaatggctttcgctcttgctatcagggacacagctacctacgctcgccagatgatgttctctacgacactgctgatagttttcttcaccgtttgggtgtttggagggggcactaccgctatgctgtcttgccttcacatccgggtaggcgtggactccgaccaagaacatctcggtgtaccagagaacgagaggcgaacaactaaggccgagtcggcatggctgtttcgcatgtggtacaatttcgaccataactatttaaagcccttacttacccacagcgggccgcctttaaccactacactgcccgcctgctgcggtcctattgctaggtgcttgacatcgcctcaggcttacgagaatcaggaacaactgaaggatgatgactcagatctgatattgaatgacggcgatatttctctgacatacggggatagcaccgttaatacagaaccagcgacttcctctgccccaaggcgattcatgggcaactcttccgaggatgctctggatcgggagctggcttttggcgaccatgagctggtcatccgaggcaccagactggtgctgccaatggatgatagcgaaccgccccttaaccttctagacaatacacgacatggtccagcttag

SEQ ID NO: 135675 - DNA, 2178 bp, synthetic construct
  misc_feature 1..2178: note = Description of Artificial Sequence: Synthetic coding sequence
  source 1..2178: mol_type = other DNA
atggaacccggcgatgccgcaagaccaggcagcggaagagccacgggggccccacctccgagattgctcctgctgccactgcttctcgggtggggactacgggtggcggctgccgccagcgcgtcttcgagtggtgctgcggcagaggactcctccgctatggaggagctagcaacggagaaggaagccgaggagtctcacagacaggacagcgtatctctgctgacctttatcctccttcttacacttactatcctgactatctggcttttcaaacacaggagggtaagatttttgcacgaaaccggactggcaatgatatacggactcattgtgggggtgatcctgaggtacggaacgccggcgaccagcggtcgcgacaaaagtctgagttgtacccaggaggacagagcattttccactctgcttgtgaatgtgagcgggaagtttttcgagtatactttgaaaggggagatatcgcctggaaagattaattccgtggaacaaaacgacatgctgcgaaaggtgacctttgatcccgaagtgttctttaatatccttctaccaccaattattttccatgctggttattctttgaagaaacgacactttttccggaacctgggcagcatcctcgcttacgcctttctgggaactgccgtctcatgtttcatcattggcaatcttatgtatggggtggttaaactgatgaaaatcatgggccagctgagtgacaaattttactacacagactgtttgttttttggagccattatctctgctactgatccagtgacagttttagcaattttcaacgaactacatgcagatgttgacttgtacgcgttgctgtttggagaaagtgtgctcaacgacgccgttgcaattgttctgtcaagttcgattgtggcttaccagcccgctgggttgaacacacacgcttttgatgccgccgccttttttaagagtgtggggatattcctcggaatcttttctggatcgttcactatgggtgccgtcacgggcgtaaacgctaatgtaaccaagttcaccaagttacattgtttccctctgttggagacagctctattttttttgatgtcctggtccaccttcctcctcgccgaggcctgtggatttacaggggtcgttgcagtgctgttctgcggcattactcaagcacactacacttacaataacctttctgttgaatcacgaagccgcactaaacaactgttcgaagttcttcactttctcgctgagaacttcatattttcctacatgggcctcgctctgtttacctttcagaaacacgttttttctcccatcttcattatcggggctttcgtggcgatcttcttaggccgtgctgctcatatttatccactcagtttctttttgaacctgggcagacgccacaaaatcggctggaacttccagcacatgatgatgttcagcggtctccgtggagctatggccttcgcacttgccatcagggatactgcatcatacgcccggcaaatgatgttcaccaccactttgttgatagtgttttttacagtgtggatcatcggaggcggcacaacaccaatgctctcgtggctcaacattagggttggtgtcgaggaaccatcagaggaggaccagaatgagcaccattggcagtacttcagagtcggtgttgatcccgaccaggatcctccacctaacaatgactccttccaagtccttcagggcgatggcccggactccgcaagaggcaatcgaactaagcaggaatccgcctggatctttcgcctatggtactccttcgatcataattatctaaagcctatacttacccactccggccctccgttgactacgactctgcctgcctggtgtggcttactagccaggtgcttgactagtccgcaagtttatgacaaccaagaacccctccgggaggaagactctgacttcattttgaccgagggcgacctaactctgacttacggtgactcaaccgtgaccgcaaatggcagcagtagctcccacaccgccagcacttccttagaaggaagcaggcgcaccaagtcaagctccgaagaagtactggagagggacctgggcatgggcgaccagaaagtgagtagcaggggcaccaggctggtgtttccgcttgaggataacgcttag

SEQ ID NO: 135676 - DNA, 1746 bp, synthetic construct
  misc_feature 1..1746: note = Description of Artificial Sequence: Synthetic coding sequence
  source 1..1746: mol_type = other DNA
atgggcgagaaaatggccgaggaagagagattccctaatacaacacacgagggattcaatgtgaccctgcatactacactggtggtgacaactaagctggtccttccgacccccggcaagcctatccttccagtgcagacaggtgagcaggctcagcaggaagaacagtcaagtggcatgactatcttttttagcctgctggtactggcaatttgtatcatcctggtccacctgctgatacggtataggctgcacttcctcccggagtccgtggccgtggtgtctctgggaattctgatgggggcagtaatcaaaattatcgaattcaagaagctggccaattggaaagaggaggagatgttcaggccgaacatgttctttttgctgctcctacccccgatcattttcgagagcggttattccctccataagggcaattttttccagaatatcggaagcattacattgtttgctgtgtttggtacagctatttcagccttcgtcgtggggggcgggatatacttcttgggacaagccgatgtgatatcaaagcttaacatgaccgactctttcgccttcggcagcttgattagcgccgtggacccagtggctacgattgctatttttaatgctctgcatgtggaccctgtgttaaacatgctggtgttcggcgaatccattctgaatgatgctgtgtccatcgtactcacaaacacggccgagggattgaccagaaaaaacatgtctgacgtcagcggctggcaaacgttcttgcaggccctagactactttcttaagatgtttttcggttcggcagctcttgggaccctcacgggactgatcagcgcattggtgttaaagcacatagatttgcgtaagacgcctagcctggaatttgggatgatgattattttcgcctacctgccatatggactggctgagggtatctccctgtctgggataatggccattctcttctcaggtatcgtgatgagccactatactcatcacaacctatcccccgttacacagatcctcatgcagcagaccttacgtacggtcgccttcttatgcgaaacatgtgttttcgcctttctgggcttatccatcttcagctttccacataaatttgaaatcagtttcgtgatctggtgcattgtgctagtcttgtttggcagggccgtgaatatatttcctctctcctatctgctcaatttttttcgagatcacaagatcacccctaaaatgatgttcattatgtggtttagcggtctacgcggggccataccctacgcactcagtctgcatctggatctggagcccatggaaaaacgccagctgatcggaacaaccactattgtgatcgtgctgttcaccatcttgctgctgggaggatctaccatgccactcatcaggttgatggatattgaagacgccaaggctcacagacggaataagaaggacgttaacctgagcaagacagagaagatgggaaacacagtggaaagcgagcatttgtctgagctcactgaggaggaatacgaggcacactatattcggagacaggacctgaaggggtttgtgtggttggatgctaagtacctgaatccatttttcacccggagactgactcaggaggacctacaccatggcaggatccaaatgaagacactgactaataaatggtatgaagaggtaaggcaggggccctctggatccgaggacgacgaacaggaactgctgtag

SEQ ID NO: 135677 - DNA, 1794 bp, synthetic construct
  misc_feature 1..1794: note = Description of Artificial Sequence: Synthetic coding sequence
  source 1..1794: mol_type = other DNA
atgggggagaaaatggcagaggaagaaagattccctaacacaacccacgagggctttaatgtaacactccacaccactctcgtagtaacaacaaaactggtccttccgacccccggtaagcccattctgccagttcaaactggtgagcaggctcagcaggaagagcagagttcaggcatgaccatattttttagtctcctcgtgctggccatatgcatcatcctggtgcacctgctgatccggtatcgcctccactttctgcccgagtcagtggcggtagtcagtcttggcattctgatgggagccgtgattaagattattgaattcaagaaacttgctaattggaaggaagaggaaatgttccgcccaaacatgttcttcctcctacttctgccacccataatctttgaatccgggtatagcctccataaggggaatttttttcagaacattgggtccattaccttgttcgccgtgttcggaaccgccatttcagccttcgtagtggggggcggcatctactttctgggacagggttttttctttgtgtgtgtgtgtgttttcgtgtgctttatattgcaggccgatgtgatatcaaaactgaatatgactgattcattcgcttttggttctctgatctccgccgtggatcctgtggccacaattgccatctttaatgccctgcacgtcgatcctgttttgaatatgctggtgttcggagagtccattctcaacgatgccgtcagcatcgtgttgactaacacagcggaggggcttacaagaaaaaacatgtcggacgtgtccggctggcagaccttcttgcaagctttggactacttcttgaagatgttcttcggttctgctgcccttggcacgttgacgggcctcatcagtgccctcgttctgaaacacatagatctaaggaaaacaccaagtcttgaattcggcatgatgatcatcttcgcgtacctgccctacggcttagctgagggtataagtcttagtggtataatggctattctctttagtgggatagtgatgagccactatacccatcataacttgagtccagtgacgcagatacttatgcagcagactctccgtacggtcgcatttctttgtgagacatgtgtcttcgctttcctgggcctctccatcttcagctttcctcacaagttcgagatcagctttgtcatctggtgcattgtcctggtgctttttgggcgagcagtgaacattttcccgttatcttatcttctcaacttctttcgcgatcacaagataacccccaagatgatgtttattatgtggttctccgggcttagaggagccattccatacgccttgtccctgcacctggatctggaacccatggagaaacgtcagctgataggcacgactactattgttattgtacttttcactatcttactccttggcgggtctactatgcccttgattcggttaatggacatagaagacgcgaaagcccatagaaggaacaagaaggacgtgaacctgtccaaaaccgaaaagatgggaaatacggtagagtccgagcacctgagtgagctgacagaggaagaatacgaggctcactatatacgacgacaggacctcaaaggttttgtgtggcttgacgcaaagtacctcaatccattcttcactcgaagactgacccaggaagatctacatcacggacgaatacagatgaaaacactcacgaataaatggtatgaagaagttagacaaggcccaagtggctccgaggatgatgagcaggaactgttgtag

SEQ ID NO: 135678 - DNA, 1089 bp, synthetic construct
  misc_feature 1..1089: note = Description of Artificial Sequence: Synthetic coding sequence
  source 1..1089: mol_type = other DNA
atgcttgttttcggcgaatctatcctaaatgacgccgtgagcatcgtgcttactaacacggctgagggcctgacccgaaaaaatatgagcgacgtgagtgggtggcagactttcctgcaagcgctagactactttctgaaaatgtttttcggcagtgctgcactggggacgctgactggattgatttctgccttagtcctgaagcatatcgaccttcggaagaccccgagcctggaattcggaatgatgattattttcgcatacctcccctacgggctggctgaaggaatctccctgagtggcatcatggccattctgttctctggcatagtcatgtctcattatacacaccataacttgtcaccggttacgcaaattttaatgcagcaaaccctgcggaccgtcgcatttctctgcgagacatgcgtcttcgcctttcttgggctgtccattttctcatttccccataagtttgagattagtttcgttatctggtgtattgtcctggttctcttcggcagagccgttaatattttccctctgagctaccttcttaacttcttcagagaccataaaattacaccaaagatgatgtttattatgtggttttcaggtttacgcggcgccatcccttacgcgctgagcttgcatctcgaccttgaacccatggagaagcggcagctcatcggcacaaccactatcgtcatagtgctattcaccatcttactgctaggcgggtctactatgcctttaatccggctcatggacatcgaggatgccaaagctcaccgcaggaacaagaaggacgttaacctcagcaagacagaaaagatgggtaacactgtggaatcagaacacttaagtgagctcacagaagaagagtacgaagcacattacattagaaggcaagacttaaagggctttgtctggctggatgctaagtatctcaatcctttcttcacccggcggctcacgcaggaagatctccatcacgggaggattcagatgaagactctcaccaacaagtggtatgaggaggtgcgccaaggccccagtgggagcgaggacgatgagcaggaattgctgtag

SEQ ID NO: 135679 - DNA, 846 bp, synthetic construct
  misc_feature 1..846: note = Description of Artificial Sequence: Synthetic coding sequence
  source 1..846: mol_type = other DNA
atgatgatcatcttcgcctatctgccatatggactcgcagagggcatatctctgtctggaataatggcaattctcttctctggaattgtgatgtcacactacacacaccataacttgagcccagtaacgcagatactgatgcagcagaccctgagaacggtcgctttcctgtgcgaaacatgcgtgttcgcctttttaggcctgtccatcttcagcttcccccataaattcgagataagtttcgtcatttggtgcattgtacttgttctctttgggagggcagtcaatatattccctctcagctacctactgaattttttccgtgatcacaaaattacccccaaaatgatgttcatcatgtggttttcagggttgcggggggctatcccctatgctttgagcctccatctggatctggaacccatggaaaagcgtcagcttatcggaacaacaaccatcgtaatcgtccttttcacaattctgctgctgggggggagcacaatgccacttatccggctgatggacatagaagatgcgaaggcacatcggcggaacaagaaagatgtgaatctgtctaagacggaaaagatgggaaacacagttgaatcagagcacttgtcagaattaactgaagaggagtacgaagctcactacattaggaggcaggacctgaagggcttcgtatggcttgacgctaaatatctgaatcccttcttcacaaggaggttgactcaagaggatttgcaccacggaagaatacagatgaaaactctgaccaacaagtggtatgaagaagtcaggcaaggacctagtggctccgaggatgacgagcaagaattactgtag

SEQ ID NO: 135680 - DNA, 1938 bp, synthetic construct
  misc_feature 1..1938: note = Description of Artificial Sequence: Synthetic coding sequence
  source 1..1938: mol_type = other DNA
atggaaaggcagagccgcgttatgagcgagaaggatgagtaccagttccagcaccagggcgcagtggaactgcttgttttcaacttcctgctgatattgacaatccttactatctggctctttaaaaaccaccgattcaggtttttgcatgagaccggaggtgccatggtgtacggactgatcatgggattaatcctgcgctacgccacggctcccaccgacatagaatccggcaccgtttatgactgtgtaaagctgaccttctcccctagtaccttgctcgtgaatataaccgaccaagtctacgagtataaatataagcgtgagatctcccagcataatataaaccctcatcagggcaatgcgattctggagaagatgactttcgacccagagatattctttaacgtactcttgccacccatcatctttcacgctggctacagcttaaagaaaagacatttcttccagaacctgggcagtattctaacttatgccttcctgggcacagccatctcctgcattgtcattggacttattatgtacggctttgtaaaagctatgattcatgccggccagttaaaaaatggcgatttccacttcaccgattgcttatttttcgggtctcttatgtcagcaaccgatcccgtgaccgtgcttgctatcttccacgagctgcacgtggatcctgacttatacacgctgttattcggcgaaagtgtgcttaatgatgcggtagctatcgtgttgacgtacagcatctctatttactcccctaaagaaaatccaaacgcatttgatgcggctgccttcttccagtccgtgggaaactttttaggcattttcgcaggctccttcgccatgggaagcgcctatgcgatcatcaccgccctgttgaccaaatttactaagttgtgtgagttccctatgttagaaacaggcttattttttctgctgtcctggtctgcatttttaagcgccgaggcggctggtctaacagggattgtcgcagtgctgttttgcggcgtgacccaagcccattacacctataataatttgtcatctgacagtaaaattcgcacaaagcagctgttcgagtttatgaacttcctggccgagaatgtaatcttctgctatatgggcctggccctcttcacctttcaaaatcacatcttcaatgccttgttcatcctgggcgcattcctggctatttttgtggccagagcctgtaatatttaccctttatccttcctgctaaacctagggaggaagcaaaaaatcccttggaattttcagcacatgatgatgttcagcggcctaagaggggccatcgcctttgccctggcaatccggaacaccgaaagtcagcccaaacagatgatgtttaccactacactgctgctggtgtttttcacagtttgggtctttggcggagggactacacccatgttgacatggctgcagatcagggtgggggtcgacttggatgagaacctgaaagaagatccatcttcccaacatcaagaagcaaataatctcgacaaaaatatgaccaaagcggagagtgcacggctgttcaggatgtggtactccttcgatcataagtatttaaagcccatccttacgcactccggccctccactcactacaaccctgccggagtggtgtggaccaatttctcgcctgttgacttcgccccaagcatatggcgagcagctgaaagaggatgacgtggagtgtattgtgaatcaggatgagctggctatcaattaccaggaacaagccagtagcccctgttctccaccagctagactgggccttgatcagaaagcttctccacaaacacccggtaaggagaatatctacgagggggatctgggccttggaggatacgaattgaaactcgaacagaccctcgggcagagccagttgaactag

SEQ ID NO: 135681 - DNA, 978 bp, synthetic construct
  misc_feature 1..978: note = Description of Artificial Sequence: Synthetic coding sequence
  source 1..978: mol_type = other DNA
ctgcggctccaatcctcctgggagcaaatgacgtttgacccagaaattttctttaacgttctgcttcctcccatcatttttcatgctggatactctctcaagaagaggcatttcttccagaacctgggatccatcctcacttacgcattcctaggaaccgctatcagttgcatagtgattggcctgataatgtacggctttgtgaaagccatgatccacgcagggcagctgaagaacggcgactttcactttaccgactgccttttctttggatcccttatgtctgctacagacccagtgacagtgctagccatttttcacgaactccacgtggacccagatctctatacccttttgttcggagagtccgtgcttaatgacgctgtcgccatcgtgctcacatacagcatctccatctacagcccaaaagagaacccaaatgctttcgacgcagccgcattcttccaaagtgtcggcaattttctagggatcttcgcgggctccttcgccatgggatcagcctacgctattatcaccgctctgctcactaagttcaccaaactttgcgaatttcccatgttggaaaccgggcttttctttctactgagctggtctgcttttttgtctgccgaggccgccggtttgactggaattgtggctgtgttattttgtggcgtgactcaggcacactatacatacaacaatttaagctcggattctaaaatcaggaccaaacagctgtttgagttcatgaacttcctggccgaaaacgtgatattttgttatatgggcttggcgctgtttacttttcagaaccacatctttaacgctcttttcatcctcggagcattcgtcagcattttcctcgcaagggctcataccgaactgaagaatctacttttcttcttggcctcgtttctctgctacttttcccatagaagcaaaggcctcccgatggctggttgtgcgctcccttag

SEQ ID NO: 135682 - DNA, 3534 bp, synthetic construct
  misc_feature 1..3534: note = Description of Artificial Sequence: Synthetic coding sequence
  source 1..3534: mol_type = other DNA
atggctggcatttttaaggaattctttttttctaccgaagacctgccagaggtgatcctgactctgtctctcatctcctctataggcgcctttctcaacagacatctggaggattttcctatccccgtcccagtaatactgttcctgctcgggtgcagctttgaggtgcttagttttacgtccagccaagttcagcggtacgccaatgcgatacagtggatgagccctgatttattcttcagaatctttacccccgtcgtctttttcaccacagcattcgatatggacacttatatgctgcagaagctcttttggcaaatacttctgatctctatcccgggctttctggtgaattatattctggtcctctggcacctcgcttccgttaaccagcttcttttgaagccaacccaatggcttctcttctcagccatcttggtgagttccgaccctatgctaactgccgcggccattagagacctgggactctccaggtctttaatttcattgataaatggagaaagcctgatgacttcagttatttcattaatcacattcacgagcattatggacttcgatcaacgcctccagagcaaacggaaccatacattggctgaggaaattgtgggcgggatttgcagctacatcattgcaagctttctgttcggtatattatcatctaagctaatccaattttggatgagtacagtctttggcgacgacgttaatcatatttcgctgatcttttccatcttgtacctgatcttctacatatgtgaactagtaggaatgtctggtatttttaccctagccattgtgggtttattgcttaacagcaccagtttcaaggcagccatcgaggaaacgctgctgttggagttctggacttttctgtctcgcatagcatttctgatggtgttcacattcttcggcttgcttattcctgctcacacgtacctgtatatcgagttcgtggacatttattattccctgaatatctatttgaccttgatcgtgctcaggtttctcactttattattgatcagcccagtgctgagcagggtgggccacgaattctcctggcggtggatttttattatggtgtgctctgaaatgaaaggaatgccaaacattaatatggctctgttgttagcatacagcgacctttacttcggcagtgacaaggagaagagccagatactcttccatggcgttctcgtatgcctgattactctggtcgtgaacaggtttatacttcccgtcgcagtgactatattgggactgagagatgcaacttccaccaaatataagagcgtgtgctgcaccttccagcatttccaggagctgacaaaaagcgcggcctccgctctgaaattcgacaaggatctggccaacgccgattggaacatgatcgagaaggcaattaccctggagaacccatatatgctaaatgaagaagagactacggaacaccagaaggtcaagtgtcctcactgcaacaaagagatcgacgagatctttaacacggaagccatggagttagcaaataggcgcctgttgtcagctcagattgcctcataccaacggcaataccgcaatgaaattttgtctcagagcgccgtgcaggtcctcgtgggcgcggctgaaagcttcggcgaaaaaaagggcaagtgtatgagccttgatactattaagaactattccgagagtcaaaagacggtgacctttgcgaggaagttacttttgaactgggtctataatacgcgcaaggagaaagagggcccctccaagtacttcttcttccgcatatgccatactattgtatttactgaggaatttgaacacgtgggatatttggttattttaatgaatatattccccttcattatatcttggatatcccaattaaacgtcatttaccactcggaactgaaacatacaaattattgtttcctgactctctatatcctggaggccctgctcaaaatcgctgcgatgcgaaaagacttttttagtcacgcttggaatatctttgaactcgctattactctcatcggtattctgcacgtgattttaatcgaaatagacacaattaaatacattttcaatgagacagaggtgattgtcttcattaaagtggtccaattcttcaggatccttagaattttcaaacttatagcccctaagctactacagattatcgacaagcgcatgtctcaccagaaaactttttggtacggaattctgaaagggtatgttcagggggaggctgacattatgaccattatcgaccagattaccagcagcaagcagatcaagcagatgctgctgaagcaagtgattaggaatatggagcacgccataaaagagctggggtatctcgagtatgatcaccctgaaattgccgtgaccgttaagacaaaagaggagatcaatgtgatgctgaatatggctacagaaatactgaaggcatttggtctcaagggcatcatttccaaaacggagggtgctggcataaataagcttataatggctaagaagaaagaggtgctcgactcacaaagtattatccgtccgttaacagtggaggaggtgctttaccacataccttggttggataagaataaggactatatcaatttcatacaggaaaaggccaaagtagtaacattcgactgcggcaatgatatttttgaagagggggacgagcctaaaggtatctatattattatctcaggcatggtgaagttggagaagtcaaaaccagggctgggcattgatcaaatggtggaatctaaagagaaggacttcccgattattgatacagactacatgctgtctggcgaaatcattggtgagattaactgtttaacaaacgaacctatgaagtattccgccacttgcaagacagtggtcgagacgtgcttcattcccaagacacacctttacgacgcattcgaacagtgttcccccttgattaagcaaaaaatgtggctgaagctgggactggcgattactgctagaaaaatacgcgagcatctgtcctatgaggattggaactataatatgcagctcaaactttccaatatttatgttgtcgatatcccgatgtccactaaaacagatatttacgacgagaacctcatctatgtcatactgattcacggggcggtggaggattgcctgctgcggaagacctacagggctccatttctgataccgattacatgccatcagatacagtctattgaagacttcactaaggttgtgataatccagactcccatcaacatgaagacattcagacgcaatatcagaaaatttgtccccaaacacaagagctacctcacccctggactcataggaagcgtggggacactggaagaaggcattcaggaggagcgtaatgtcaaagaggatggagcccattcagctgccacggcccggtcccctcagccttgcagtcttctgggaacaaagttcaactgcaaagaatccccccggatcaacctcaggaaggtgagaaaggaatag

SEQ ID NO: 135683 - DNA, 3390 bp, synthetic construct
  misc_feature 1..3390: note = Description of Artificial Sequence: Synthetic coding sequence
  source 1..3390: mol_type = other DNA
atggcggggatcttcaaggagttttttttctccactgaggacctgcctgaagtcatattaactttatccctgattagtagtatcggcgcattcctaaatagacatctggaggattttcctattcccgtgccagtcatcctctttttgctgggctgttctttcgaagttctttctttcacctcttcccaagtgcaaaggtatgctaacgcaatacaatggatgtctcctgatttgttcttcaggatctttacaccagtggtatttttcactaccgcattcgatatggacacctatatgctgcagaaacttttttggcagatcctgctgatttctatccccggttttctggtgaattatatcctggtcctgtggcacttggcctcggtcaatcagctgttgttgaagccaacgcagtggctactctttagtgcaatcttggtgtcatctgaccctatgctgacagcagccgcaatccgggacctagggctgtctcggagcttgattagcctgatcaacggtgagtcactcatgacatcggtcatatccctgattacattcactagcatcatggacttcgaccagcgcctgcagtctaagaggaaccacaccctggcggaagaaatcgtgggagggatctgctcttatattatcgcctcttttctcttcggtatcttgtcaagcaaactcattcagttttggatgtcaacagtgttcggtgatgacgttaatcatatcagtctcattttctcaatcctatatttgatcttctacatctgcgagctggtcgggatgtccgggatttttactttagcaatcgttggcctcctgttgaacagcaccagcttcaaagctgccatagaggagacccttcttctggaattcttgacactcctgctgatctctcctgtcctttcccgggttggtcacgagttctcttggcggtggatcttcataatggtgtgctcagagatgaaaggtatgcctaacattaacatggctctgctccttgcatatagtgatctgtacttcggttctgataaggagaagtcacagatcttgttccacggagtgcttgtgtgtctgatcaccctagtggttaacagattcatactcccagtagcagtgaccatcctcggactgagggatgctacctctactaagtataaaagcgtgtgctgcacgtttcagcactttcaggagctaacaaaatctgccgctagtgcactaaagtttgataaggacctcgctaacgcagattggaacatgatcgaaaaggccattacgttggaaaacccatacatgctgaacgaggaagagaccaccgagcaccagaaagtgaaatgcccccactgtaataaagaaattgacgaaatctttaataccgaagccatggaactcgccaataggcggttactgtctgcccagatcgccagctatcagagacagtatcggaacgagattctctcccagtctgccgtgcaggtcttagtgggcgccgcagagagcttcggggagaaaaaaggaaagtgtatgagcctcgataccattaaaaattattccgagagtcagaaaaccgttacattcgctaggaaactgctgcttaactgggtgtacaatacacggaaggaaaaggagggaccatctaaatatttcttcttccgcatttgccacactatagtgttcaccgaggagttcgagcatgtggggtacttggtgatccttatgaatatctttcctttcattatctcttggatcagccagctcaacgtgatctatcattccgagctgaagcacactaattattgcttcctgactttatatatattggaggcccttctgaaaatcgccgctatgcgcaaagacttcttttcacacgcttggaacatcttcgagcttgcaatcactcttatcggaattctgcatgtcatccttatcgagatcgacacaataaagtacattttcaacgagacagaagttatcgtttttattaaagtggtgcagttcttccggatccttcgtatttttaagttgattgcgcctaaacttctgcagattattgataaaagaatgagccatcagaaaacattctggtatggcatcttgaaggggtacgttcaaggggaagctgacatcatgactatcattgatcaaattacatcatccaaacagatcaagcagatgctgctaaagcaggtgataagaaacatggagcatgccataaaggagctgggatatctggaatacgaccatccagaaatcgccgttaccgtgaagacgaaagaggaaatcaatgtcatgctgaacatggcaacagagatattgaaagccttcggactcaagggtataatctccaagactgagggagcaggtatcaataagctcatcatggctaaaaagaaggaagtcctcgattctcagagtattataagaccattaaccgtggaggaagtgctctaccatattccttggctcgataagaataaggattatattaattttatacaggaaaaggccaaggtggttacctttgattgcggtaatgatatttttgaggagggcgacgagcccaagggaatttatattatcattagtggcatggtcaaactggaaaagtccaaacccggcctcggaattgaccagatggtggagtctaaagaaaaggacttcccgatcattgacacggattacatgcttagtggcgaaataataggcgagattaattgtctcacgaatgaacccatgaaatattccgcaacatgtaagacggtcgtagagacctgtttcattcctaagacgcacctgtacgacgcgtttgagcagtgctcccccctcattaaacagaagatgtggctcaaactgggactggccattacagcaaggaagatccgggagcatttgtcatacgaagactggaactataatatgcaactgaaactctccaacatatatgtggtggatatcccgatgagcaccaagactgatatctatgatgaaaacttaatatatgtgatcctcatccatggtgccgtggaggactgcttactccgcaaaacctatagggctccgttcctaattcccatcacatgccatcagattcagtcaatcgaagactttacaaaggtggtgatcatacagacacccattaacatgaagacttttagaagaaacattaggaagttcgtgccaaaacacaaatcatatctcactcctggcctaattggcagcgtgggcactctagaggaagggattcaggaagaaagaaacgtgaaagaagacggagcacactccgcagcaaccgcaaggtcgcctcagccttgctctcttctgggaaccaagttcaactgtaaagaatcaccccgaatcaaccttaggaaagttcgaaaggaatag

SEQ ID NO: 135684 - DNA, 2079 bp, synthetic construct
  misc_feature 1..2079: note = Description of Artificial Sequence: Synthetic coding sequence
  source 1..2079: mol_type = other DNA
atgcagggcaagaagcctggaggttcatcaggggggggcagaagtggcgaactgcagggagatgaggctcagaggaataagaagaagaagaaaaaggtgtcctgcttcagcaatatcaaaatattcctagtaagcgaatgtgctttgatgctcgctcagggcaccgtgggcgcctatctcgtctctgttttgacgacattggaacgccggtttaacctgcagtctgcagatgtgggcgttatcgcctcctccttcgagatcggcaacttggcccttattttattcgttagctactttggggctcggggacaccggccacggctgataggctgcggcggtatcgtgatggccctcggcgccctgcttagtgctttgcctgaatttctcactcaccaatacaagtacgaggctggcgaaatcaggtggggagccgaaggcagggacgtatgcgcagcaaatgggagtggcggggatgaggggcccgatccagatcttatttgtaggaatagaacagctaccaacatgatgtaccttctgctgatcggggctcaggtattgctgggcataggtgctacccctgttcagccgttaggcgtgagctacattgacgaccacgtgcggaggaaggactctagtctatacattggcatcctgtttactatgttagtgttcggaccggcgtgcggatttattttgggcagtttctgtaccaaaatatatgtggacgctgtcttcattgatacaagtaacctggacatcacccccgacgacccacggtggatcggcgcatggtggggtggttttttactgtgcggcgcactcttgttcttttcaagcttgctcatgttcggctttccacagagcctgccacctcactctgagcctgctatggagtcagagcaggcgatgctgagtgaacgagaatacgaaaggcctaaaccatccaacggggtactccgccatcccctcgagcccgactccagcgcatcatgctttcagcaactccgggtcattccaaaggtgacaaagcacctgttgtcaaatccagtttttacatgcatcatccttgctgcttgtatggagatagccgttgttgccgggttcgctgcgttcctgggcaagtatctggagcagcaattcaacctgacaacgagcagcgctaatcagctgcttggcatgactgctatcccgtgcgcctgcctggggatctttctagggggactgctggtgaagaagctgagcctgagcgccctaggcgcgatcaggatggctatgctcgtaaatctggtctctacagcctgttatgtgtctttcctgttcctgggatgcgataccggaccggtggccggggtcacagtaccatacggcaactccaccgctcccggttcggcgctggacccttattccccatgcaacaacaactgcgaatgtcagaccgacagcttcactcctgtctgtggtgcagacggtatcacctacctttctgcttgttttgccgggtgtaattctaccaatctgaccggctgtgcctgcctcacaacggtacccgccgaaaatgcaaccgtggtcccgggcaagtgcccttctcctggatgccaggaggcattcctgactttcctctgtgtgatgtgcatctgtagtcttatcggagcgatggcacagacaccttccgttattatcttgattcgtacggtctctcccgagctcaagtcttacgccctgggcgtgctgtttctgctcctacgattactcgggtttattcctcccccactcatcttcggcgcaggcatcgattccacttgtttgttttggagtaccttttgcggggaacagggtgcatgcgtactgtacgataatgtcgtgtatcggtatctttacgtgagtatcgcgattgcattgaaatcattcgcttttatcctgtataccactacctggcagtgtcttcggaagaactataagaggtatatcaagaaccatgagggtgggttaagcacgagtaccgagtaccaggatattgaaaccgagaagacgtgcccagaatcgcattctcctagcgaggacagcttcgtgcggagttag

SEQ ID NO: 135685 - DNA, 2076 bp, synthetic construct
  misc_feature 1..2076: note = Description of Artificial Sequence: Synthetic coding sequence
  source 1..2076: mol_type = other DNA
atggatcagaaccaacatctgaacaagacagccgaagcccagccttctgagaataagaaaacacggtattgcaacggattgaaaatgttcctcgctgcgttgtctctgagctttatagccaagacattaggagccatcatcatgaaaagtagcattatccatatcgaacggcggtttgaaattagtagtagcctggtggggttcatcgacggatcgtttgaaataggtaatctccttgtgatagtgtttgtgtcctactttgggtcaaagctgcatcggcctaagctgataggcattggctgcttcatcatgggaattgggggcgtcctcaccgctttgcctcatttctttatgggctactataggtactctaaagaaacaaacattaactccagcgagaactccaccagtaccctgagcacctgcctgattaatcagatactgagtctgaatcgggctagccctgagattgtgggaaagggatgtctgaaggagtctggaagctatatgtggatctacgtatttatgggcaatatgctgcgagggattggagaaactcctatcgtcccacttggcttgtcatacattgacgattttgccaaggaggggcactccagtctctacctcggcattctgaatgcaattgctatgattgggcctatcattgggttcaccctcggttctcttttttctaagatgtatgtggatatcgggtatgtagatctctccacgatccggattactccaacagattccaggtgggtgggagcttggtggcttaatttcctcgtgtctggtcttttctctataatctccagtattcctttttttttcctgccccagacacctaacaagccccagaaggaaaggaaggcatccctgtctttgcatgtcctggaaactaacgatgaaaaagaccagactgccaacctcactaaccaaggcaagaacatcaccaaaaacgttaccggattttttcagagcttcaagtccattctgactaatcctctgtatgtaatgtttgtcttgctgacacttttgcaagtcagctcttatattggcgcgtttacctacgtttttaaatacgtggagcaacaatatggccagccatcgtccaaagccaacatactcctcggggtgatcacaattcccatcttcgccagcggcatgtttctgggtggctatatcataaagaaattcaaacttaacacggtcggtattgctaagttttcatgcttcacagccgtgatgagtttatcgttttacctgttatacttctttattctctgcgagaataaaagcgtggccggtctcacaatgacatacgacgggaacaatcctgtcacctcacatcgcgacgttcctctgagctactgcaatagcgactgcaactgcgacgaatcccagtgggagccagtttgcggcaacaatggcatcacctacattagtccctgcctggcgggttgcaagagctctagcgggaataagaaacctatagtattttataactgtagctgtctggaagtgactggtttgcaaaatcgtaattattcagcacacctcggcgaatgccctcgggacgatgcctgcacacgaaagttctatttcttcgtggccatacaggttttaaacctgtttttctccgccctgggcgggacctcccacgttatgctgatcgtgaagattgtacagcctgagctcaagtcattagcattgggctttcactccatggtgattcgggcactggggggcattctagccccaatatacttcggtgccctaatcgatacaacttgtattaagtggtcaacgaacaactgcggcacaaggggcagctgcagaacatacaattcaaccagtttctcaagagtgtacctgggactatcttccatgctgagggtgtcctctctagtgctctacatcattctgatctacgccatgaagaaaaagtatcaggagaaggatattaacgcctcagagaacggctccgtaatggatgaagccaacttggagagcctgaacaagaataagcactttgtgccctcagccggagcggatagcgaaactcactgttag

SEQ ID NO: 135686 - DNA, 2109 bp, synthetic construct
  misc_feature 1..2109: note = Description of Artificial Sequence: Synthetic coding sequence
  source 1..2109: mol_type = other DNA
atggatcagcatcagcatctgaataagacggcagagtccgcctctagtgaaaagaaaaagaccaggaggtgtaacgggtttaaaatgtttttggccgcactgtccttttcatatattgccaaagccctgggagggattatcatgaagatttccattacacagatcgagagacgctttgacatcagctccagcctggctgggctcattgatggctctttcgagatcggtaacctcctggtcattgtctttgtgtcttacttcggatccaaactgcacaggccaaagttgattgggatcgggtgtcttcttatggggacaggctccattcttacatctctaccccattttttcatggggtactataggtactccaaagagacgcacataaatcctagtgaaaattcaacttccagcctctcaacttgcttgatcaatcagaccctctctttcaacggaacaagccctgagattgtggaaaaagactgtgtcaaagagagcggctcccacatgtggatatatgttttcatgggcaatatgctgcgtggcatcggggaaactcctatcgttccccttggcatttcttacatcgatgacttcgcaaaagaggggcacagctctctgtatctgggctccttaaacgcgatcggtatgattggccccgtaattgggttcgctttaggatccctgtttgccaaaatgtatgtggacattggctatgtggacctgtctacaattcgcattacccccaaagatagcaggtgggttggcgcttggtggcttggatttctggtctccggtctcttcagcattatcagttctataccattcttctttcttcctaagaatccaaacaagcctcagaaggagagaaaaatctcactgtcactgcacgtgctcaagaccaacgacgatcggaaccaaaccgctaatctgaccaatcagggtaaaaatgtgaccaaaaacgtcacaggcttcttccagtctttaaagtctatccttaccaaccccctttatgttatttttctactgctgacgctactacaggtgtcttcgtttatcggatccttcacgtatgtgtttaaatacatggagcagcagtacggccaatcagcctcccacgcaaatttccttctgggcataattacgattcctaccgttgctaccggcatgtttctgggcggattcatcatcaagaaattcaaattaagccttgttggcatcgcaaaatttagcttcctcaccagcatgattagttttctgttccagctgctatactttcccctgatttgcgagagcaagtccgtcgcaggcttgaccctcacctacgatgggaacaactccgtcgcttctcacgtcgatgtgcctctgagttactgcaacagcgaatgcaactgtgatgaatctcagtgggaaccagtgtgcggtaacaatggcattacatacttatccccatgtctggcagggtgcaagtccagctctggcatcaagaaacacacagtcttctacaactgctcatgcgtcgaggtgaccggcctccagaaccgaaattattctgcccacctaggggaatgccctagggataatacatgtacaaggaagttcttcatctatgtcgctattcaagtgattaattccctgttttccgctactggggggactacatttatcctgctgaccgtgaaaatagtccagcccgagctaaaagccctcgcaatgggctttcagtcaatggtaatacggactctcggagggattctggcccccatctactttggcgcactgatcgacaaaacttgcatgaaatggtcgactaacagctgcggggctcagggcgcgtgccggatctacaacagcgtattctttgggcgcgtctacctcggactgtccatcgctctgcgattcccagcactcgtgctttatatcgtgtttatctttgcgatgaagaagaaattccagggtaaggacacaaaagctagcgataatgagcgtaaggtcatggacgaggcaaatctggagtttctgaataatggagaacatttcgtgcctagcgccggcacggactccaaaacatgcaatctggacatgcaggataacgcagcggccaactag

SEQ ID NO: 135687 - DNA, 2109 bp, synthetic construct
  misc_feature 1..2109: note = Description of Artificial Sequence: Synthetic coding sequence
  source 1..2109: mol_type = other DNA
atggaccaacatcaacacctcaacaaaacggctgagagtgccagcagcgagaagaagaagactcgtcgatgtaatggattcaaaatgttcctcgccgctctgagtttctcctacatagcaaaagctctgggggggattatcatgaagatcagcattacacaaatcgagagaagatttgacatatccagttccttagccggattgatagatggttctttcgagatcgggaacctgctagtgattgtcttcgtaagctactttggctctaaattgcatcgccccaaactcatcggcatcgggtgtttactcatgggcactggatctattctgacttcactgccgcacttttttatgggatactacagatattcaaaggaaactcacattaatcccagcgagaactccaccagcagtttgtcaacttgtctgatcaaccagactcttagcttcaatggcacgtcaccagagatagttgagaaagactgtgttaaggagtcaggatcgcacatgtggatctatgttttcatgggcaatatgctgaggggaattggtgaaactcccatcgtaccactgggcatttcctatatcgacgatttcgccaaggagggccatagtagcctctacttagggtctctgaacgctatcgggatgattggacccgttattgggtttgccctgggcagtctctttgctaaaatgtatgtcgatattggttatgtcgacctcagcacaatacgaattaccccaaaagatagccgatgggtgggagcctggtggctgggttttcttgtgagcggactcttctcaatcatcagcagtatcccattctttttcctgcctaagaatcccaacaagccacagaaagaaagaaagatcagcctctcacttcacgtgttaaagactaacgacgaccggaatcagacagccaacttaactaaccaggggaagaacgtgaccaaaaacgtgaccggattcttccagtctctgaaatccatccttactaatccactatacgtcatttttctgttattaaccttgcttcaggtgtcttcctttattgggtcctttacctacgtgtttaagtacatggaacagcagtacggccagagcgccagccacgcgaattttctcctggggataatcactatcccgacagttgctactggcatgtttttggggggatttattattaaaaagtttaagctgtcgctcgtaggcatcgccaagttttccttcctgactagcatgatatcgtttctctttcagctgctgtattttcctctgatatgcgagagcaagtctgtggccggactgacgttgacctacgacggcaataattctgtggcatcccacgtggatgttcccctgtcctattgtaatagcgagtgcaattgtgatgagtcccagtgggagcccgtatgtgggaacaacggcatcacatacctcagtccatgcttggccgggtgtaaatcaagctccgggattaaaaagcacactgtcttttacaactgctcttgtgtggaagtcaccggactccaaaatagaaattactcagcccatctcggagaatgcccccgggacaatacatgtacccgcaaatttttcatctacgtcgcaatccaggtgataaatagccttttcagcgcaactggaggcaccacatttatcctgctgaccgtcaaaatcgttcaaccagaattgaaggccctggccatgggtttccaaagtatggtgattcggacactcggcggaattcttgcaccaatctacttcggcgctcttatagacaagacttgcatgaagtggagcactaatagttgcggcgcgcagggcgcttgccgtatctacaactccgtcttttttggccgggtgtatctgggactgtcgatagcgctgagatttcctgctctggtgctgtatattgtcttcattttcgccatgaaaaagaagttccagggtaaagatacaaaggcaagcgacaatgagagaaaggtgatggatgaagccaacctcgaattcctgaataacggcgaacatttcgttccttccgccgggaccgactcaaagacttgcaacctcgacatgcaagacaatgcggccgcaaactag

SEQ ID NO: 135688 - DNA, 2247 bp, synthetic construct
  misc_feature 1..2247: note = Description of Artificial Sequence: Synthetic coding sequence
  source 1..2247: mol_type = other DNA
atggatcagcaccagcatctaaacaaaaccgccgagtctgcctcctctgaaaagaaaaaaacccggcggtgcaatgggttcaagatgttcttagctgcactgtcctttagttatattgccaaagccctgggcggtataattatgaaaataagtatcacacaaatagagagaagatttgacattagctcatctctggcaggactgatagatggcagcttcgaaattggcaacctgttagttattgttttcgtaagctattttgggtccaagctgcaccggccaaagttaatcgggattggatgtctacttatgggaacggggtcaatcttaacatcactgccacatttttttatgggatattatcgctattccaaggaaactcacataaatccctcagaaaatagtacgagttcactttcaacgtgcctgatcaaccagacgttgagcttcaatgggactagccctgagatcgttgaaaaagattgtgtgaaggaaagcggttcccacatgtggatctacgttttcatgggaaacatgttaagaggaattggcgaaactcccatcgtgcccctgggaatttcatatattgacgatttcgccaaagaaggacactcaagcctctacttaggatcgctgaatgccatcggcatgataggaccagtgatcgggtttgccttgggatctcttttcgccaaaatgtatgtcgacattgggtacgttgacctcagtacaatcagaattacgcctaaagatagcaggtgggtcggcgcttggtggttggggtttctggtttcagggttgttttccatcatttcttctatcccatttttcttcttacccaagaatccgaacaagccacaaaaggaacggaaaatctcgctttccctgcacgtcctcaagacaaacgacgacagaaaccagactgcaaacctgacaaatcaaggtaagaatgtgaccaagaatgttaccggtttcttccaatccttgaaatcaatcctgacaaatcctctgtacgttattttcctgctgctgactctgctccaggtgagttctttcattggatcgttcacgtatgtgtttaagtacatggagcagcagtatgggcaatctgcgtcccatgcaaattttcttcttggcatcattaccatacccactgtcgccactgggatgttcctcggtggcttcataattaaaaagtttaagttatcactcgtggggatagccaagttctcctttctcacctcaatgatctctttcttattccagctgctctattttccgttaatctgtgaaagcaaatccgtggcgggtcttaccctgacatacgacggcaacaattccgtcgcctcacatgttgatgtgcccctgagctattgcaattccgagtgtaactgtgatgaatctcagtgggagccagtgtgtggcaataatggcatcacttacctgtcaccctgtctggcaggctgcaagtcctctagtgggattaagaaacacaccgttttctacaattgttcctgtgtcgaagtcaccggccttcagaatagaaactattcagcccacctgggggagtgccctcgggataacacctgtactaggaaatttttcatatatgtagccatccaggtgatcaactccctatttagtgcgactggtggaactacctttattcttctcaccgtcaagattgtgcaacccgaacttaaagctctggccatgggatttcagagcatggtgatccggaccctcgggggaatcttggctccaatctatttcggagcactcattgacaagacctgcatgaagtggtctactaactcgtgtggggcacagggagcttgccggatctacaacagcgttttctttggaattgtgcaacctgagcttaaggccctcgctatcggcttccacagcatgatcatgcggtccttgggtggtatcctagtcccgatctacttcggggctttgatcgatactacttgcatgaaatggtctaccaattcctgcggggcccggggagcttgccgtatatacaatagcacttatctgggcagggcattctttggacttaaagtagctcttattttccccgtcctggtgctgcttaccgtttttatttttgtggtacgcaaaaagtcacacgggaaagacacaaaggtgctggaaaacgaaagacaggttatggatgaggcaaatctggaattcctgaatgactcagagcacttcgttccgtctgcagaggaacagtag

SEQ ID NO: 135689 - DNA, 2139 bp, synthetic construct
  misc_feature 1..2139: note = Description of Artificial Sequence: Synthetic coding sequence
  source 1..2139: mol_type = other DNA
atggatacatctagcaaagagaacattcagttgttctgtaaaaccagcgtgcagcctgtgggtcggcccagtttcaaaacggagtatccctcatctgaggaaaagcaaccttgttgtggcgagttgaaagtttttctctgcgcactgagttttgtttactttgccaaggccctggcagaggggtacctgaagtccacaatcacccaaatcgagagaagatttgacatcccgagtagcttagtaggagtgatcgatggctcattcgaaatcggcaatctgctcgtcatcaccttcgtgtcctatttcggcgcaaaattgcaccggcctaagataatcggcgccgggtgtgtgataatgggggttggaacactcctgatcgcaatgccacagtttttcatggaacagtacaaatacgagcgctactccccatcctctaacagcacattgagcatttcaccctgcctgctggagtcctcttcacagctcccagtcagtgtcatggaaaagagtaagagtaagatatctaatgagtgcgaagtcgataccagtagtagcatgtggatctatgtattcttgggcaacctcctgagaggaatcggtgagacgcccatccagcctcttggcatcgcgtacctcgacgattttgcatccgaggacaacgccgcgttttacatcggctgcgttcaaaccgtggccatcatcggccccatcttcggcttcttgctcgggtccctgtgcgccaagctctacgtagatattggcttcgtaaacctggaccatattactatcactccgaaggacccacagtgggtgggggcctggtggctggggtaccttatcgcaggaattatttctttactggctgccgtgcccttctggtatctgcccaagagtttgcctcggtctcagtcccgggaggattccaacagtagtagtgagaagtccaagttcatcattgacgaccatacagattatcaaacccctcagggagaaaatgccaaaattatggagatggctagagacttcctcccatctctgaaaaatcttttcggaaatccagtgtattttctttacctgtgtacatcaacagtgcaattcaactctttatttggtatggtaacatataagcctaaatacatcgagcaacagtacgggcagtcgagctctagagcaaatttcgttataggtctcattaacatccccgcagtcgctctgggcattttctccggaggcattgtgatgaaaaaattccggattagtgtttgtggggctgccaagctatatctcggttcatccgtgttcggttacctgctgttcctgtcactgttcgctctgggctgcgaaaactctgacgtggctggtctgactgtgtcttaccaagggacaaagcccgtgtcatatcacgaacgcgctcttttctcagactgtaacagtaggtgcaagtgttctgaaaccaaatgggagcctatgtgcggggaaaatggcattacctacgtgtccgcctgtcttgccggctgccagacatcgaaccgctctggaaaaaatatcattttttacaactgtacctgtgttggcattgccgcctcaaagagtggcaactcttctggcattgtgggcaggtgccagaaggataacggctgccctcagatgttcctgtattttctagttatcagcgtaattacgagctacacattatcgctcggaggtattcctggctacatcttgctccttagatgcatcaagcctcagctgaaaagcttcgccttaggcatttacaccctcgccataagagtgttagcaggcatcccagctcctgtgtattttggagttctcattgacaccagctgcctgaaatggggcttcaaacgctgtgggagcagggggagttgtcggctatatgacagcaacgtgttcaggcacatctatctcgggttgactgtaattctgggcacagtgtccattctgcttagcatagctgtcctgtttatcctgaaaaaaaattatgtgagcaagcatcggagctttattaccaaaagggagagaaccatggtctccacacgctttcagaaagaaaattacaccacgagcgaccacctcctgcaacctaactactggcctggaaaggagactcagctgtag

SEQ ID NO: 135690 - DNA, 2193 bp, synthetic construct
  misc_feature 1..2193: note = Description of Artificial Sequence: Synthetic coding sequence
  source 1..2193: mol_type = other DNA
atggacacgtcctctaaggaaaacatccagctgttctgtaagacaagcgtgcagccggtcggtcgccctagcttcaaaactgaatacccatcatctgaagagaagcagccgtgctgtggagagctgaaggtttttctgtgcgccctttccttcgtgtactttgccaaagccttggccgagggctacctgaagtctactattacacagattgaacgacgatttgacattcctagttcattggtgggcgtcatcgacgggagcttcgaaatcggaaacttgttggttataaccttcgtgagctatttcggagcaaagctgcacagacccaagataatcggggcaggatgtgtgatcatgggcgttggtactctcctgatcgctatgccacagttttttatggaacaatataaatacgagcggtacagtccttcaagcaactccacactttctatcagtccatgcctgttagagagcagctcacagctccccgtgtctgtgatggagaagagtaagagcaagatcagcaacgagtgcgaagtagatacaagttcttccatgtggatctacgtgttcctggggaacctgctgaggggaatcggagaaacccctatccagccactgggaatcgcgtacctggacgattttgctagcgaggacaacgcagccttttacatcggatgcgtgcagaccgtcgccattattggtccaattttcggttttctgcttgggagtctgtgcgccaaattatacgtggatattggcttcgtgaatttggaccacattacaataacaccgaaggatccgcagtgggtgggcgcctggtggctgggctacctaatagcaggtattatttctttgctggccgccgttccgttctggtacctacccaagagccttcccagaagccagtcaagagaggactcaaatagttcaagcgaaaagagcaagtttatcattgacgatcacactgattaccaaaccccacaaggagaaaacgcaaaaattatggagatggcaagggacttcctaccgtccctcaagaatctattcggcaatcccgtgtacttcctgtacctttgcactagcacagtccagttcaacagtttatttggcatggtgacttacaaacctaagtatatcgaacaacagtatggacagagttcgtctcgcgcaaacttcgtgatcggcctcattaatattcccgcagtcgctctaggcatcttcagtggagggattgtaatgaaaaaattccgtatcagcgtatgcggcgcggccaaactgtatctgggcagttccgtgttcggctacctactgtttctgtccctcttcgcgttgggctgcgagaactcggacgtggcaggattgaccgtttcctaccagggtactaagcctgtgtcctaccatgaaagggccctgttctcagattgtaattcccgctgcaagtgcagtgagacaaagtgggagccaatgtgcggagaaaatggcattacttatgtttcagcttgtttggcaggctgccaaacatctaaccgttccggcaagaacatcatcttctacaattgtacctgcgtgggtatagccgcatctaaatcaggcaattcgtctgggatcgtcggcaggtgccagaaagacaatgggtgcccccaaatgtttctgtatttcctggtgatttcagtgatcactagctacacgctctccctgggcggcatccccggatatatcttgctgctccgctgtataaagcctcagctgaagtccttcgcactgggcatttataccctcgccatacgggtcctggcaggcattccggcgcctgtgtattttggcgtcctcatagacacctcttgtcttaagtggggatttaagagatgtggaagcagaggaagctgtaggttgtatgattctaatgtgtttcgatatcagatcaaaagcattccagcctcacattgctacagcatacctgacctgcacaacgccactgacacgaataagttcagctgtcacttcacagcctgtaaaacctacatttccgggacaaactgcgatactgggcactctgtgaattcccctaagcattgcagtacattccatttcaaggaaaaactctgctttaagacccagaagttctacaaccaggagagaaaaaataatggcgtctacaagattccaaagggaaaactacactataaatag

SEQ ID NO: 135691 - DNA, 1992 bp, synthetic construct
  misc_feature 1..1992: note = Description of Artificial Sequence: Synthetic coding sequence
  source 1..1992: mol_type = other DNA
atggatacttctagtaaggaaaacattcagctcttttgtaaaacatccgtccagccagtgggacgtccctcatttaaaaccgagtaccctagtagtgaggagaagcagccctgttgtggagaactaaaggtttttttatgcgcattgagcttcgtctacttcgccaaggcactagccgaaggctatctaaagtcgactatcacacagattgaacgacgctttgacatcccatctagtctggtgggcgttatcgacggcagcttcgaaatcgggaacctccttgtgataactttcgtaagctatttcggagccaaattgcatagacccaaaattataggagccggatgtgtcatcatgggtgtcggtacgttgctcatcgccatgcctcaattcttcatggagcagtataagtatgagagatatagcccttcctccaattcgacactgagcatctctccctgtctgctggagagtagcagccagctacccgtgtccgtgatggaaaaatccaaatccaagattagcaacggatgcgtgcagaccgtcgcaattatcgggcccattttcggctttctgttgggatccctgtgtgccaaattgtatgtggatattggatttgtgaatctggaccatattaccataactccaaaggatccgcaatgggtgggggcctggtggctgggttacctcatcgctggcatcatcagccttcttgccgctgttccattttggtatctgcccaagagcctgcctcgctcgcagtctcgagaggactcgaactctagctctgagaagtcgaagttcataattgatgaccacaccgattatcaaacaccccagggtgaaaacgcaaagataatggagatggctcgcgacttcttgcccagcctgaaaaacctgtttggcaacccggtctatttcctgtacctctgcacatcaactgttcagttcaacagtctgtttggcatggtgacatacaagcccaaatatatagaacagcagtacggacagagtagcagtcgggcgaattttgtcattgggcttatcaacattccagcggtcgccctcggtatcttttccggggggattgttatgaagaagtttcgtatcagtgtgtgtggagcagctaagctgtacctgggcagtagcgtgtttggatatctcctgtttcttagcctgttcgccttagggtgcgagaatagtgacgtagccggcttaacggtgtcttaccaggggaccaagcccgtctcatatcacgagcgcgccctgtttagcgactgcaacagcaggtgtaagtgcagcgaaacgaaatgggagccaatgtgcggagagaacggaatcacttatgtaagtgcctgtctcgctggctgtcagacttcaaaccgttccggtaagaatatcatattttacaactgcacatgtgtgggtatagccgcgtctaagtcaggcaatagtagcggtatcgttggaaggtgtcagaaagataacggatgcccacagatgttcctctacttcttggtgatcagcgtcatcaccagctatacactgagtcttggggggatcccaggctatatcctcctgctcaggtgcatcaagccacaactgaaatccttcgctctgggaatctacaccctcgcaatccgcgtgctcgcaggaataccggcccctgtgtactttggagtattaatcgatacttcttgcctcaagtggggcttcaaacgctgcggctcccgtgggtcttgccggctctatgactctaacgttttcaggcacatttacctcggcctgactgtcatcctaggaacggtaagtattcttctgtcaatcgcagtgttatttatcttgaaaaagaactacgtcagtaaacaccgttcgtttatcaccaagcgagagaggaccatggtgtctactcggtttcagaaagagaattataccacgagtgatcatctgctgcagccaaactattggcccggcaaagagacccaactctag

SEQ ID NO: 135692 - DNA, 1839 bp, synthetic construct
  misc_feature 1..1839: note = Description of Artificial Sequence: Synthetic coding sequence
  source 1..1839: mol_type = other DNA
atgggggtaggcactctgttgatcgccatgccccagtttttcatggaacaatataagtatgagaggtatagcccttcgtcaaacagtacgctgtcaataagtccctgcttgctggagagctcatcacaactccctgtgagtgtgatggaaaagtcaaagagtaaaatttctaatgaatgcgaagtcgatacaagctctagcatgtggatttacgtgtttctgggtaaccttctgcggggaattggcgagacacccatccaacctttgggtattgcttatctcgatgatttcgcctcagaagacaatgccgccttttatatcggttgtgtccaaaccgtggccattattggaccaatcttcggctttctactgggctccttatgcgcaaaactgtatgtagatatcgggtttgttaacctggatcacatcaccattacacccaaggacccccaatgggtgggagcctggtggctcgggtacctgattgccggcatcatttcattattggccgctgtgccattctggtacctccccaagagcctgccacgttcgcagtccagggaagactcgaacagttccagtgagaagagtaagtttattattgacgaccacaccgactaccaaaccccccagggagagaatgctaagatcatggaaatggctcgcgacttcttgccgtctctgaaaaacctcttcggtaacccggtgtacttcctgtacctctgtacaagcactgttcagtttaatagtctgttcggaatggttacttacaaaccaaaatatattgaacagcagtacgggcagtcttctagcagggccaacttcgtaattggactcattaacatccccgcagtcgcattagggatcttttcagggggaattgtaatgaagaagtttcggatcagtgtctgcggagccgctaagctctatttaggatcaagcgtattcggctacctcctctttctgtcattattcgccttggggtgcgagaacagcgacgtcgctggattaaccgtctcttaccaaggcacgaaaccagtcagttaccatgagagggccctgttctcagattgcaactccaggtgcaagtgtagcgaaaccaaatgggagcctatgtgtggagagaacggtatcacctacgtgtcagcgtgtttagccggatgccagaccagtaacagatccgggaaaaatattatcttctacaactgcacctgcgtaggaattgcagcttcaaagtctggaaactcaagcggtatcgttggcagatgccagaaagacaatggatgtccccagatgttcttgtacttcctggtaataagcgtgatcacaagctacaccctatcgttgggtggcatcccgggctacatcctgctacttaggtgtatcaagccccaactcaaaagcttcgctctcggaatatacacactggctatcagagttttggcggggatacctgcccccgtctacttcggggtgctgattgacactagctgcctgaagtggggattcaaacggtgcggctcaaggggctcctgtaggctttatgacagtaatgtattccgttatcaaatcaagtcaatcccagctagtcattgctactcaatcccagacctgcataatgctacagacaccaataaattctcttgtcatttcaccgcctgtaagacatacatttccggaacgaattgcgatacggggcatagcgtcaattcacccaagcactgttctacgtttcacttcaaagagaaactatgtttcaaaactcagaaattttataatcaggagagaaaaaacaatggtgtttataagatccccaagggcaaacttcattacaaatag

SEQ ID NO: 135693 - DNA, 2193 bp, synthetic construct
  misc_feature 1..2193: note = Description of Artificial Sequence: Synthetic coding sequence
  source 1..2193: mol_type = other DNA
atggacacgtcaagcaaggaaaatatccaacttttttgtaagacttcagtgcagccggtgggcaggccgtcgtttaaaaccgaataccccagctctgaagagaaacaaccttgctgcggggaacttaaagtcttcctatgcgccctctcctttgtgtacttcgctaaggcattggccgagggctatctaaaatctacaattacccagatcgaacggcggttcgacattccaagctctcttgtgggagtgattgatggctcttttgagatcggcaatctcctcgttatcacttttgtgtcctatttcggcgccaaactgcaccgccctaaaattatcggtgccgggtgcgtgatcatgggcgtgggtacattgctgattgccatgccacagttttttatggaacagtacaagtacgagcggtacagcccgagtagtaattccacattgtcaatatcaccatgtctgctggagtcatcttcccaactccctgtgtccgtgatggagaagagcaagtccaaaatcagtaatgaatgcgaggtagatactagttctagcatgtggatttacgtgtttcttggaaatctgctgagaggtataggagagacacccattcagccactgggtatcgcctacctggatgatttcgcgtctgaggacaacgctgcgttctatataggctgcgtgcagactgtggccatcataggacccatttttgggtttttgctgggcagcctatgcgcgaagctctacgtcgacattggttttgtgaacttggatcacatcacgatcacaccaaaagaccctcagtgggtcggagcttggtggttgggttatcttatcgctggtatcatcagcttgctggcagccgtccctttctggtacttgccgaaatctctgccccggagtcagagcagggaggactccaacagctcctctgagaaatctaaattcatcattgatgaccacacagactatcagacaccccagggtgagaatgccaaaataatggaaatggcaagagactttctgcctagtttaaagaacctcttcggcaatcccgtctactttttgtatctatgtacaagcacagtacagtttaattcactgtttggcatggtgacatataaaccgaaatacatcgaacagcagtacggccagtcttcttcccgggccaattttgtcatcggactcatcaacatccccgctgtggcccttggaatatttagtggcggcattgttatgaaaaagtttcggatctcagtatgtggcgctgctaagctttatctcggaagttccgttttcggctatctgctatttctctcgctttttgcactcggatgcgagaatagcgacgtagccggcctcacggtgtcatatcagggaaccaagcccgtctcttaccacgagagggccctgttctcagactgtaattccaggtgcaagtgttccgagacgaagtgggagcctatgtgcggagagaatggcataacgtatgtctccgcctgcttggccgggtgccagacttccaatcgctccggcaagaacattatattctacaactgcacgtgcgtgggaatcgcagccagcaagtcggggaactctagtggcattgtaggtaggtgccagaaggataatgggtgcccccagatgtttctctacttcctggtgattagtgtcatcacatcctacacactgagcctcgggggcatccccggatacattctgctgctgcgctgtataaaaccacagctgaaatctttcgccctcgggatctataccctcgcgattcgggtgctggctggcatcccagcccccgtgtatttcggggtgctgatagatacgagctgcttgaagtggggctttaagcgctgcgggtcacgcggcagctgtcgcctgtacgacagcaacgtgtttcgatatcagataaaatctataccagcgtctcattgctattctattccagacttgcataatgctactgacaccaacaaattcagttgccatttcacagcttgtaagacatacattagcgggactaattgtgacactggccattcagtcaattccccaaaacactgttcgacctttcactttaaagagaaattgtgtttcaaaactcagaaattctataaccaggaaagaaaaaacaatggggtttataaaatccctaagggaaagctccattataagtag

SEQ ID NO: 135694 - DNA, 1932 bp, synthetic construct
  misc_feature 1..1932: note = Description of Artificial Sequence: Synthetic coding sequence
  source 1..1932: mol_type = other DNA
atggggctgctcccaaaactgggggcttcccagggcagcgacacaagcaccagtcgtgctgggcgctgcgcaaggtctgtgttcggaaacattaaagtgtttgtcctgtgtcagggccttctccagctctgtcagctgctttatagtgcttactttaagtcttcattgacaacgatcgaaaaacgattcggcctgtcctcatcttcatccggtctgatcagtagcttgaacgaaatttctaacgctatactgataatatttgtgagttattttgggtctcgcgtccataggccacgactgatcggaatagggggcttatttctggccgcaggagctttcatcctgactctgccacactttttgagcgaaccatatcagtatactctggctagtactggcaataattcccgactgcaagccgagctatgccagaagcattggcaggacctccctccctctaaatgccacagcactacgcagaatccccagaaggaaacttctagtatgtgggggcttatggtggtggcacaactactggcagggatcggtacggtccccattcagcctttcggcatctcgtacgtggatgactttagcgagccctctaacagtcctctgtatatatctattctgtttgcaatcagtgttttcggccctgcattcggctatctgctaggatccgtgatgctccaaatttttgtggactatggacgggtgaatacagccgctgtgaacctggtccccggggacccccgatggattggagcgtggtggctgggtctgcttatttctagcgccctgcttgtattaacaagttttccattcttcttctttcctcgcgctatgcctatcggcgcaaagcgggctcctgctactgccgacgaagccagaaagctcgaagaggcaaaaagccgcggatctttggtggacttcattaaacgcttcccctgcatctttctgaggttgttaatgaactctctgttcgttttggtagtgttggcgcaatgtactttttcgagtgttattgccggtctgtcgacatttctaaataagttcttggagaagcagtacggcacctcagctgcctacgccaatttcctaataggggctgtgaacttacctgctgcggctctgggcatgctatttgggggcatactgatgaagcggtttgtgttcagcctgcaggccatccctcgtattgccactactataatcaccatttccatgattctatgtgtgccattgtttttcatgggctgctctactcctactgtagccgaagtgtatcccccatccaccagcagctccatccatccacagagtccagcttgtcgccgcgactgcagttgtccagattccattttccaccccgtctgtggggataacggcattgagtacctgtcgccctgtcatgctggatgctctaatattaacatgtcatcggctacctcaaagcagctcatctacctgaactgttcttgtgtcaccggcggctcagcttcagccaagaccgggtcgtgtcctgtgccttgcgcgcacttcctcctcccggccatctttttgatctcatttgtcagcttgattgcgtgtatctcccacaacccgctgtatatgatggtcctccgagtcgtgaaccaggaagagaagtcttttgcgattggggtgcaattccttctgatgagattacttgcctggctgccatcaccggccctgtacggcctgactattgaccactcttgtatcagatggaactccctgtgtctgggacgccgaggcgcctgtgcctactatgacaatgatgcacttcgggacaggtacctgggccttcaaatgggctacaaggcattgggaatgctactgctttgcttcattagttggcgtgtgaagaagaataaggaatacaacgtccagaaagccgcagggctgatttag

SEQ ID NO: 135695 - DNA, 1248 bp, synthetic construct
  misc_feature 1..1248: note = Description of Artificial Sequence: Synthetic coding sequence
  source 1..1248: mol_type = other DNA
atgggtctcctcccaaagctgggagccagccagggctccgatacctcaaccagtagagccggacgatgcgctcgtagcgtgtttggcaacatcaaagtgttcgttttgtgccagggactgttgcagctgtgtcaactcctctactctgcatactttaaaagctctctgactactatcgaaaaacgcttcggattgtcctcctccagcagtggcctgatctcaagcctaaacgaaatctcaaacgccatacttattatttttgtgtcatacttcggatcacgcgtgcacagacccaggttgattggcataggcggactgttcttagccgcaggcgcctttattctgacccttccgcactttctgagcgaaccgtaccaatataccctcgcctccactgggaataactcccgacttcaggcagagttgtgtcagaaacactggcaggatctcccacccagtaagtgccacagcacaactcaaaatccccaaaaagagacctccagcatgtggggcctaatggttgttgcacaactgcttgctggcatagggacagtgcccatccagccgttcggcatctcatatgttgatgatttttccgagccctctaactcacccctctacatttcaatcctcttcgcgattagcgtgttcgggccggcatttgggtatcttctgggtagcgtaatgcttcagatttttgtggattacggccgtgtgaatacagccgccgtgaatcttgtcccgggcgacccaagatggatcggcgcctggtggctcgggctgcttatatcgtcagccttacttgtgctgacatctttccctttttttttcttcccacgagccatgcccatcggcgctaaacgtgcccccgccaccgccgacgaagcgcggaaactggaagaagccaagagtcgaggctctttggtcgacttcatcaaaagatttccctgcatatttctcaggctgctgatgaatagcctgttcgttctggtggtcctcgcacagtgtacattttcatcggtgattgccggactgagcacatttttgaacaagttcctggagaagcagtacggtacgagcgcagcctacgcgaactttctcattgcccaccaggttctgtatattaggtctctactcccagctgccggcactgcaagggcacaaattctctcctccactaggtctgtggagaccatggagtcctccacaagtccactcgccatgcctgcggcagcaaccagcacatag

SEQ ID NO: 135696 - DNA, 2133 bp, synthetic construct
  misc_feature 1..2133: note = Description of Artificial Sequence: Synthetic coding sequence
  source 1..2133: mol_type = other DNA
atgcaaggcaaaaaaccgggagggtcttccggcggagggcggtctggagagttgcagggtgatgaagcccagagaaataagaaaaagaagaagaaggtgagctgtttttccaatattaagatcttcctggtgtcagagtgcgccctgatgctggcacaaggcaccgttggcgcctaccttgtatcggtcttgaccacactcgaaaggcgctttaatttgcagtcggcagatgtgggggttatagccagttcgttcgagattggcaatctcgcccttattctgtttgtctcatatttcggcgctcgtggtcacagaccacggttaataggctgtggaggaattgtgatggcgctgggcgcactcctatccgccctacccgaattccttactcaccaatacaaatacgaagcaggggagattcgctggggtgctgagggccgcgacgtttgtgcggccaacggttcaggaggcgatgagggacctgacccagatttgatttgcaggaaccgcacagccacgaatatgatgtacctgctgctgataggtgctcaggtgttgcttggcataggtgccacccctgtgcaaccattaggagtgagctacatcgatgaccacgtgcggcgcaaagactctagcctttatatcggaatattattcacgatgcttgtgtttggtcccgcctgtgggttcatccttggctctttttgcaccaagatatatgtcgacgcagtctttatagacacatctaacctggacattaccccggacgatccccgctggatcggggcttggtggggggggttcctgctctgcggagcattgctgttttttagcagcttattgatgttcggctttccccagagtctgccacctcacagcgagcctgccatggagagcgagcaagccatgctatcagagagggagtacgaacgcccgaaaccttctaacggggtactgcgtcacccattagagcccgacagctcagcctcctgtttccagcagctgagggtaatcccaaaggtgaccaagcacctgttatcaaatcctgtgttcacgtgtatcattttagctgcctgtatggagatcgcggtcgtcgcaggttttgccgcctttctcggtaagtacttagaacagcagtttaacctgaccacgtcttctgccaatcagctgctcggcatgacagcgataccctgtgcttgccttggtatctttttaggtggattgcttgttaaaaagctcagcctctccgctctgggcgcgatcagaatggcaatgctggtcaatctagtaagcactgcctgctatgtgagcttcctgtttttaggctgcgatactggcccagtcgccggggttacagttccttacggcaattctacagctcctggaagtgccctggatccctacagtccatgtaacaacaactgtgagtgccagaccgactcatttactcctgtgtgtggcgctgatggtataacatatctctcagcatgtttcgccgggtgtaattctacgaacctaacaggttgtgcctgtctgacaaccgtgccggcagaaaacgccacagtcgtgccaggcaaatgccccagccccggttgccaggaagccttcttgacctttctgtgcgtgatgtgtatctgcagtctcattggggctatggctcagacaccctcagtcattatcctgatcagaactgtatcgcccgagctaaagtcctatgcgttaggtgtgctcttcctgctcctccggctccttggtttcattcctcctccgctaatctttggggccgggattgattcaacctgtctcttctggagcacattttgtggagagcagggagcctgcgtcctctatgataacgtagtctatcggtatctgtacgtgtccatcgccatcgctctgaagtccttcgcctttatcttgtatacaacaacttggcagtgtcttaggaagaattataaacggtacatcaaaaaccatgaggggggactctctacatcagagttcttcgcaagcacacttaccctggacaatctgggcagagatccagtccccgctaatcagactcacagaactaaattcatctacaatcttgaagatcacgagtggtgtgaaaacatggagtcagtgttgtag

SEQ ID NO: 135697 - DNA, 1356 bp, synthetic construct
  misc_feature 1..1356: note = Description of Artificial Sequence: Synthetic coding sequence
  source 1..1356: mol_type = other DNA
atgagggagatcgtgcacattcagatcggacagtgtggcaatcagattggtgccaagttctgggaaatgatcggggaagaacatggaattgacctcgctggtagcgacagaggagcttccgcactgcagctggaaaggatcagcgtatattataacgaggcttatggtcgaaagtatgtgccgcgcgccgtcttagtcgacttggaaccaggaaccatggatagtataaggagcagcaagttgggagctctctttcaaccggatagttttgtccacggcaactccggggctgggaataactgggccaagggccactataccgagggggctgaattgatcgagaatgttttagaagttgtcaggcatgagagcgagtcctgcgactgcctgcagggtttccagattgtgcatagcctaggcgggggcaccggaagcggaatgggcaccctcctgatgaacaaaatccgagaagaatatcccgatcgcatcatgaacagtttctctgtaatgccctcaccaaaagtttctgatacagtggtcgagccttataacgccgttctttctatccaccaattaatcgagaatgctgacgcatgtttttgcatcgacaacgaggcactttacgacatctgcttcagaaccctgaaactgaccacccccacttatggcgacctgaatcacttagttagtcttacgatgagtggcattacaaccagcctgaggtttccagggcagctgaacgcagatctccggaagctggccgtcaacatggtaccctttcccaggctgcactttttcatgccagggttcgccccattaactgcccagggttctcaacagtaccgggctctgtccgtcgccgaacttacacagcagatgtttgatgcaagaaataccatggcagcctgtgatctcaggagaggccgctatctcacagtggcgtgtatcttccgtggtaagatgtcaacaaaagaggtagaccagcagttgctgtcagtgcagactcgaaacagctcttgcttcgtggagtggattcctaacaacgtgaaggttgccgtctgcgatatcccaccacgcggcctgagcatggccgccacatttatcgggaacaataccgcaatacaagagatctttaaccgagtctcagagcacttttccgctatgttcaaaaggaaggccttcgttcactggtacacttccgagggaatggatataaacgagttcggagaggctgaaaacaatatccatgatctagtgagtgagtaccaacagttccaggatgcaaaagctgtgctggaggaggatgaagaagtgaccgaagaggcagaaatggaaccagaagataaaggccactag

SEQ ID NO: 135698 - DNA, 1749 bp, synthetic construct
  misc_feature 1..1749: note = Description of Artificial Sequence: Synthetic coding sequence
  source 1..1749: mol_type = other DNA
atgcctttgcatcagctgggggacaaacccctaaccttcccctcacctaactctgccatggaaaatggactggatcatactcctcccagccgccgggcctcccctggaacccccctatcccccggaagcctgcggtcagcagctcacagccccttagatacaagtaaacagcccctctgccaactgtgggcagaaaaacatggggccagaggcacacatgaggttaggtatgtgtccgccggacaatcagtggcgtgtgggtggtgggcgtttgccccaccttgcctgcaggtgttaaacactcccaaggggatcctgttcttcctctgcgcagctgcgtttctgcaaggcatgaccgtaaatggcttcatcaacactgtgataacctccctggagagaagatacgatttacattcttatcagtccggactgatcgccagttcttatgatatagcggcttgtctatgtttgacctttgtttcctacttcggcgggagtggtcacaaaccaagatggcttggttggggggtgctgctcatgggtaccggaagcctagtgttcgctttgccacactttaccgcaggaaggtacgaggtggagctggatgccggggtgagaacttgccccgccaatcccggagccgtctgcgctgacagcacctctggattgtccagataccaattagtgttcatgttgggccaatttctccatggagtgggagcaacaccactttacacgctcggagttacctatttggggatgtctactttctcccccaaatttttagaaagtcagttcagtctgtcagctagtgaagccgccaccctattcgggtatctcgttgtacccgccgggggcgggggaacttttctaggcggcttcttcgtcaataaattgaggctcagaggctccgcagtgatcaagttttgcctgttttgcaccgttgtctcgctgctgggcattctggtgttctctctccactgccccagtgtgccaatggctggggttactgcctcctacgggggaagcctgttgcctgagggacacctcaatctgacagcgccctgcaatgctgcgtgctcctgccaaccagagcactactctcccgtgtgcggctcagatgggttaatgtatttcagtctatgtcatgctggatgccctgcagccaccgagactaacgtcgatggacagaaagtctacagagactgttcttgcatcccccagaatttatcctccggatttggccatgcgaccgctggcaagtgtacatccacgtgtcaacggaaaccattactccttgtgttcatatttgttgtcatattcttcaccttcctgagtagtatcccagcccttaccgctaccctgcgctgcgtacgagaccctcaaaggagttttgccctcggcatccagtggatagtcgtgagaattctgggtgggatcccgggtcccatcgcgtttggctgggtgatcgataaagcctgcttgctgtggcaggatcagtgtgggcaacagggtagctgcctggtttaccagaacagcgccatgtccagatacattttgatcatgggtctcttgtacaaggttcttggcgtgctgtttttcgccatcgcctcaagcagggctgcttccgatcaccgccctcggccgcctggacacggtggccatagcgcctttccagacgatcgtaccgttccactaggggatgcgatcactagagagctgctctttgacctccagcctagcacctag

SEQ ID NO: 135699 - DNA, 2169 bp, synthetic construct
  misc_feature 1..2169: note = Description of Artificial Sequence: Synthetic coding sequence
  source 1..2169: mol_type = other DNA
atgccacttcaccagctgggggataaaccactcacttttccaagccccaactcagccatggagaatggactggatcacactcccccctctcgcagagcgagcccaggaacaccactgtccccaggctctttacgcagcgccgctcactctcccctggacaccagtaaacaacctttgtgtcagttgtgggccgaaaagcatggcgcccggggcacacatgaggtgaggtatgtctcagcaggccagagcgtcgcttgcggatggtgggctttcgctcccccctgtctacaggtgctgaacacgccaaagggcatcttgtttttcctgtgtgcggctgctttcctgcagggcatgactgtcaacggctttataaataccgtgatcacttcgcttgagcgtaggtacgatcttcactcctaccaatctggcctcattgcgtcgagctacgacatagccgcttgcctgtgcctgactttcgtgtcttacttcggaggtagcgggcataaacctaggtggttgggatggggcgtcctgctgatgggcaccgggtcattggtcttcgcactgccccacttcaccgccgggagatacgaggtggaactcgatgccggcgtgcgcacgtgtcctgcgaacccaggagccgtatgtgctgatagcacaagcgggttgtctcgataccagcttgtatttatgctggggcagtttctgcacggcgtcggggccacaccactgtacaccttgggtgtgacatatctggatgaaaatgtcaagtcatcttgtagtcccgtctacatcgcgattttttataccgcagcaattctgggccctgctgcgggctatctgatcggcggtgcactgctgaacatctacaccgaaatgggccgccgcactgagctcaccaccgagtctcccttgtgggtcggcgcttggtgggttggctttttgggctccggcgcagcagccttctttacagctgttcccatccttggctatccgagacagctccctggcagccagcgctacgccgtgatgcgggctgctgagatgcaccagcttaaggatagcagtagaggtgaagccagcaacccggacttcggcaaaaccatccgtgatctgccattgtccatctggcttctgctgaagaaccctacattcattctgctctgtctcgctggcgccaccgaagctactcttattacaggcatgtctactttctctccaaagttcctggaatctcaattctctctctcagctagcgaagccgctactctctttggctatctggtcgtccccgcgggtgggggggggacttttctcggcggctttttcgtaaataaactgcgcctgcgggggagcgctgttattaagttctgccttttctgcaccgtcgtttccctgctaggcatcctggtgttctcccttcattgcccatctgttcctatggcaggtgttactgcgagttatggcgggagcctgctacccgagggtcaccttaacctgacagcaccctgtaacgcagcatgcagctgccagcctgagcattactcccctgtctgcgggagtgacggactgatgtacttctccctgtgtcacgctggttgtccagccgcaacagaaacaaacgtggacggtcagaaggtctatcgcgactgcagttgtatcccgcagaatctgtcaagtgggttcggacatgccacagcaggcaaatgcaccagcacctgccagaggaaacctctgttgctcgtgttcatatttgtggtaatcttctttacctttctaagctcgatccccgccctgactgcgaccttgcggtgcgtgcgggatcctcagaggtcttttgcactcggaatacaatggattgtggtgcgcattctgggcggaattcccgggcccatagcatttggttgggtaatcgacaaagcctgtctcctgtggcaggatcaatgtgggcagcagggttcctgtctcgtgtaccagaattccgctatgtccagatacattctaatcatgggattgctctacaaggtcctgggcgttctgtttttcgcaatagcgtgcttcttgtacaaaccactctcagaaagctccgacggactggaaacatgcctaccaagtcagtcttccgcacctgatagtgcaactgattcacagttacaaagttctgtttag

SEQ ID NO: 135700 - DNA, 2169 bp, synthetic construct
  misc_feature 1..2169: note = Description of Artificial Sequence: Synthetic coding sequence
  source 1..2169: mol_type = other DNA
atgcctctgcaccagctgggcgataaaccactcactttccccagcccaaattctgctatggaaaatggcttggaccacacacctccatcccgtcgcgcctcccccggtacacctttgagccctggaagtttgagatcagccgcccactctcccctggatacttctaagcaaccactgtgccagctgtgggcagagaagcacggtgctcggggaacccatgaggtcagatacgttagtgccggccagagcgtggcgtgtggctggtgggcctttgctcctccgtgccttcaggtgctaaatacaccaaaggggattctctttttcctgtgtgctgccgcttttcttcaaggaatgacagttaacggtttcataaatacagtgatcacttccctagagaggcgctatgacctgcactcatatcaatccggtcttattgctagttcctacgacatcgcagcgtgtttgtgcctgaccttcgtcagttacttcggcggcagtggacacaaaccaaggtggttaggatggggagtgctcttaatgggcaccggttctctcgtcttcgctctgccgcatttcacggctggcagatatgaagtggaattagatgctggggtgcgcacctgtccagctaaccctggggccgtgtgtgccgacagtacaagcgggctctcgcggtaccaattggtttttatgctgggccagttcctccatggggtgggggctaccccgttgtacactttgggggtgacatacctggacgagaacgtgaagagctcttgctcccctgtgtatattgcgatcttttacaccgccgccatcctggggcccgcagctgggtaccttatcggaggagcccttttaaacatttacacagagatgggccgaaggacagagctgacgacagagtctcctctctgggtaggagcgtggtgggtcggtttcttaggatctggggcggctgccttttttaccgccgtacctattctcggatacccaaggcagctaccagggagtcagcggtacgccgtgatgagggctgctgagatgcatcagctaaaagactcatctagaggagaagctagcaatccggattttggtaaaacaatccgcgatttgccactctccatttggctgctcctaaaaaaccctacttttatcctgttgtgtctggcgggagccacggaggcaaccctgatcacaggcatgagtaccttctcgcccaagttcttagaatcccagttttcattgtccgcttctgaagccgctacactcttcggctaccttgtggtacctgccggtggtgggggaaccttccttggcggcttcttcgtaaacaagcttagattgagaggttcagccgtgatcaagttctgtctattttgcacggtggttagcttactcggaattttggttttcagtctccactgtccttccgtgccgatggcaggggtcactgcttcgtacggtggctctctgctgcccgagggacacctaaatttaaccgccccttgcaacgcggcctgtagttgccagccggagcattactcccctgtatgtggttctgatgggctgatgtacttctcattatgtcatgccggatgtcctgccgcgaccgagactaatgtcgatggtcagaaagtgtaccgagattgtagctgtattccacaaaacctaagtagcggttttggccatgctactgcgggcaaatgcacgtccacgttcctgtacataccacaacagcattcttgtacaaatggtaactccacaaccggcgctcttcaggagacccccaggtccaagcgggcctgccgatgtgtgcgggatccacaacgctctttcgccctagggatacagtggatcgtggtgagaatactcggtggaatccctggccctatcgcttttgggtgggtgatcgacaaagcatgtcttttgtggcaagatcagtgtggccagcaaggttcgtgtctcgtgtaccagaacagtgccatgtctaggtacattctcattatggggctgctctataaggtgctgggagtgttgttttttgctattgcttgtttcctctataagcccctctcagaatcctctgacggactcgaaacgtgcttgccaagtcaatctagtgcgccggatagtgccactgactcccagctgcagtcttcagtgtag

SEQ ID NO: 135701 - DNA, 456 bp, synthetic construct
  misc_feature 1..456: note = Description of Artificial Sequence: Synthetic coding sequence
  source 1..456: mol_type = other DNA
actacagctctctgtgccgcaaggacagcgagctgtacctcccattgtgccacacagggggctctgcaacccagaagacggatgtggaccgctcgtcgttgtgtgcgggatccacagcggtctttcgctctcggtatccagtggattgtggtgcgaattctgggaggcattccaggccctattgccttcggctgggtcatcgataaagcttgcttgctttggcaagatcaatgtgggcagcaggggagctgcctggtatatcagaatagtgccatgagtcgttatatccttatcatgggtctgctgtataaggtgctgggtgtgctgttctttgctattgcatgtttcctgtataagccgcttagtgagtcttccgatggcctggagacctgtctgccctctcagtcctcggctccagactccgcgacggattcgcagttacagtccagcgtgtag

SEQ ID NO: 135702 - DNA, 1863 bp, synthetic construct
  misc_feature 1..1863: note = Description of Artificial Sequence: Synthetic coding sequence
  source 1..1863: mol_type = other DNA
atgcctcttcatcaactgggggacaagcccctcacatttccatcgcctaatagtgctatggagaatggactagaccacacacccccaagccggcgcgctagtcccggaactcccctgtctcccggatccctgcggtccgccgctcattctccgttagatacatccaaacagcccctatgccagttatgggccgaaaagcatggcgcccggggaacccacgaagtgagatacgtgtcagccggtcaatccgtcgcctgtgggtggtgggcgtttgcccctccttgccttcaggtgcttaacacccccaagggaatcttattctttctctgcgctgctgccttcctgcagggtatgacagtgaacggatttattaatacagtgattacatccctcgagcgacgatatgatctgcacagctaccagagcggcttaattgcgtctagttacgacattgcagcatgcctgtgccttacttttgttagttatttcggaggttctgggcacaagccccgttggttgggatggggggttcttctcatgggtaccgggagtcttgtttttgctctaccccacttcaccgccggtcggtacgaagtcgaactagacgccggggtccgcacgtgtcccgctaacccgggtgcggtttgcgccgactccactagcggactttctagatatcagctggtgttcatgttggggcaattcctgcacggcgtgggcgcaacccctttgtatacactgggtgtgacctacctggacgagaacgtgaagtcctcctgctcccctgtgtatattgccatattctatactgccgcaattctgggccctgctgctggatatcttatcggaggggccctgctcaacatctacacggagatgggccgaagaacagagctgaccacagaaagccctctgtgggtcggggcctggtgggtcgggttcctggggtctggtgccgcggctttcttcacagcagttcccatcctgggctatcctcgccagctgcctggtagtcaacgctacgccgttatgcgggctgcagaaatgcatcaactgaaggattcttcccgcggagaggcttcgaatcccgattttggcaaaactatcagggacctccctttgagcatctggcttttgctgaagaatccaactttcattcttttgtgcctagccggggcaacagaggcaacactcattaccggtatgtcgacattcagcccaaagttcttggagtcccagttttccctctccgcctcagaggcagctacgctttttggataccttgtcgtgccagcgggaggcgggggaaccttcttggggggcttttttgttaataagttgaggctgcggggcagcgccgtcattaagttctgtctgttttgtaccgtggtgtcactacttggaattctggtgttctctctgcattgccccagcgtcccaatggctggcgtgactgcatcttacgggggatctctcttaccagaaggccatctaaatctcacagcaccatgtaacgcagcttgcagctgtcagccagaacattattcgcctgtttgtggatcggacgggctgatgtacttcagcctatgccacgcaggctgccctgcggctacagagaccaatgtcgacggacagaaggtatccggggccgcagcctacaggccttgccctcccctcgatcctggcaaagggcctccttgcctgccgctggtgattggagcgatcgtagggctcccacgatgtaccgaaacagtggccgtgagcctgcgcatcttccccctggttctggccatgcctctccaggggaatgcgcttcagctggtacgggagagcccttccttttggtttagctatagcctgtag

SEQ ID NO: 135703 - DNA, 2160 bp, synthetic construct
  misc_feature 1..2160: note = Description of Artificial Sequence: Synthetic coding sequence
  source 1..2160: mol_type = other DNA
atgttcgttggggtggccaggcactccggaagccaggacgaggtgtccagaggggtcgagcccctggaggccgcgcgcgcgcagccagctaaagatcgcagggccaaagggacacctaaaagttcaaagcccggaaagaagcatcggtaccttaggctcttgcccgaagcccttatacggtttggcgggtttagaaaacgtaagaaggcgaagagttcagtgagcaagaagccaggggaggttgatgacagcctcgagcaaccttgtggtctcggatgtttagtatcaacgtgttgcgaatgctgcaataacattcgctgtttcatgatcttctattgcatcctcctcatttgtcagggtgtagtattcggcctgatcgatgtttccattggggatttccagaaagagtaccagctcaagaccatcgaaaagttagccctcgagaagagctacgacattagcagcggcctggtagccatcttcattgctttctacggcgacagaaaaaaggtcatctggttcgtggcctctagcttcttaattgggctcgggtctctcttgtgcgcttttccctcaattaacgaggagaacaaacagagtaaggtgggcattgaggacatctgcgaagaaattaaagttgtaagcggctgtcagtccagtggaatctctttccagagtaagtacctgtcctttttcatcctcggtcagacggtgcagggaatcgctggtatgccattatacatcctagggattacattcattgacgagaatgtggctacccactccgcaggcatttatctgggcatcgctgaatgtacgtctatgataggctatgccctgggatacgtgctgggtgccccactcgtgaaagtccctgagaacactacttcagccaccaataccacagtgaataatggtagccccgagtggctgtggacttggtggattaactttctgttcgctgcagtggtggcctggtgcaccctcattccactgagctgcttcccaaacaacatgcctggatctacaagaatcaaggcccgcaaaaggaagcagttgcatttcttcgattcgagactaaaggacctgaaactgggcacaaatataaaggacctttgcgccgccctctggatcctcatgaagaaccccgtactgatttgtttggccttatccaaggctacagaatacttggtgatcatcggggcatccgaattcctgccaatttacctggagaaccaattcatccttacaccgacagtggcaaccacgttggcaggtttggtcttgatcccaggcggcgccctcggccagttattgggcggggtgattgtgtctactttagaaatgtcttgtaaagcgctgatgagattcatcatggtgacatccgtgattagccttatcctgctcgtctttatcatcttcgtcagatgtaacccggtgcagtttgccggcattaacgaagattacgatggtacgggaaagttaggaaatttgactgcgccctgtaatgagaagtgccgctgcagctcatcaatctactcatctatttgcgggcgcgacgacatagagtacttcagtccttgtttcgcaggttgcacatactctaaggcccaaaaccaaaaaaagatgtactacaactgttcgtgtattaaagaggggctcattacagcggatgccgaaggggactttattgacgctcgccccggaaagtgcgatgccaaatgctacaaattaccccttttcattgctttcattttttccaccctgatattcagtggattttctggcgtgcctattgtgttggcgatgacccgtgttgtgccagacaaacttcggtccctggcacttggagtgtcctatgtcatcctgcgcattttcggaacgattccaggaccgagtatttttaagatgagcggggagacgtcctgtattcttcgagatgttaataagtgtggacacaccggacgctgttggatctataacaagaccaaaatggccttcttgctggtcgggatatgttttctgtgcaaactgtgcacgattattttcaccactatcgcattctttatttataaaaggaggcttaacgagaatacggactttcctgatgtcaccgtcaagaatcctaaagtcaaaaaaaaggaggaaacagatttatag

SEQ ID NO: 135704 - DNA, 1401 bp, synthetic construct
  misc_feature 1..1401: note = Description of Artificial Sequence: Synthetic coding sequence
  source 1..1401: mol_type = other DNA
atgtttgttggcgttgccagacacagcggctctcaggacgaagtgtctcgtggagtggagcctctggaagcagctagagctcagcctgcgaaagaccgacgtgcaaagggaacccctaagagttctaagcccggcaagaagcaccggtatttgcgcctgttgcccgaagctctgatcaggttcggcggatttcgcaagaggaaaaaagccaagagtagcgtctccaaaaagcctggagaggttgatgattcactggaacaaccatgtgggctgggttgtctagtcagcacttgctgcgagtgctgtaacaatatacggtgcttcatgattttttattgtatcctcctgatttgccagggagtggtctttggcctcattgatgtatccatcggcgacttccagaaggaataccagctgaagaccatcgaaaagctggcacttgaaaagtcatatgatatcagttctggcctggtcgccatcttcatcgctttttatggtgaccgcaagaaggtgatctggtttgtggccagtagttttctgatcggcctggggtcactactttgcgccttcccctcaattaatgaagaaaacaagcaatccaaggttggaattgaaggtatagccgagtgtactagcatgatcggctacgctctcgggtacgtgctcggagccccattggtgaaagtgcccgagaacaccacatcagctaccaaaaccggtaagctcgggaatctgactgccccctgcaacgagaagtgtcgctgttccagttccatttactctagtatctgtggacgagatgatatcgaatacttttctccgtgcttcgcaggatgtacatactccaaagcgcaaaaccagaaaaagatgtactacaattgctcctgtatcaaggaagggctgattacagcagacgccgagggtgatttcatcgatgccaggcctggaaaatgcgatgcaaagtgttacaagttgcctctatttattgctttcatatttagcactctgatatttagcgggttcagtggagttcccattgtgctcgccatgacacgggttgttcctgacaagctgaggtccctcgcacttggcgtgagctatgttatcctccgcatcttcgggactataccaggcccgtccatctttaagatgtccggcgagacaagctgcatcctgagagacgtgaacaagtgtggacatacaggcagatgctggatttataacaaaaccaagatggcgtttctgctggttgggatctgctttttatgtaagctgtgcacaatcatttttacgactatagcattcttcatttacaaacgaaggttaaacgagaacacagacttccccgatgtcactgtgaaaaatcctaaggtgaaaaaaaaagaagaaacggacctgtag

SEQ ID NO: 135705 - DNA, 1974 bp, synthetic construct
  misc_feature 1..1974: note = Description of Artificial Sequence: Synthetic coding sequence
  source 1..1974: mol_type = other DNA
atgttcgttggggtggcaaggcacagtggcagccaagatgaggtcagtcgcggtgtggaaccacttgaggccgcccgcgcgcagcctgctaaagacagacgggccaaaggaactcccaaatcctcaaaacccggaaagaaacacaggtacctacggttattacccgaggctcttatccggttcggtggattcagaaagcgaaaaaaggctaaatcaagtgtaagtaagaagcctggggaggtcgatgatagcttagaacagccatgcgggctgggttgtctggtgtctacatgctgtgagtgttgtaataatatccggtgttttatgatattttattgtatactcctgatatgtcagggcgtggtgttcgggttgatcgatgtctcaattggggacttccaaaaagagtatcagctgaaaactattgagaagctagcgctggaaaaatcttacgatatctcttccggtttagtcgcaatctttatcgccttctatggcgataggaaaaaagtgatctggttcgttgcgtctagttttctgatcggtctgggtagtctgttgtgcgccttccctagtattaatgaggagaataaacagtcgaaagtagggattgagggcatcgcagaatgtacatcgatgatagggtacgcactggggtatgtcctgggggcacctctggtaaaagtacccgagaacactacttctgccacaaatactacagtgaacaacgggagtccagaatggttatggacctggtggattaattttctgtttgccgctgtcgttgcatggtgtacactgattccactgtcctgtttcccaaacaatatgcctggcagcacgcggattaaggctcgcaagcggaaacaattgcactttttcgatagtcgcttaaaagatctgaaactcgggacaaacataaaagacctttgtgccgcactgtggattctgatgaagaatcctgtactgatctgcctagctctgagcaaggcgactgagtatttagtgattatcggggcctcagagtttctcccaatctacctggaaaatcagttcattctgactccaactgtcgccacgactctggccggcctggtgttaatccctggcggcgctcttggccagctcctggggggcgttatagtgagcactctggagatgagctgtaaggcattgatgcgctttatcatggttacctctgttatctcattaatcctgctggtgttcataatcttcgtgaggtgcaaccctgttcagtttgctggtattaacgaggactatgatgggaccgggaagctggggaacctcactgctccctgcaacgagaagtgccggtgctcttcatccatctatagttccatctgtggacgtgatgacatcgagtacttctcaccctgctttgctggatgcacctactccaaagcacagaaccaaaagaagatgtactataattgttcctgcatcaaggaagggcttattactgctgacgccgagggcgactttattgacgcccggcctgggaagtgtgatgctaagtgttacaagctgccacttttcatcgccttcatcttctccacacttatcttttcagggttcagcggggtgcctattgttctagccatgactcgcgtggtgccagataagctacgctctctcgcccttggtgtaagttatgtaattctgcgaatcttcggcaccattccagggccttctatctttaaaatgtcaggtgaaacttcttgtattctgagggatgtgaacaagtgtggacacacaggccgctgttggatctacaataagacaaaaatggcctttctgttagtgggcatttgcttcttatgtaagttgtgcaccattattttcactacaatcgccttcttcatttacaagcggcgcctcaatgagaatacagactttccagatgtgactgtgaagaatccaaaggtgaagaaaaaagaagagaccgatctgtag

SEQ ID NO: 135706 - DNA, 2160 bp, synthetic construct
  misc_feature 1..2160: note = Description of Artificial Sequence: Synthetic coding sequence
  source 1..2160: mol_type = other DNA
atgtttgtgggagtggctcggcactcggggtcccaagatgaagtttcacgcggtgtggagcctctggaggccgcccgagctcagcctgcgaaagatcgccgcgccaaggggaccccgaagtcctcaaagccaggaaagaaacatcggtacctgcgccttctgccggaagctctcatccgatttgggggattccggaagaggaaaaaagctaagtccagtgttagcaagaagcccggagaagttgacgactcactagaacaaccatgcggactgggttgccttgttagtacatgctgtgagtgttgtaacaatattaggtgttttatgattttttattgtatcctcctcatttgtcaaggagtggttttcggattaatagacgtgtcaattggtgatttccagaaagagtatcaacttaaaaccatcgaaaagctggccctggaaaaaagctatgatatcagctcgggactcgtggccatcttcattgctttctatggggatagaaaaaaagtgatatggttcgtcgcctcctcctttctcatcggcctgggtagcctgctctgtgcatttccttcgatcaacgaggaaaacaagcaatctaaagtcggcattgaggacatttgtgaagaaatcaaggtcgtcagcggatgtcagagctcaggaatctcttttcagagcaagtacctgtctttcttcatcctcgggcagactgtacagggcattgccggaatgcccctttatatcctgggaatcacattcatagatgaaaacgtggcaacacactcagcaggcatttatctcggcatcgcagagtgtaccagcatgattggttacgccttgggatatgtcttaggtgcacccttggtcaaggtgcccgagaacacgacatcagcaaccaatacaactgtgaacaacggttcgcccgagtggctctggacctggtggatcaactttctgttcgcagcggtagtggcatggtgcacattgattccactgtcctgcttcccaaataatatgcccggcagcacacgaatcaaggcaaggaaacgaaaacagcttcactttttcgatagccgcttgaaagatctgaagctggggaccaatattaaggacctttgtgccgctttgtggatcctgatgaagaaccccgtcctgatttgtttggcgctcagcaaggccactgagtatctagtcatcatcggtgcatcagaattcttgcccatttatctggaaaaccaattcattctcacacctaccgtggcgacaactctggctgggctcgtattgatcccgggcggggctctgggtcagctgctgggtggtgtgatcgtgagtaccctggaaatgagctgcaaagccctgatgaggtttatcatggtaactagcgtgatcagcctcatcctgctcgtgttcattatctttgtgcgatgcaatccagtgcaattcgccggcatcaatgaagactatgacggaacaggcaagctaggcaacctcacagctccgtgcaacgagaagtgccgttgttctagctcaatttatagcagtatttgcggccgcgacgacatcgagtatttctccccctgcttcgccggttgcacttatagcaaggcccaaaaccaaaaaaagatgtattacaattgttcttgcataaaggagggcctgatcacggccgatgccgagggagatttcattgacgcacgtcctggcaagtgcgacgcaaagtgttataaacttcctctgttcattgcattcatcttttctaccctgatcttctcagggtttagtggagttcctattgtcctggccatgaccagggtggttcctgacaagctccggtccttggctctgggggttagttacgtgattctcagaatctttggcacaatacctggcccttctattttcaaaatgtccggagaaacaagctgcatcctacgggacgtaaataaatgcggccacaccggacggtgctggatctataacaagacaaagatggcctttcttctcgtcgggatttgctttctttgtaaactttgtactataatctttactacaatagcattctttatctataagagaaggctgaacgagaatacagactttccagatgtgactgtcaaaaatcctaaggtgaagaagaaagaggagacagatctctag

SEQ ID NO: 135707 - DNA, 78 bp, synthetic construct
  misc_feature 1..78: note = Description of Artificial Sequence: Synthetic coding sequence
  source 1..78: mol_type = other DNA
ctcaatgagaacacagattttcccgatgtcaccgttaaaaaccctaaggtgaagaagaaggaggagaccgatctttag

SEQ ID NO: 135708 - DNA, 1401 bp, synthetic construct
  misc_feature 1..1401: note = Description of Artificial Sequence: Synthetic coding sequence
  source 1..1401: mol_type = other DNA
atgttcgtgggcgtggctaggcacagcggtagccaggacgaggtcagtcgaggcgtcgagcctctggaggcggctcgggcccaacccgctaaggatagacgggctaagggaactcctaaatcgtcaaaaccggggaaaaagcacaggtatctgagactgctgccggaggccttaattcggtttgggggatttagaaagagaaagaaggctaagagcagcgtgtctaagaaacctggtgaggtagatgattcgctggaacagccatgcggcctaggatgtcttgtgtccacctgctgcgaatgttgcaataacatacggtgcttcatgattttctactgtatcctgttgatctgccagggagtcgtgttcggcctgatagatgtgtcaatcggggacttccaaaaggagtaccagctgaagacaatcgagaagttagcactagagaagtcttacgacatctcctctggacttgtggcaatctttatcgcattttacggggatcgaaaaaaggtgatctggtttgtggctagctctttcctgatcggcctgggaagtttactgtgtgcttttccatcgatcaatgaggaaaacaaacagagcaaggtgggcatagaagggatcgccgagtgcacctccatgattggctatgctctcgggtatgttttaggagccccgctggttaaggtgcctgagaacacaaccagtgctaccaagacaggcaaattagggaatctgactgcaccttgtaatgaaaagtgccggtgtagttcttcaatctattcaagcatttgcggccgggatgacattgaatatttttctccatgctttgcaggatgcacttatagcaaggctcagaaccagaagaagatgtattacaattgctcttgtatcaaggaggggttaatcactgccgacgccgagggagattttatcgatgcgaggccgggcaaatgcgacgccaagtgttataagctgccactgttcatcgccttcattttctcaactttaatcttttccggtttttctggtgtacccattgtcctggccatgaccagggtagtccccgacaaactaaggtctttagctctgggcgtgtcctatgtcatcctcaggatctttgggacgatccccggtccgtccatcttcaagatgtcaggagagacttcgtgcatcttgcgggatgtgaataaatgcggccacaccggaagatgttggatttataataagacaaagatggcattcctgctagtcgggatctgttttctatgcaagctctgtacgatcattttcacaactatcgccttctttatctataagaggcggttgaatgaaaatacagattttcccgacgtaaccgttaaaaatcctaaggtcaaaaagaaggaagaaaccgatctctag

SEQ ID NO: 135709 - DNA, 351 bp, synthetic construct
  misc_feature 1..351: note = Description of Artificial Sequence: Synthetic coding sequence
  source 1..351: mol_type = other DNA
atgctaagctgtcgccttcagtgcgcattggccgcactgtcaattgtgttggccctgggctgcgtgaccggcgcaccgagcgatcctagattgagacaattcctccagaagtctcttgccgctgctgccggcaaacaggagctcgccaaatactttctggctgagcttctcagtgaaccgaatcagacagaaaacgatgccctagaacctgaagacctgtctcaggcagctgagcaagatgagatgcgactggagctgcaacgtagcgccaactccaatcccgccatggcaccacgcgaaagaaaggctgggtgtaagaattttttttggaaaaccttcacgtcctgctag

SEQ ID NO: 135710 - DNA, 1176 bp, synthetic construct
  misc_feature 1..1176: note = Description of Artificial Sequence: Synthetic coding sequence
  source 1..1176: mol_type = other DNA
atgttccccaacggcaccgcgagcagcccttccagcagcccttctcccagcccgggctcatgcggcgagggtggaggcagtaggggccctggcgcaggggctgcggacgggatggaagagcctggccgaaatgcttcacagaatgggaccctgtcagaagggcaggggtcagccatcctgatcagctttatttattcggttgtctgcctcgtggggctttgcggtaacagcatggtgatctacgtaatcttgaggtatgccaagatgaagaccgcgacaaacatctacatcttgaacctggcaatagcggatgaactgctgatgctgtccgttccatttttggtcacatcaacacttcttagacactggccctttggcgccctcttgtgcagactggtgctcagtgtagatgccgtcaatatgtttacatcaatatactgcttgacggtgctgtccgttgaccgttacgtggcggtggtgcatcccatcaaggcagcaagatatagacggccgacagtggcaaaggtagtcaatctgggcgtgtgggtgttgagtctgctcgtgatcctgccgattgtagtgttcagcagaacagctgccaacagtgatggaaccgtcgcctgtaacatgctgatgcctgagccagcccaacgctggctcgtcggctttgtgctgtatacgtttcttatggggttcttactgccagtgggggctatttgcctgtgttacgtactgataatcgctaagatgcggatggtggccctcaaggccggatggcagcagagaaagaggtcagagagaaagataacgttaatggtcatgatggtggttatggtgttcgtcatctgttggatgcctttttacgtagtccagctagtcaacgtcttcgctgagcaggatgatgccaccgttagtcagctgtctgtaatattgggctatgccaattcttgcgccaaccccatcttgtacggatttctctctgataacttcaaacgctcatttcagagaattctgtgtctgtcttggatggataatgccgcagaggagccagtcgactattatgccactgccctgaagtcccgggcatacagcgtagaggatttccagccagagaatctggaaagcggcggagtctttaggaacggaacatgcacttcgcggattacgaccctgtag

SEQ ID NO: 135711 - DNA, 1257 bp, synthetic construct
  misc_feature 1..1257: note = Description of Artificial Sequence: Synthetic coding sequence
  source 1..1257: mol_type = other DNA
atggatatgcttcatccctcaagtgtgtctactacctctgaaccagaaaatgctagtagtgcctggccacccgacgccacgcttggtaacgtttctgcgggcccctcccccgctgggctggccgtgtccggcgtccttatccccctggtgtacctggtcgtgtgtgtggttggtctgctgggcaattccctggtgatctatgtcgtcctgaggcacaccgcctcaccgagcgtgaccaatgtttacattttgaatttggctctggctgatgagctcttcatgctagggctgcctttcctggcagctcagaacgcacttagttactggcccttcgggtcacttatgtgccgcctcgtaatggctgttgacggcatcaaccaattcacatctattttctgcctgaccgttatgtcagtcgacagatacctggccgtggtgcaccctacaagatctgcccgctggcgcacggcccccgttgctcgcacagtatcagccgccgtgtgggtggccagcgccgtggtggttctgccagttgtcgtctttagcggtgtgccgcgcggaatgtccacatgccacatgcaatggcctgagccagcagccgcctggcgggcgggctttatcatttacactgccgcacttggattcttcggacctctgctggtcatttgtctgtgttacctgttgattgtggtcaaggtgagatccgccggaagacgggtttgggccccctcgtgtcagagacgccgaaggagcgagcgtcgtgtgacaagaatggtagtagcagttgttgccctgtttgtactgtgctggatgccattctatgtcctcaacatagtgaacgtcgtctgcccgctgccagaagaacccgcttttttcggactgtacttcctggtggtggcactcccatatgctaattcttgcgctaacccaatactttatggcttcctgtcgtaccgcttcaagcaggggtttagaagggttttgctgagaccttctaggcgcgtccgctcacaggagcctaccgtaggaccacccgaaaagacggaagaggaagatgaagaggaggaagacggtgaggagagccgggagggaggaaagggcaaggaaatgaatggacgcgttagccaaatcacccagccaggcaccagcggtcaagagaggccaccttccagagtggcatctaaggaacagcagttgttaccccaggaagcgagtactggtgagaaatcatcaacaatgaggatatcatatttgtag

SEQ ID NO: 135712 - DNA, 1257 bp, synthetic construct
  misc_feature 1..1257: note = Description of Artificial Sequence: Synthetic coding sequence
  source 1..1257: mol_type = other DNA
atggatatgctccatccttctagtgtgtctacaacctctgagcccgagaacgccagtagcgcttggcctccagacgctacactcggaaacgtgagtgccggccccagcccagcagggctcgccgtgagtggggtacttatcccactggtttacctcgtagtgtgcgtcgtggggctgctaggaaacagtctggtgatctatgttgtgttgagacacaccgcttccccaagtgtgactaatgtgtacattctgaacctcgcactggccgacgaattgtttatgcttggattgccatttttagcagcgcaaaatgcactgagttattggccatttggctccctgatgtgccggctcgtgatggctgttgacggcatcaaccagtttacttccatcttttgcttgacggttatgtccgtggacaggtacctagcagtggtccaccctactcggagcgccagatggcggacggcccctgtcgcaaggactgtttctgcggctgtctgggtcgcttcggccgttgtcgtgctccccgtggtagtgtttagcggggtgcctaggggaatgtcgacgtgccacatgcaatggcccgagcctgctgcggcatggcgagcggggtttatcatttacacggcagcgctgggcttcttcggtccattgctagttatatgcctctgctatttgctgatcgtcgtgaaagtgcggagtgctggacgccgtgtgtgggccccatcttgtcagaggcgcaggcgctcggagcgtagggtaactcgtatggtggtggctgtggtcgctctgtttgtgctttgctggatgccattttacgtactaaatatcgtcaacgtggtctgccccttgcctgaggaacctgccttcttcgggctctatttcctggtcgtcgctttaccctacgctaattcatgcgccaaccccatcttgtatgggttcttatcctaccgctttaagcagggcttcaggagagtgctgctccgcccttcacgccgggtgagatcacaggaaccgacggtgggacctcccgaaaagacagaggaagaggatgaagaagaggaagacggagaggagtctagggaaggcggcaagggcaaagaaatgaacggcagggtgtcccagatcacccagcccggaacttccggacaggaaagacccccaagcagggtggctagcaaagagcagcagctgctcccccaagaagcgagcactggcgaaaaatcttccaccatgcgcatcagctacttgtag

SEQ ID NO: 135713 - DNA, 1167 bp, synthetic construct
  misc_feature 1..1167: note = Description of Artificial Sequence: Synthetic coding sequence
  source 1..1167: mol_type = other DNA
atgtcagccccatccacactgccgcctggcggggaagagggactgggtactgcctggcccagtgccgcaaacgccagctccgcccccgcagaagcggaagaggctgtggccgggccaggcgacgctcgcgctgccgggatggttgctatacaatgtatatacgctctagtgtgtctggtgggccttgtggggaatgccctggtaatttttgttatcctcagatatgcaaaaatgaagaccgctactaatatttacctattgaatcttgctgtggccgatgagctgtttatgctctcagtcccctttgtggcatcaagtgccgccctgaggcactggcctttcggctcagttctctgtagggctgtcctctccgtggacggtctcaacatgttcacaagcgtcttttgcctcaccgtcctgtctgttgaccggtacgtagctgtagtgcatcctttgcgcgccgcaacctaccgacggccctccgtcgccaagttaattaacttaggtgtctggctggccagccttctggtcactctaccaatagctatcttcgccgatactcgccccgcccggggagggcaggcggtggcctgcaacctccagtggccccatcccgcctggagtgcagtgtttgtggtgtacaccttcctcctgggctttctgctacctgtgctggcaatcggcctgtgttacctgttgattgtcggcaagatgcgcgccgtggctcttagggcaggctggcagcaaagacgtcggagtgagaaaaaaattactcggctggttcttatggtggtcgtggttttcgtgctgtgctggatgcctttttacgtcgtacagctactgaatttatttgtgacaagtctggacgccactgtaaatcacgtttcactaattctgagttatgccaactcctgtgccaaccctattctgtacggattcctgagcgacaactttaggcgattttttcaaagggtgctctgtctcaggtgctgtcttcttgaaggtgccggcggggcagaagaggaacctctggattattacgcaaccgcattaaagtccaaggggggagctgggtgtatgtgtccacccctcccatgtcagcaggaagccttgcaaccagaacccgggcgcaaacggattccattgacgaggacgacgaccttttag

SEQ ID NO: 135714 - DNA, 1095 bp, synthetic construct
  misc_feature 1..1095: note = Description of Artificial Sequence: Synthetic coding sequence
  source 1..1095: mol_type = other DNA
atggaacctctcttcccagcttcaacacctagctggaatgccagctcacccggggcggcaagtggagggggtgataacaggaccctcgtgggccccgctccaagcgcaggtgccagggccgtcctcgtgccagtcttatatttacttgtgtgcgcagccggcctgggaggtaatacactggtgatttacgtggttctacgcttcgccaaaatgaagaccgtgactaatatctacattcttaacctggctgtggcggatgtgctctacatgctcggtctccctttcctggccactcagaatgcagcctccttttggcctttcggcccagttctgtgtaggctggtcatgacgcttgacggtgtgaaccaatttaccagcgttttttgtctaacagtcatgtcagtggacagatatctggccgtcgtacaccccctttccagcgctcgctggagacgcccacgggtggctaagctggccagtgcagcggcctgggtgctgtcgctgtgcatgtcacttcctcttctagttttcgcggatgttcaggagggcggcacatgtaatgcctcttggccagaaccagtgggcctttggggtgcagtattcataatatatactgctgtcctgggcttctttgctcctctgttggtgatttgcctctgctacctcctgattgttgtgaaagtaagggcggccggagtgcgagtcggatgcgttaggcggcggtcagaacgtaaggtcaccagaatggtcctggtcgttgtgctggtgtttgcaggttgttggctgccctttttcactgtcaacatcgtcaatctggccgtggcattaccccaggaacccgctagcgccggcctctatttcttcgtggtaattttgtcctacgcaaattcttgtgcaaatccggtcctttacggctttttgtcagacaattttcggcaatcattccaaaaagttctatgtctccgcaagggatccggagccaaggacgccgatgcgacagagccgaggcccgatagaattcgccaacagcaggaggcgaccccaccggcacaccgtgcagctgccaatggtttgatgcagacctcgaagctctag

SEQ ID NO: 135715 - DNA, 1095 bp, synthetic construct
  misc_feature 1..1095: note = Description of Artificial Sequence: Synthetic coding sequence
  source 1..1095: mol_type = other DNA
atggagccccttttcccagcctcaaccccatcgtggaacgctagttcacccggcgctgccagcggcgggggggacaatagaaccctggtgggccctgcaccttccgccggtgcccgagctgtcctggtacccgtgctctatctgctggtttgcgctgccggtcttgggggaaatacattggtcatatatgttgtgcttcggtttgccaagatgaagacagtgacaaacatctatattctcaatctggccgtggctgacgttctgtacatgctcgggcttccgttcttggccacccagaatgcagcctctttctggccattcgggcctgtgctctgcagattggtcatgaccttagatggggtgaaccagttcacctccgtgttttgtctgacggtgatgtctgtggatcgatacctggccgtggtacaccccctatcctcggccagatggcggcgcccccgggtggcaaaattagcctctgctgctgcttgggtgttgtctttgtgtatgagtctgccattgctggttttcgctgatgtacaggaagggggcacctgtaacgccagttggcctgagcccgttggcttatggggggctgtatttatcatttatactgccgtcctggggtttttcgcccctctgctggtcatatgcttatgctacctgcttatagtggtaaaagtgcgggccgccggcgtgagagtgggctgcgtcaggcgccgcagcgaaagaaaggtgaccaggatggtccttgtcgtcgttcttgtctttgctggatgctggctgccattttttactgttaatatagtaaatctggcagtcgcactccctcaggagccagcttccgccggattatacttctttgtcgtgatcttgtcttacgcgaattcttgtgccaaccctgtgctatatggcttcctcagtgacaattttcgacaatcatttcagaaggtgctttgcctgcgaaaagggtcaggcgctaaagatgctgatgcaaccgagccccgaccggatagaattcggcagcaacaggaggctaccccccccgcacatagagctgccgccaacgggcttatgcagacttcaaaactgtag

SEQ ID NO: 135716 - DNA, 822 bp, synthetic construct
  misc_feature 1..822: note = Description of Artificial Sequence: Synthetic coding sequence
  source 1..822: mol_type = other DNA
atggagccattgtttcccgctagcacccccagctggaacgctagtagtccaggagccgcctctggtggcggcgacaaccgcacactagtcggacctgctccaagtgcgggagcccgtgcagtcttagtgcccgtgctttatttgctcgtgtgcgccgcaggactaggcggcaacacactggtcatctatgttgttttgcgattcgccaagatgaagactgttaccaacatctacatactgaatctggccgtggcagatgtactttacatgctcgggctgccattcctggccacccagaatgctgctagtttctggccgttcgggcccgtcctctgtaggctcgtaatgacccttgatggtgtcaaccagttcacctccgtgttttgtttaactgttatgagtgtggatcgttatctcgctgtggtgcaccccttgagcagtgcacgctggagacgaccaagagtggccaaactcgcgtccgctgcagcctgggtgctttccttgtgcatgtccctcccccttctcgtgtttgccgatgttcaggaggggggcacttgtaatgcctcctggcccgaaccagtgggtctctggggggctgtttttattatatatactgctgtgctggggttttttgccccactgttacgcggttcaggcagggccggggacgccaacggaaggccctgggagagtaggcggctgcctccgaggatagttttgccccccccaccccaaaccccagcttttcccggcgcacctggaccagagcgggggccccgggagccctgctgggggctttggggtacgttagcactcctctag

SEQ ID NO: 135717 - DNA, 6978 bp, synthetic construct
  misc_feature 1..6978: note = Description of Artificial Sequence: Synthetic coding sequence
  source 1..6978: mol_type = other DNA
atggccaccaacatcgagcagatctttaggtcttttgtcgtgtccaaatttcgggagattcagcaggagctgtcatctggtaggaatgagggccagctgaatggcgaaacgaatacccccatcgaggggaatcaggctggcgacgctgcggctagcgcacgtagtcttcctaacgaagagattgtgcaaaagattgaggaggtactgagtggagtactggacactgaactgcgttacaaacccgacttgaaggaggggtccagaaagtctagatgcgtgtctgttcaaactgaccctaccgatgaaatccccaccaaaaaaagcaagaaacacaaaaagcataagaataagaagaagaaaaagaaaaaagaaaaggagaaaaaatataaacggcagcccgaggagtctgagtccaaaaccaaatcgcacgatgacgggaacattgatctggaatctgatagttttctgaaatttgactctgaaccaagtgctgtcgccctggagttgccaacaagagcctttgggccgagcgaaaccaatgaaagtcccgctgtagtgctggaaccccctgtcgtaagtatggaagtgtcagagccccatattctagaaactttaaaacctgcgacaaagaccgctgagctgtcagtggtgtctacctcagttatttccgaacagtcggaacagtctgtcgcggtcatgcccgaaccttccatgaccaagatcctcgattcattcgccgccgccccagtgccaaccacgacccttgtcctcaagtcaagcgagccggtggtgactatgtctgttgagtaccagatgaagtctgtcttgaagagcgttgagagcacttcacctgaacctagcaaaatcatgctcgttgagcctcccgtcgcgaaggtgctggagccaagtgagaccctggtcgtgtcaagtgaaacccctacggaggtttacccagagcccagcacatcgaccactatggacttccccgagtctagtgctattgaagctcttcgcttgcctgaacagcccgtggatgttccatccgagatcgccgatagctccatgacccgtccacaggaattaccagaactgcccaaaaccacagcgctggaattacaggaatcttcggtcgccagcgctatggagttacccggccccccagccacgtctatgccggaacttcagggcccaccagtgacacccgtcctcgagttgcctggtccatctgccacaccagttcccgagctccctggcccactgtctacgccagtccccgaactgccaggcccccccgcaaccgctgtccctgaattgcccgggccaagcgtgacacccgtgcctcaactctctcaggagctgccagggttgcccgcgccgagcatggggctggagccgccacaggaggtgcctgaaccaccagtgatggctcaggagctgcccggcctaccccttgttactgcagccgtggagctgcctgagcagccagccgtaaccgttgcaatggagctgaccgagcaaccagtaacaaccactgaactcgaacaaccggtaggcatgactacggtggagcatccgggccatccagaagtgactaccgccacaggcttactgggtcaacccgaagccacaatggtgctggaactgcccgggcaacctgtggccaccactgcactcgaactgccgggacaaccatctgtaactggtgtcccagagcttccaggactgccctctgctaccagagccctcgaactctccggacaaccagtggccaccggagcactcgaacttcctggaccactgatggcagcaggcgcgctggaatttagtggacaaagtggagccgccggcgccctggagcttttggggcagcccctcgcgaccggagtcctagagcttccgggccagccgggtgcccccgaactccccggccaacctgtggctacggtggcccttgaaatatccgtccaaagcgttgtcacaacatccgagctgagcaccatgaccgtgtcccagtccctggaagtgccgagtacgaccgcactcgagtcctacaataccgtcgcccaggagctacccacaaccctagtgggggagacgtcagtgactgttggagtcgacccattgatggcccctgagagtcatattcttgctagtaatacaatggaaacccatattctggcgagcaacactatggacagtcagatgcttgcttcgaacaccatggactcacagatgcttgcaagcaacactatggacagtcagatgcttgcttccagtactatggacagccagatgttggcaacttcctctatggacagtcagatgctggccactagttccatggatagtcagatgctggctaccagtacaatggactcccaaatgctggctaccagtagtatggacagccagatgctggccactagcagtatggactctcagatgttggccacctcaagtatggactctcaaatgctggctaccagctccatggattcccagatgctggccacatccacgatggactcccagatgctggccaccagtaccatggactcccagatgctcgcaacaagctccatggacagccagatgctggcaagcgggaccatggacagtcagatgctagctagtgggactatggatgcccaaatgctggcttcagggacaatggacgctcagatgctggcttctagtacccaggactcggccatgctaggctctaaaagtcccgatccctacaggctggcccaagacccttaccggctcgctcaagacccgtaccgccttggccacgacccatacagacttggtcacgacgcctacaggctgggacaggatccgtatagactgggacacgacccttaccgattgaccccagacccgtatcggatgtccccacgaccatatcgaatcgctccaaggagttatcggatagctcctcgtccctacaggctggcacctcgacctctgatgctggccagccgccgcagcatgatgatgagctatgcagccgagcgcagcatgatgagttcttatgaacgctcgatgatgtcctatgagcggtctatgatgagccccatggccgaacgctcgatgatgtctgcgtacgagaggtctatgatgtctgcatacgaacgcagcatgatgagtccaatggccgaacggtcaatgatgagcgcctatgaaagatccatgatgtcagcatacgagaggtcaatgatgtcgccaatggccgaccggagtatgatgtccatgggagccgacaggagtatgatgtcttcatatagtgccgctgacaggtcaatgatgtccagctatagcgctgcggaccgatctatgatgtcctcttataccgcagaccggtcaatgatgagcatggccgccgatagctacaccgattcctatactgacacctacactgaagcatacatggtgccccctctgccacccgaggagccacctacaatgccgcccctaccccccgaggaacccccaatgaccccgcctctgcctcctgaagagccccccgaaggacctgctctgccgactgagcagtctgccctgaccgcagagaacacttggccaaccgaggtccctagttcaccgtcagaggaatcagtgagccagcctgagccccccgtgtcccaatctgaaatctccgaaccatccgccgttcccactgactatagcgtatctgcctcggacccatccgtcctcgttagcgaagccgccgtgacagttccggaaccacctcctgaaccagagtcatcgataacgcttaccccagtggagagcgcagtggttgccgaggaacatgaggtggtccccgaacggcccgtgacatgcatggtgagtgagaccccagccatgagtgccgaaccaactgttttggcttctgaacctcctgttatgagtgagaccgcggagacatttgattccatgagagcaagtggacatgtggcttccgaggtgtccacgagcctgcttgttcccgccgtaactactccggtcctggccgaatccattttagaaccacccgccatggccgccccggaatcttccgctatggctgtattggagtctagtgccgttacagtcctcgagtccagtaccgtaacagttcttgagtcctctactgtgaccgtcttggaaccttcagtggtcacagtgcccgaaccacccgtggtggcagagcccgattatgtcaccattcccgtgccagtggtgagcgcattggagccgtcagtgcccgtacttgaacccgccgtctcagttctccaaccctctatgatagtttcagaaccgtcggtgtctgtgcaagaatctacagtgactgtctcggaaccagcagttacagtgtccgaacagacccaggtcatacccactgaggtggctattgaaagtacaccgatgattctcgagtcatctattatgagttcacacgtaatgaagggtattaatctgagttcaggggatcagaatcttgcacccgagatcggaatgcaagaaatcgcgctgcactccggcgaggaacctcacgcagaggaacacctaaaaggtgatttctatgagtccgagcatggtataaatattgatcttaatatcaacaatcatctcatagctaaggagatggagcacaacacagtttgtgctgccgggacctccccagttggcgagatcggggaggagaaaatattgccgaccagcgagaccaagcagcgaaccgtcctagacacttacccgggtgttagcgaggcagatgccggagagaccctgtctagcactgggccgtttgccctagaaccggacgccacagggacatccaaggggatcgaattcactacggcaagcacactcagccttgttaataagtacgacgttgatctctctttaactacccaggacaccgagcatgacatggtcataagcaccagtccctccggaggcagtgaggctgatatcgagggccccctgcccgcaaaagacatccacctggatctcccatccaataacaatctggtatccaaagacactgaggaacccctgcccgttaaggaatctgaccagaccctggcagctctcttgagccccaaggaatcttccgggggagagaaagaagttcccccgccacccaaggagacccttccggactctggttttagcgctaacatcgaagacataaatgaagccgacctcgtacgcccccttctgccaaaagacatggaacgcttgacaagtctgcgtgcagggatagagggcccactgcttgcgtcagacgtaggccgtgacagatccgcggcctctcctgtcgtctctagcatgcctgagcgggcctcagaatcgtcctccgaggagaaagatgattatgagatattcgtaaaggtgaaggacacacacgagaaaagcaagaaaaataaaaatcgagacaaaggggaaaaagagaagaagcgggacagcagccttcgcagtcgaagtaagaggtccaagtcctcagagcataagagtaggaagagaacatccgaatcaaggtctagagcccggaagcgatcaagcaaatcaaagtctcatcggtcccagacgcggtcccgctctcggtcccgcagaaggcgtcggagttctaggagccggagcaagtccagagggagaaggagcgtgtcaaaggaaaagcgaaagcggtcgcctaaacatcgctcaaagagccgcgaaagaaaacgcaagcgatcaagttcacgcgacaaccgaaaaacggtgagagcccgtagccggaccccctcaaggcgcagccgctcccacacaccgtcaagacggcggagaagcagatccgttggccgcaggaggtctttctctatatctccatccagacgtagtcgcactccatcccggcgcagccgcaccccatcccggagaagtcgcaccccgtccagacgttcccgcacaccttcacgcaggagccgcacaccatctagaaggtctaggactccttccaggcgtcgtcggagccgtagcgtcgtgcgtcgccgctctttttctatttctccagtgcgccttcggcggagtcgcacccctctgcgaagaaggttttctcggagcccaatcaggcggaagcgaagcaggtcaagcgaacgtggtagatccccaaagagactgaccgacctggacaaggcccagttgcttgagatcgcaaaagccaacgcagctgctatgtgcgccaaggccggggtgccattgcctccgaatctcaagccagcgcctccacctaccatcgaggaaaaggtggcaaagaaatcaggcggggctactatagaagagttaaccgaaaaatgtaagcagatcgcccagagcaaggaggacgacgatgtgatcgtgaacaagccacatgtgtcagacgaggaggaagaggaacctcccttctatcatcatcctttcaagttgtcagagccaaaacctatctttttcaatctgaatatcgcagctgccaagcccacaccccctaaatctcaggttacccttacgaaagagtttcctgtatccagcggcagtcagcacaggaaaaaggaagcggatagcgtgtatggcgagtgggtgcctgtggagaagaatggtgaggagaacaaggatgacgataacgtcttctcctctaacctgccctcagaacccgtggacatcagtactgccatgtctgagcgagccctggcgcagaagagattgtccgagaacgcctttgacttggaagccatgtctatgcttaacagagcccaagagaggatcgacgcctgggcccagctcaatagtattccgggccagtttaccgggtctactggagtgcaggtgttgacacaggagcagttagcaaatactggcgcccaggcttggattaagaaaggacagatcttggtagccgtcttcctcccacggtccgtcccagctgtcctctttactacactgcttttaccccgaccccgcatttcatcttag

SEQ ID NO: 135718 - DNA, 6912 bp, synthetic construct
  misc_feature 1..6912: note = Description of Artificial Sequence: Synthetic coding sequence
  source 1..6912: mol_type = other DNA
atggcgacgaatatagagcagatatttaggagttttgtggtcagcaagttcagggaaatccaacaagagttgtcttctggacggaatgagggtcaactgaatggcgaaacaaacactcctatcgagggcaaccaggccggtgacgccgccgcgagtgctaggtccctgccaaacgaggaaatcgtccagaagatcgaggaggttctgtcgggcgtcctcgacactgagctgcgatacaaacctgacttgaaggagggttccagaaaatctcgctgtgtatccgtgcagaccgatccgaccgatgagatccccacgaagaaaagtaaaaagcataaaaaacacaaaaacaagaagaagaagaaaaaaaaggagaaagagaagaaatacaagcggcagccagaggagtcagagtccaagacgaaatcacacgacgacggcaacatcgatctcgagtccgactccttccttaagtttgatagcgagcctagcgctgtggctcttgaactccctacgagggccttcggcccttccgagaccaatgaaagcccggctgttgtgctggaacctccggtggtgtccatggaggtaagcgagcctcatattctggagactctgaaaccggcaactaagaccgctgagttgagtgtcgtgtcaacatcagtgatctcagaacaatcggaacaatccgtagctgttatgcctgagccttcaatgactaaaatcctggatagctttgcggctgcccctgtaccaacaaccaccctggtcctcaaatcctcagagcccgtagtcaccatgagcgtggagtatcagatgaagagcgtgctcaagtccgtagagtctaccagcccggagccctccaagattatgctcgtcgagccccctgttgccaaagtgctggagccttcagaaactttggtggtgtcctctgaaactccaacggaggtgtaccccgagccgagtacatctacaacaatggatttcccagaatcctctgccatcgaagccctgcgccttccagaacagcccgtggacgtcccaagtgagatcgctgattcttctatgaccagaccgcaggagctccctgaattgcccaagacaactgcattggaacttcaggagagctctgttgcctccgccatggagttaccaggacccccagccacctctatgcctgaactgcagggccctcccgtaactccggttctggaattgccgggcccctcagcaacaccggttcctgaactgccagggccactcagcacacctgtgcccgagctcccagggccacctgcgacagccgtaccagagctaccaggtccttcggtcactcctgtcccccagctttcacaggaattacctgggctgcccgcaccttccatgggactggaacccccacaggaagtacctgagccacctgtgatggcccaagagctgcctgggttgcctctcgttacagcagccgtggaactgcctgagcagcccgccgtaaccgtagcgatggagttgaccgaacagcctgtcacaaccacggagctggagcagcctgtcggtatgacaacagtcgaacatccgggacacccggaggttactaccgcaacggggctgctgggtcagccggaagccacaatggttctggaactccccggccagcccgtcgccacaactgccctcgagttgccaggccagcctagcgtaacaggcgttcccgagctgcctggactcccatctgctactagagccctggagctgagtggccagcctgtggccacgggtgccctcgagctgccagggccacttatggccgccggcgccctggaattcagtgggcagagcggggccgctggtgctctggagctattgggccagcccctcgccacgggtgtgttagagctccctggccagccaggggcccctgaactgccgggacagcccgtggcaacagtggcgctggaaatcagcgtgcagagtgtcgtgactacctcagagttatcaaccatgaccgtcagtcagtccctcgaagtcccgtcaacaacagctctagagagttacaatacagtggctcaagaactgcccacgaccctggttggtgaaaccagtgtgaccgtaggcgtggaccccctgatggcccctgaatcgcatattctagcgagcaatactatggagacccacatattggctagcaatactatggatagccaaatgctggcttctaatacgatggactcacagatgttggcctctaacactatggacagccagatgctagcaagctccacgatggactcacagatgctggcgacctcctccatggacagccagatgttggctacctcgtctatggactctcagatgcttgcaactagcaccatggatagtcagatgctcgctactagttctatggactcccagatgttggccaccagtagcatggactcccaaatgttggccacttcgtctatggactcacaaatgctcgctacaagttctatggattcccagatgctggcgacttctaccatggattcacagatgcttgcaacctctacaatggactcccagatgctagcgacaagcagtatggattcccaaatgctcgcatctggcactatggattcgcagatgctggcatcaggaacgatggacgcacagatgctggcctcaggcaccatggacgctcaaatgctagcctccagtacccaggattcggcaatgctgggttccaaatccccagacccttatcgtcttgcccaggatccttacagactcgcacaggatccatatcgacttgggcacgatccttatcgtctggggcatgacgcctaccgtctcggacaagacccgtaccgactggggcacgacccatatagattaactcctgatccatatcgaatgagtcctcgcccgtaccggattgcgccccgctcctatcgtattgccccaagaccctatagattggccccgcggccactgatgcttgctagccggcggagtatgatgatgagttacgccgccgaacgatccatgatgtcttcctacgagcgcagtatgatgtcttatgaacgcagcatgatgtctccgatggcggagaggagtatgatgtcggcctatgaacggagcatgatgagcgcctacgaacgtagcatgatgagccccatggctgagcgctccatgatgtcagcttacgagcggagcatgatgtctgcatacgagagatcaatgatgtcacccatggctgatcgctctatgatgagcatgggggcggacagaagcatgatgtctagctactccgcggccgacagatctatgatgtccagttactcagcagccgataggagtatgatgtcctcgtatacggccgatcgcagtatgatgagcatggctgctgactcttataccgactcatatactgacacgtataccgaagcctacatggttccccctttgccgcctgaagaaccacctacaatgccaccgcttccacccgaagaaccccctatgacccccccattgccacctgaggaacctccggaaggacccgcactcccaaccgagcagagcgcactaactgcggagaacacctggcccactgaagttcctagctcccctagcgaggaatcagttagccaacctgaacccccagtctcacagagcgagatctctgagccatccgccgtgccaacggactacagtgtgtccgcgtcagatccctctgtcctcgtgagtgaggctgcggtgaccgtccctgagccccctccagagcctgagagttccattaccctaactccagtggagtcagccgtggttgcagaggagcacgaagtcgtgcctgaacgccccgtgacatgcatggtttccgagacacccgcgatgagcgcggagcccacagtactggctagcgagcctcccgtgatgtctgaaacagctgaaacatttgatagtatgagagccagcggccacgtcgcctctgaagtgagcactagtcttttagtccctgccgtgacaactcctgttctcgctgagagtatcttggagcctcctgccatggcagctcccgagagttctgccatggcagtcctggaatcaagtgcagtgactgtgctggagtctagcaccgttaccgtgctggaatccagcaccgtaacagtgcttgagccgagcgttgttaccgtgccagaaccccccgtagtagccgagcctgattatgtcacaatcccagtgccggtcgtctccgctctcgagcctagtgtccctgtgttagaacctgctgtgagtgtactccagccatctatgatagtgtcagagccctctgtgtcagtgcaggagtccacagtcaccgtgtcagagccagctgtgaccgtatctgagcaaacccaggtaattcctactgaagttgcaatcgaaagtacacctatgatcttagagagtagcattatgtccagtcacgtcatgaaaggtatcaatctttctagcggtgaccaaaatttggctcccgaaataggaatgcaggagatagctctgcactccggtgaagaaccacacgcagaagaacatctcaagggggatttctacgagagtgagcacggaatcaatatcgatcttaacattaataatcacctgatagcgaaagaaatggagcacaacacagtatgtgccgcaggaactagcccagttggagagatcggtgaggaaaagattctccctacttccgagacaaaacagcgtactgttttggatacttatccaggggtgtcagaggccgatgccggggagactctctcctcgactggcccattcgcccttgagcctgatgcaaccggaacctccaagggaatcgagtttactacagcaagtaccctaagcctggtaaacaaatatgacgtggatttgtcccttaccacacaagatacagaacacgacatggtgattagcactagcccgtccgggggctccgaagctgacatcgaaggcccacttccagctaaggacatccatctggacctgccatccaataacaatttagtttcaaaagacactgaggaacctcttcctgttaaagagtcagatcagacccttgccgccttgctgtccccgaaagagtccagcgggggtgagaaggaggtgcccccgcccccaaaggagaccctgcccgatagcggctttagtgccaacatcgaagacatcaacgaggctgacttagttaggccactactccctaaggatatggagcgtctgacctcgctgcgggccggtatcgaaggacccctccttgctagcgatgtgggcagagacaggtctgccgctagtcccgtggtcagtagtatgcccgaacgggcctccgagagcagctcggaggagaaggatgactacgaaatctttgtaaaggtgaaagacacccatgaaaagagcaagaaaaacaaaaatagagataaaggcgaaaaggaaaaaaagcgggactcatcactcaggtctcgcagtaaacggtccaagagctcagaacacaagagcagaaaacgaaccagcgaatccagaagtcgcgcacggaagcgctctagcaaatcgaaatcccaccgatctcagacaagaagccgcagtcgatcaagaagaagacgcagatcaagccgctctagatccaaatcacggggccgccgtagtgtctcaaaggaaaagcgcaagagaagcccaaagcacagatcaaaatcacgcgaaaggaaacgaaagcggagttccagtagagataaccggaagactgtgagggctcggtcaagaacaccttctaggcgtagccggtcacacactcctagccgtcggaggaggtcccggtccgtgggccgtcgccgcagtttctccatctccccctcaaggcgcagcaggactccctctcggcggagccggacaccttcccgacggagccgcacgcctagtcggaggtccagaacaccttctcgaaggtccaggaccccaagcaggcggagccgcaccccaagtagaagacgtcgatcgcgctctgtggtccgaaggaggtcgttctcaatcagcccagttcggctgaggagatcccgcacaccactacggaggcggttcagccgttctcccattcggcgcaagaggagccgatcttccgagcgtggtcgctcccccaaacggcttacagacttggataaagcacagctacttgagatcgccaaggcaaatgcagccgcaatgtgtgcgaaagcaggggtaccgttaccacccaacctcaagccagcaccacctcccaccatcgaggagaaggtggctaagaagagtgggggggccacaattgaggaactgaccgaaaaatgtaagcaaattgcacagtccaaggaggacgacgatgtgatcgtcaataagcctcacgtgtcggatgaggaagaggaggaacctcccttttatcaccacccattcaaactgtcggaacctaagcctatcttctttaatttaaatatcgctgccgcaaaacctacaccaccaaagagtcaagttacactgacaaaggaatttcccgtgtcctcaggatcacagcataggaagaaagaggccgactctgtgtacggggagtgggtgcctgtagaaaaaaacggcgaggagaacaaagacgatgacaacgttttttcgtctaacctgcccagtgaggggcgtgtgaagcgacagggtcgtgtgcgcagacagatgaagcagccagccgccagccatctcactgtaacccgctgcaatagcctctgcgggactaagccgcagagtgaaaaacatcgcattgcggagaatagcgttataacatcgctacccaacatcgggccaagccttcatttgtgggaaggatctccaaggtacaactatctggcctccagattcgcctcgcgtctctactcatcccgcttctggtggtag

SEQ ID NO: 135719 - DNA, 7281 bp, synthetic construct
  misc_feature 1..7281: note = Description of Artificial Sequence: Synthetic coding sequence
  source 1..7281: mol_type = other DNA
atggccacaaacatcgagcagatttttcgatcttttgttgtcagcaagtttagggaaatacagcaggaacttagttcaggtcggaatgaaggacagcttaacggagaaaccaacactccaatagaagggaaccaagctggcgacgcggccgccagcgctaggagcctgccaaatgaggagattgtgcagaagattgaggaggtgctgagtggagtgctggataccgagctcaggtacaagcccgacctgaaggagggaagtagaaagtcgcgctgcgtaagcgtgcagacagatcctactgacgagattcccactaaaaagagtaaaaagcacaagaagcataaaaacaaaaagaagaagaaaaaaaaggagaaggagaaaaagtataaacgccagcccgaggaatctgagtccaagactaagagccatgacgacgggaacatcgatctggagtccgattcctttcttaagttcgacagcgagcctagtgccgttgctttagaattgcccaccagggccttcgggccctccgaaaccaatgaatccccagcagtcgtgctggagccacccgtggttagcatggaggtgagtgaaccccatatactcgagacgctaaagcccgcgacaaaaacagccgaactgtcagtcgtcagtacttctgtgattagcgagcagtccgaacagagcgtagcagtcatgcctgagccatccatgacaaaaatactcgacagcttcgccgccgctcctgtaccaaccactaccctcgtgctgaagtcctccgagccagtagtgactatgtccgtagagtatcaaatgaaatcggtgctgaaatcagtggagagcaccagtcccgaaccatctaaaataatgctagtcgagccgccggttgccaaagtgctggaaccaagtgaaacactggttgtgagtagtgaaactcctactgaagtctaccccgagccttccactagcaccacgatggatttcccagagtctagtgcgatcgaagctttgcggttgccagaacagcctgtagacgtcccaagcgagatcgccgacagctcaatgacccggccacaggaacttcccgagctgcctaaaacaactgcgctggaactgcaggagagctctgtcgcttccgccatggaattgcccggcccccccgctacgtccatgcccgaactgcaaggacctcccgtgaccccggtgctggaactccctgggccgtccgctaccccagtgcccgaactacccggtccccttagcacccctgtccctgagctcccggggcctccggctactgccgtgccagagctgcccgggcccagcgtcacaccagtaccccaacttagccaggagctccccggcctccctgctccgagtatgggcctcgagccgccacaggaagtcccagaaccaccagtgatggcccaggagctgccaggactgccgctcgtgactgcagccgtagagttaccagaacagcctgcagtgacggtggccatggagctgaccgagcagcccgtcacaaccacagaattggaacagccggtcggaatgactacagtggagcaccccggtcacccagaggtaactactgctactggactgctggggcagcctgaggcaactatggtgctggagcttcctggccagcctgttgcaacaacagcgctggaactgcctggacaaccttctgttactggggtccccgagttaccaggactgccatctgccacccgagcgctggagctgtctggacagcccgtggccactggtgccctggaacttcctgggcccctcatggccgccggtgcactggaattcagcgggcagagtggagcggcaggcgccctggagttactcgggcagccattagctacaggtgtgctggagcttcccggacagcctggggcacctgaacttccagggcaacccgtggccacagtcgccctcgagattagcgtacagagcgttgtcactaccagcgagctgtctacgatgacagtaagccaatccctcgaagtgccctcaactaccgcgctggaaagctataatactgtggctcaagaattacccactactctggtgggggagacatctgttacagtcggtgtcgatccactgatggccccagaatcgcacatactggctagtaatacaatggagactcacattctggcgagcaatactatggattctcagatgttagcctcaaacacaatggactcacaaatgctggcatctaacaccatggatagccagatgcttgctagctcgacaatggatagccaaatgctggcaacatcttctatggacagtcagatgcttgccacatcttcaatggactcccagatgttagccaccagcacgatggactctcagatgctggccacaagctccatggattcacagatgctcgctacttctagcatggattctcaaatgttggcaaccagctcaatggactcgcagatgctagccacgagcagcatggactcgcagatgctggcaacctctactatggattctcagatgttggcaaccagtacaatggactctcagatgctggctacctcttctatggattcacagatgctggcctccgggactatggattctcagatgttagcttctggcacaatggatgcacaaatgctggccagcggaaccatggatgcacagatgctcgcttcctcaacccaggactcagccatgctaggcagtaagagccccgatccctacagattggcccaagatccctacaggttagcgcaagacccctataggctcggtcacgatccatacagactcggccacgacgcctatcgactcggccaggatccgtatcggcttgggcatgatccttaccggctcacacccgacccctaccgcatgagccctcgcccctacaggatcgcaccacgttcgtaccggatcgctcctagaccttacaggctcgcaccacgcccactgatgctggcgtccagaagaagtatgatgatgtcctatgctgccgagagatccatgatgtcaagttatgaacgtagcatgatgtcgtacgaaaggtctatgatgtcccccatggccgaacggagcatgatgtccgcctatgaacgctccatgatgagcgcttatgaaaggagcatgatgagcccaatggcggaacggtcaatgatgtctgcatatgagcgatccatgatgtccgcctatgagcggtcaatgatgagtcccatggctgacagatctatgatgtcaatgggagcagacagaagcatgatgtcatcttactcagccgccgaccgctccatgatgagctcgtacagtgctgccgatcggagtatgatgagttcttacaccgccgaccgaagtatgatgagcatggccgccgacagctatacagacagctatactgacacatacacagaagcttatatggtgcctccccttccacctgaagagccccccaccatgcctccacttcccccagaagagccccccatgacaccacctctgccacctgaagagccccctgagggcccggctttgcccactgagcaatcagcgctcactgccgagaatacttggcccaccgaggtgccatcaagtcctagcgaagaatctgtatctcagcctgagccaccagtatcacagagcgaaattagcgagccctccgctgttcccaccgattacagcgttagtgcctccgacccaagcgtattagtgtctgaagccgcagtgacggtacccgaacctcctcctgagcccgaatcatctattactctcactccagtcgaaagcgcagttgtcgcagaagaacacgaggtggtgcctgagagacccgtgacctgcatggtctcggagactccagcaatgagcgcagaacccaccgtgttggcttcagagccccctgtgatgtctgagactgccgagacctttgattcaatgagagcaagcggacacgtcgcgagcgaggtctccacttcccttctggtgcctgctgtgaccactcctgttttagccgaatcaatcctcgagcctccagctatggcagctcccgagtctagcgccatggctgtcctcgaaagctccgccgtaactgtgctggagagcagcaccgtgactgtgctcgagtcctctactgttacagtactggaaccttcagtagttacggttccagagccacctgtcgtggccgagcctgactacgtgactatcccggtgcctgttgtcagtgcgctggagccttctgtgcccgtcctggagcccgctgtgagcgttttgcagccatctatgatcgtcagcgagccaagtgtgagtgtgcaggagtctacagttacagtctcagagcccgccgtaaccgttagcgaacaaacccaggtgataccaacagaagtggccattgagagcacacccatgatcctggaatcctccatcatgtcttcacacgtcatgaaaggcatcaacctgagctctggcgatcaaaatctggctccagaaatcggcatgcaggagatagccctgcattcaggtgaagagccgcatgccgaggagcacttgaaaggcgatttctacgagtccgagcatggtattaacatcgacctcaatattaacaaccacctgattgcaaaggagatggaacacaacacggtttgcgcagctggcacctcacctgtgggcgaaatcggtgaagaaaaaattctccctacgagcgagaccaaacaacgaacagtgctagatacctatccaggagtgtcggaagccgacgccggtgagacattatcctcaacaggcccatttgcgctggagcctgatgctacaggaactagcaaagggatagagttcactactgccagcaccctgagcctggtaaacaaatatgacgtcgatctgtccctaactacccaggatacagaacatgacatggtcatatcaacctccccttcaggtggctctgaagccgatatcgaagggccgctgcccgctaaggatatccacttagacctgccgagtaacaacaatctggtgagcaaggacaccgaggagcctctgcccgtgaaggaatcagaccaaactctcgcggcgctcttgtcccctaaggaaagtagtggcggcgagaaagaggtgcctccacctcccaaggagacccttcccgatagtggcttcagcgctaatatagaggatatcaacgaggccgatctcgtcagaccattgctccctaaagatatggagaggcttacaagcctcagagctgggatcgaaggaccgctgctggcctctgacgtgggccgcgatagatctgccgcctcccctgtggtcagttcgatgccagagcgcgcctccgagagcagttcagaggaaaaggacgattacgaaatcttcgtcaaagtcaaagatacacacgagaagagtaaaaagaataaaaatcgcgataagggggagaaggagaagaaaagagatagctctctcagaagcaggtcaaaaagaagtaaatcaagcgagcataagagtcggaagcgtactagtgaatcaaggagtagggcacggaaacggagttcaaagagcaagtcgcatcgctcacaaacgagaagtcgcagccggtcccggcgtcgcaggagaagctcccggtccagaagtaagtcccgcggccggcgttcagtgtcaaaggaaaagagaaagaggagcccaaagcatcgcagtaaatctcgggaacgaaagaggaagcgctcttcctcccgcgataataggaagacagtccgggcgagatcccgcacgccaagccggcggagccgctcccacactcctagtcgccggcgccgaagccgttctgtcggccgacgcagatctttttcaatatcccccagtcgaagaagcaggaccccatcaagacgtagccgaacaccgtctcggagatccaggaccccttcaaggcgcagccgcactccaagccggagatcacggaccccctctcggaggagcagaaccccatctaggaggcgtaggtcacgaagcgtggtgagaagaaggagtttttccattagccccgtacggctgcgtcggtcccgaacccccctccggcgtcggttttctagaagccctatccgtaggaaaaggtctcggagtagcgagaggggacgctccccgaaaaggctcactgatcttgataaggctcagctgcttgagattgcgaaagcaaacgctgccgctatgtgtgccaaggcaggagttccgctgccaccaaaccttaagccagctcctcctccaaccattgaggagaaggttgccaagaaatcaggcggtgccaccatagaggaactgacagagaaatgcaaacagatcgcacagtccaaggaggatgatgatgtgattgtgaacaagccgcacgtgtcagacgaagaagaagaagagcccccattctaccaccatccatttaaactgagcgagccgaagccaatttttttcaacttaaatatcgctgcggcgaaacccaccccaccaaaatcacaggtcacactcacgaaggagtttccggtctcctccggctcccagcatagaaagaaagaagccgatagcgtgtatggggaatgggtgccggtggagaaaaacggtgaagaaaacaaggacgacgataatgtttttagctctaatctgccttctgagcccgtcgatattagcactgctatgagcgagcgcgctctggcacaaaagcgcctttctgaaaacgcttttgacctcgaggctatgagcatgttaaaccgcgctcaggagcgcatagacgcgtgggcacagctgaacagtatcccaggccagtttacaggatctacaggagtccaggtgctgactcaggaacagctggcgaataccggcgcccaggcttggatcaaaaaagatcagtttctgcgggctgcaccagtcacaggaggtatgggggctgtactcatgaggaaaatggggtggagggagggtgagggactcggtaagaacaaggaggggaataaagagccaattctggtagatttcaagaccgacaggaaagggttagttgccgtgggcgaaagagcacagaagcgctccggtaactttagcgccgctatgaaagatctttccggtaaacacccggtatcagccctgatggaaatctgtaacaagaggcgatggcaacctcccgagtttttgctagttcatgattctgggccagaccacagaaaacattttctctttcgtgtgctgcgcaatggcgcactgacgaggcctaactgcatgttttttctgaatcgctactag

SEQ ID NO: 135720 - DNA, 1584 bp, synthetic construct
  misc_feature 1..1584: note = Description of Artificial Sequence: Synthetic coding sequence
  source 1..1584: mol_type = other DNA
atggcgccagagcggttgcgaagccgggctctttccgctttcaagctcaggggacttctccttcgcggtgaagctatcaaatatctgacagaggccctgcagagcatttccgaactggagttagaggataagctcgaaaaaataattaacgccgtcgagaaacagcctctgagtagcaacatgatagaaaggtcagtggtggaagctgccgttcaggagtgtagccagagcgtggacgaaacaattgagcacgtgtttaatattattggcgcttttgatattcctcgcttcgtctacaacagcgagcgcaagaagtttctgcccctgctcatgaccaaccaccccgcacccaatctgtttgggacaccccgagataaggctgagatgtttagggaacgctacaccatcttgcaccagcgtacccatcggcacgagctgttcactcctccagtgattggaagtcacccggacgaatcagggtctaagtttcagctaaaaacaatcgagactctgctcggctccacaaccaaaattggcgacgcaatcgtgctgggaatgattactcagttaaaggaaggaaaatttttcctggaggatcctacaggtaccgtgcaactcgatctctcaaaggcacagtttcatagcggactgtacacggaagcctgcttcgtgctagctgaaggatggttcgaagatcaagtctttcatgtgaatgcgttcggcttcccaccaactgagccaagttctactaccagagcatattatggcaacattaactttttcggagggccctcaaacacaagtgtgaaaaccagcgccaaactcaaacaactcgaagaggaaaacaaggacgctatgtttgtgtttctaagtgacgtgtggctggaccaggtggaggtgctcgagaaactgcggataatgtttgctggctatagccctgctcctcctacctgcttcatcctctgcggaaacttctcatcggccccatacgggaaaaaccaagtgcaagccctcaaggatagcctgaagacacttgctgatattatctgcgaataccctgatatacatcagagctccagatttgtgtttgtgcccggccctgaagaccctggcttcggttccattctgccaagacctcctctcgccgagagtattaccaacgagtttcggcagagggtgccattctcagtcttcacgaccaatccatgccggatccagtattgtacccaggaaatcaccgtgttccgcgaggatctggtgaataaaatgtgccgaaattgcgtgaggttcccctctagtaatctggcaatccccaatcactttgtcaagactatcctttcccagggccacctgacaccgctgcctctgtatgtgtgtcctgtctactgggcctacgattatgcacttcgggtctacccagttcctgacttgctggtaatcgcagataaatacgaccctttcacaacaacaaataccgagtgtctgtgcattaaccctggctcgttcccacgttctggtttctcctttaaagttttttatcctagcaataagactgtcgaggattcaaaactgcaggggttttag

SEQ ID NO: 135721 - DNA, 3900 bp, synthetic construct
  misc_feature 1..3900: note = Description of Artificial Sequence: Synthetic coding sequence
  source 1..3900: mol_type = other DNA
atgcagcaggccccacagccctacgaatttttcagcgaagaaaattcacctaaatggagggggttgcttgtctctgcgttgcgcaaggtgcaggaacaggtgcacccgacactctctgcaaatgaagagtcactgtactatattgaagaactaattttccaactactcaataaactgtgtatggctcagccgcggactgtgcaggacgttgaagagagagttcagaagaccttcccgcaccctattgacaagtgggctattgccgatgcccagtctgcaatagagaagcgaaaacggaggaatccccttctcctccccgtcgataagatccacccaagcctcaaggaagtgctgggctacaaggtcgattatcatgtctccctctacattgtcgcagtgctcgagtatattagcgccgatatcctgaagcttgccggcaactacgtatttaacattcggcattatgagatttcccaacaggacataaaggttagtatgtgcgccgacaaagtgcttatggacatgttcgaccaggacgatatagggttggtgagcctgtgcgaagatgaacctagtagtagcggagagttgaactactacgacttagtgcgaaccgagatcgctgaggagcggcagtacctgagggaactgaatatgatcattaaagtatttcgtgaggcattcctgtccgaccgcaagttatttaagcccagtgacatagaaaagattttttctaatatcagcgacatccacgaactaactgtgaagctgcttggcctgatcgaagacacggtcgagatgaccgacgagtcctccccccaccctctcgccgggtcctgcttcgaggacttagcagaggagcaggcttttgatccttacgagacactgtcccaggatatcctctctcccgagttccacgagcatttcaacaaactgatggccagacctgcagtagctctacacttccagcaacttaaggcatgttctgaggaacaggaggatagagagtgtttgaatcaggcaatcacagccctgatgaacctccagggctcaatggaccggatttacaagcagtatagtccacggcgccgcccaggagaccccgtttgtccgttttactcccaccagctccgaagcaaacatctcgcgatcaagaaaatgaatgaaatccagaagaacatagacggatgggagggaaaggacatcggccagtgttgcaacgagtttatcatggaaggacccctcacccgaataggggctaagcacgaacgacacatcttcctctttgatggccttatgatctcgtgcaagcctaatcatggacaaactcggctgccggggtactcttccgccgaatatagactgaaggagaagtttgtgatgcgcaaaatacagatctgcgataaggaggacacctgtgaacataagcacgcctttgaactagtgagcaaagacgaaaactctatcattttcgcagccaaatctgcagaggaaaaaaataactggatggctgcactcattagtttgcactatcggagcacattggatcgcatgctggactcagtgctccttaaggaggaaaacgagcagcccttaagattgccatcaccagaggtttacaggtttgtggtgaaggatagcgaggagaacattgtgttcgaggacaatctgcagagtaggtccggcatccccattatcaagggaggaactgttgttaagctgatcgagaggctcacctatcacatgtatgccgatccaaactttgtgcgcacctttctgacgacataccgctctttttgcaagccccaggaattgctcagcctgctgatcgaacgcttcgagattcccgaaccggagcctacagacgcagataagcttgctatagagaaaggcgaacagcccatctcagcagatttaaagcggtttagaaaggaatacgtgcagcccgttcagttaaggattctcaatgtgttccgccactgggtggaacatcatttttacgattttgaaagggacttagagctgctggaaagactcgagtcatttattagctcagtaaggggcaaggctatgaagaagtgggttgagagcatcgcgaaaatcatcagacgcaaaaagcaggcgcaggctaacggggtcagccacaacataacattcgaatctccaccacctccaatcgagtggcatatatctaagcctggtcaatttgagacgtttgacctcatgacgctacatcccatagaaattgcccgacaactcacgctgctcgaaagcgacctgtaccgaaaagtgcagcctagcgagttagtggggagtgtgtggaccaaagaagacaaagagatcaattcacccaatctcctgaaaatgatcagacacacaacaaatttgacactgtggtttgagaagtgcattgtggaggcagaaaactttgaggaacgcgtggcagttctgagcaggatcatcgagatcttgcaggtcttccaggacttaaacaatttcaatggtgtgctcgagatagtttctgcagttaacagcgtgagcgtgtacaggctggaccacacattcgaggcactgcaggagcgcaagagaaagatcctcgatgaagccgtagaattgtcacaggatcattttaaaaaatatctggtcaagcttaagtcgattaatccaccttgcgtgcccttctttggtatttacttgacgaacatccttaagactgaggagggcaacaacgattttctcaagaagaaggggaaggatctcattaactttagtaaacgaagaaaagtggcagagattacaggtgagatccagcagtaccaaaaccagccgtattgcctgcgcattgagcctgacatgcgcagattcttcgaaaatttgaacccaatgggctctgcaagcgagaaagagtttacggactatctgtttaacaaatccttagagatcgagccccggaattgcaagcagcccccaaggtttccacgaaaatccacattcagcctcaaaagcccaggtattagacctaacactggtaggcacggctcaacctctggcaccttgcggggccatcccaccccgctcgaacgcgagccatgcaaaatcagtttttcacgcatcgcagaaaccgagttggaaagtacagtatccgccccaaccagcccaaatactcccagcacccctcctgtctccgccagttctgatctgtcagtattcctcgacgtggatctgaacagttcatgcggtagcaattccatcttcgccccggtactcctgccacattctaagagttttttctctagctgcggctccctgcataagctgagcgaggaacctcttatcccccccccacttcctccacgcaagaagtttgaccacgacgcctctaattcgaaaggaaatatgaaatcagacgatgacccacctgcaataccacctcgtcagccacctccacctaaggtcaagccccgtgtgccagtgcccactggtgcgtttgacggaccactccactccccacccccacctcctccccgcgatcctctcccagacacccccccgcctgtgcccctgcgcccaccagagcatttcatcaactgccccttcaacctccaacctccacccctggggcacttgcaccgcgacagcgactggctccgcgacatcagcacatgtccgaactctccctccacacctccgagcacccctagcccaagagtgccccgacgatgttacgttttgagtagcagccaaaataacctggcacatcctcccgctccccccgtgccaccacgccagaactccagcccacaccttcctaagctcccccctaagacttataagcgcgaattgagccaccctcccttatataggttacccctgctagagaacgcggagactccccagtag

SEQ ID NO: 135722 - DNA, 1389 bp, synthetic construct
  misc_feature 1..1389: note = Description of Artificial Sequence: Synthetic coding sequence
  source 1..1389: mol_type = other DNA
atgctactcttggctcgctgcctgttattggtgctggttagcagcctattggtgtgtagcgggctcgcctgcgggccagggcggggttttgggaagcgacgacaccccaaaaagctgacccctctcgcatacaaacagtttataccgaacgtggccgagaagactctgggagccagcggaagatacgagggaaaaatctcaaggaattccgaaaggttcaaggagctgactccgaattataatccagacattatcttcaaggacgaagagaacacaggtgcggaccgtctgatgactcaaaggtgtaaagacaaactgaacgccctggccattagtgtaatgaatcagtggcccggggtcaagctgagagttaccgaggggtgggacgaagatggccaccatagcgaggagtctttgcactacgaaggccgtgccgtcgatattaccaccagcgatcgagacaggtctaaatacggaatgctcgctcggctcgccgtggaggctggcttcgactgggtatattatgaaagtaaggctcatatccattgcagcgtgaaggcagaaaacagtgttgccgcaaaaagtgggggctgctttccgggatcagcgactgtgcacctcgaacaaggcggtacaaaattggtgaaagatctgtcccccggggatagagttttggcggcagacgatcaagggaggctgctgtacagtgattttctgacgttccttgatcgggacgacggggctaagaaagtcttttacgtgatcgagaccagggagccgcgcgagcggctgctcctcacagctgcacacctcttatttgtggctccccacaacgatagtgccacaggagaaccagaagctagctctggatctggccctccaagcggtggggctttaggtcctagggcactgtttgcttctagagtcagacctggccagagggtgtatgtcgtagccgaaagggatggggaccggcgcctccttcccgctgccgtacacagtgtgacactgtctgaggaagccgcaggggcttatgctcctctgaccgctcaaggcaccatcttaattaatcgtgtcctggcctcttgttacgccgttatcgaggaacacagctgggcccatagagccttcgcgccctttaggctggcccacgccctcctggcagcccttgccccggccagaactgacagagggggggacagcgggggaggcgataggggcgggggcggaggcagagtggcccttaccgctcccggagccgctgacgcaccaggggcaggggcaaccgccggtatccattggtattctcagctactctatcagataggcacatggcttctggatagtgaggccttgcacccacttggtatggcggtcaagagttcctag

SEQ ID NO: 135723 - DNA, 3456 bp, synthetic construct
  misc_feature 1..3456: note = Description of Artificial Sequence: Synthetic coding sequence
  source 1..3456: mol_type = other DNA
atgtctagcgaatgcgatggagggtctaaggcagtgatgaatggtctggcccccggatcaaatggccaggacaaggctactgcggatcctctcagggctcgaagcatttccgctgtcaagatcatacccgtgaagacagtgaagaatgcctctggactcgtgctgccaactgatatggaccttactaagatttgtacgggtaagggtgccgtcactctccgtgcttcttcctcttaccgagagaccccctccagcagtcctgccagtccacaggaaacacgccaacacgaatcaaagcccggacttgaacccgaacccagcagtgccgatgagtggagattgagctcttccgctgatgccaacggtaacgcccagccttctagtctggctgcgaagggctatagaagtgtacatcctaacttgccatctgataagtcacaggatgcaacttctagtagcgctgcacagccagaggttattgtggtgcctctgtacctggtgaacactgaccgcggacaggagggcacagcccgcccccccactcccctgggccccctgggctgtgtgccaaccatccctgctaccgcatctgccgcctctccacttaccttccctactctggacgactttattcctcctcacctgcaacgttggcctcaccactcccagcccgcacgggccagcgggagctttgcaccaatttcccagaccccaccttcattttcccccccaccaccattggtgccacctgcccccgaggatttgcgtcgggtaagtgagcccgacctgaccggggccgttagctctacagattcatccccgctccttaatgaagtatcctcatcgctgatcggaacagactcacaagctttcccctccgtgtcaaagcccagctccgcctacccatcaactaccatcgtcaacccaactattgtgctgcttcaacacaatagggaacagcaaaagagactgagcagtttatccgatcccgtgagtgagcggagggtcggcgaacaggatagcgccccgactcaggagaaacccacctccccagggaaggcaattgaaaagcgtgccaaagatgatagccgaagggtggtcaagagcacccaggacctcagtgatgtgtccatggatgaagtagggatcccactgaggaatacagagcgctccaaagattggtacaagacaatgtttaagcagatccacaagcttaatagagacacacccgaagaaaacccctacttccctacatataagtttcccgaactgcctgaaattcagcagactagcgaagaaaccaagagttgctctgtgatgagtcccaggcttgaatgcagtgggaccgtgattgcgcactgctccctgaaactgcttgactcaagcaacccccccacctcagcctcccaggtcgcaggaacagcagacgatgatagcgacctctattccccccggtactcatttagcgaggataccaaaagcccacttagcgttccacgaagtaaaagcgaaatgagttacatagacggggagaaagttgtgaagagatctgcgacacttcctctgcctgcacgtagttcttcactgaaatcatcctcagagcggaatgactgggagcctcccgacaagaaggtggacacccgcaagtacagagctgagccaaaaagcatttacgagtatcagcccgggaagtcaagcgtcctaacgaatgagaagatgtctagagacatcagcccagaggaaatcgatcttaagaatgagccctggtataaattctttagcgagctcgagtttggaaagccccctccgaagaaaatatgggactatacgccaggcgactgcagcattcttccccgagaagaccgaaaaaccaatctcgacaaagatctgtcactgtgccagacagagctcgaggccgatctggaaaagatggagactctgaacaaggctccctccgctaatgtcccccaaagttccgctatttctcctaccccagaaatatcctccgagacccccggctacatctacagctctaatttccacgctgtaaagagagagtctgatggcgctcctggcgacctgacatccctggaaaatgagagacaaatctataagagtgtgctggaagggggggatattccactgcagggtcttagtggtttgaagcgccctagctccagcgcaagcactaaagactctgaatcccccaggcactttatacccgccgactatctcgagtctacagaggaattcattcggcgccggcacgacgacaaggagaagttactggccgatcagaggaggttgaagcgagaacaagaagaggctgacattgcggcccgcaggcacaccggcgtaatccctacccatcatcaattcattactaatgagaggtttggcgacctgcttaacatcgatgacactgccaagagaaagtccggaagcgagatgcgacctgcccgggccaaatttgactttaaggcccagaccctgaaagaactacctctacagaagggcgatatcgtgtacatctacaaacagatcgatcagaattggtacgagggagaacatcacggccgggtggggatcttccccagaacctatatcgagctcctgcctcctgcggagaaagctcagcccaagaaactcactcctgtccaagtgctggagtacggcgaagccatcgccaaattcaacttcaacggcgatacgcaggtagagatgtctttcaggaagggcgagcgtataactcttctccgacaggtggacgagaactggtacgaaggtagaatccccggcacctcccggcagggtatatttcccataacatacgtggacgttattaaaaggccgctggtgaagaaccctgtggattatatggatttacccttttcatcaagtccctcacgcagcgctactgcctccccgcagccgtggcgtgaggaatcagggcagtacgagcgtaaagcggaaaggggtgctggcgaacgaggtccaggaggacccaagatctctaagaagagctgcctcaagccaagcgacgttgtgcgatgtctcagcaccgagcagaggctgagcgatctcaacactcctgaggaatctcggcccggaaagccactgggatccgcctttcctgggtctgaggccgagcaaaccgagaggcaccggggaggggaacaggcgggcagaaaggccgctcgcaggggcggcagccagcagcctcaggcccagcagcggcgggtaactcctgataggtctcaaacttcacaggacttgtttagctatcaggctctgtactcctacatcccccaaaacgacgatgagctggagttaagagatggggacatagtggacgtcatggaaaagtgcgatgatggttggtttgtagggacatcgaggcgtactaaacagttcgggacttttccaggaaattatgtcaagccattatacctttag

SEQ ID NO: 135724 - DNA, 2346 bp, synthetic construct
  misc_feature 1..2346: note = Description of Artificial Sequence: Synthetic coding sequence
  source 1..2346: mol_type = other DNA
atgtcatccgagtgcgacggaggctccaaggctgtcatgaacggcttggctccggggagtaacgggcaggacaaagccactgcggatccactgcgcgcacgcagcatctctgctgtgaagattattcccgtgaagaccgttaagaatgcctcaggtctggtgctcccaacagatatggacctcacaaagatctgcactggcaagggggccgtgaccctacgcgcctcctccagttatcgagagacgccaagcagctctccggcttccccccaggaaacaaggcaacatgagagtaagcctggccttgagccagaaccttcgagtgcagatgagtggcggctaagcagctcagctgacgccaacggcaatgcccagccttcaagcttggctgctaagggctatcgtagtgttcatcccaatttacccagtgacaaatcacaagactcaagccctcttctgaatgaagttagcagcagccttattgggacggacagccaagcctttcctagcgttagcaaaccctcgagtgcctatccctccactaccatcgtgaatcctactatcgtactattgcagcacaatagggaacagcagaagcggttaagcagtctgagcgaccctgtcagcgaacgacgagtgggggagcaggacagcgcacccacccaggagaaaccgacttccccaggaaaggccatcgaaaagcgagccaaagacgacagccgtagagtagtgaaaagcacccaggacctttccgatgtatctatggacgaggtgggaattccactccgaaacactgaaaggtcgaaggattggtacaaaacaatgtttaagcagatccataaattgaatagggatgacgacagcgatctgtactctccgcgctatagtttcagtgaagacaccaaatcccccctcagtgtgcccaggtcgaagtctgagatgtcctatatcgacggagagaaagtggtgaagcgcagcgcaactctgccgctacctgccaggtcatcctcactgaagagtagctcagagcgtaatgattgggagcccccagataagaaagtggacacaaggaaatatagagcagagcctaaaagcatttacgagtaccaacccgggaaaagctctgtactaacgaacgaaaaaatgtcaagcgccatttccccaacaccagaaatcagttctgagacgcctgggtatatatatagcagcaacttccatgcagttaagcgtgaatccgacggtgctccaggcgacctgacttctctagagaacgaacggcagatctataaaagtgtactggagggaggggacattcccctgcagggactatcggggttaaagcgcccttcatcatctgcctctaccaaagattccgaatctcctcggcatttcatacctgctgattacctcgaaagcacagaggagttcattcggcgccgccacgatgataaagagaaattgctggccgaccagagaagactgaagagggagcaagaagaggccgacatagcagcacggcggcacactggggtgatcccgactcaccaccaattcatcacgaacgagcggtttggtgatctccttaatattgatgatacagctaaacggaagagcggctcagagatgagacctgcacgcgccaagtttgacttcaaggcccagaccctgaaagagctgcccctccagaagggagacatcgtatatatctataagcagatagatcaaaattggtatgaaggggagcatcacggtagagtgggcatctttcctcgaacttacattgagctgctgccccccgctgagaaagcccagcctaaaaagctcacacctgtccaggtgttagaatatggcgaagccatagccaagtttaattttaacggcgacacacaggtcgagatgagtttccgtaagggcgaaagaatcactctactccggcaagtggacgaaaactggtatgaaggacggatccccgggaccagtcgccaggggattttcccaattacctatgtggatgtgattaagaggcctcttgtcaaaaatcccgtcgactatatggacctacctttcagctcatctcctagcagaagtgcaactgcctctccccagcagccgcaagcccagcagagaagggtgactccggatcgttcacagactagccaggatctattcagctaccaagccctgtattcttatattccccagaatgatgacgagttagagctccgggacggcgatatagtcgatgttatggagaaatgcgatgacggctggttcgtagggacttctagaagaacaaagcagtttggaaccttccctggcaattatgtgaagcccctctatctgtag

SEQ ID NO: 135725 - DNA, 2541 bp, synthetic construct
  misc_feature 1..2541: note = Description of Artificial Sequence: Synthetic coding sequence
  source 1..2541: mol_type = other DNA
atgagttccgaatgcgatggtgggtccaaggccgtgatgaatggactcgcaccggggagtaatggccaagataaagcaacagcagaccccttgcgcgcaaggtcaatcagtgccgtcaagatcatcccagttaagacagtgaaaaacgcatccggcttggtcttgccgaccgatatggacctgacgaagatatgtacgggcaagggtgccgtgacactgagagctagctcttcttacagggagacccctagctccagcccggcctcaccacaggaaacccggcagcacgagagtaagcccgatgaatggaggctgtccagcagtgccgacgccaatggcaatgcccagccctcatctctggcagctaaaggttaccggtcagtgcaccccaacctgcccagtgataagtcccaggattcatctcctctgctaaatgaggtgagcagctctctgataggaaccgacagccaggctttcccctccgtcagcaagccctccagcgcctacccctccaccaccatagtgaatcccacgatcgtattactgcaacataatcgggagcagcagaaaagactgtcgtccctatctgaccccgtcagcgaacgtcgcgtcggggagcaggactccgcgccaactcaagaaaaacccacttcacccggcaaggccattgagaaacgtgcaaaagacgatagccggagagtagtcaagtccactcaggacctgtccgatgtgtctatggatgaagtaggtatccccctgaggaacactgagagaagtaaagattggtacaaaacaatgttcaaacaaatccataaactgaatagagacaccccagaggagaatccctactttcccacgtacaaatttccggagcttccagagatccagcagacatctgaagaagataacccctacaccccaacttaccagttcccagccagcaccccgagccctaaatccgaagatgatgactcggatctgtacagcccccgctactccttcagcgaagacacaaagtcgcctctgagtgtgccccgctctaagagtgagatgtcatacatcgacggagagaaggtggtcaagagatccgccacgctgccattacccgcccgctcaagtagcctcaaatcctcttcagagcggaacgattgggaaccaccagacaagaaggtggacacccggaaatacagggccgaacccaaaagtatctacgagtaccagcccggaaaaagcagcgtgcttacaaacgaaaagatgagtcgcgatatttcacccgaggagattgacctaaaaaacgagccatggtacaaattcttctccgagctggagttcgggaagccgtcttctgcgataagtcctacaccagagatcagttcagagacacctgggtatatatatagttcaaatttccatgcagtcaagcgagaaagcgacggggcgcctggcgatctgacaagccttgaaaatgagcgccagatctataagagtgtgcttgaggggggagacatccctctgcagggtctgagcggcctgaaacgtccctctagcagtgcttccacgaaagatagcgagagccctaggcacttcattcctgccgattatctggaatccactgaggaatttattaggagacgtcatgacgacaaggagaagctcttggccgaccagcgtcgactgaaaagggagcaggaagaggccgacatcgcagcacggcgacataccggagtgataccaacgcaccatcagttcattacaaatgagcgcttcggggatctgttgaatatcgacgatactgctaagcgaaagtcaggctcagagatgagaccggctcgtgcgaagttcgatttcaaggcccagacactgaaagagctacctctgcagaagggcgacattgtatatatttataagcagattgaccaaaactggtatgagggcgagcatcacggcagagttggaattttccccaggacttacattgagttgctgcctcctgccgagaaagcccagcccaagaagctgacgcccgtacaagttcttgagtacggggaagctatcgcaaaattcaacttcaatggcgatacacaagtggagatgagcttccggaaaggagagaggatcaccctccttcggcaggtggacgagaactggtatgaaggccggatcccaggtacttcacgtcagggaatattcccgatcacatatgtggacgtcatcaagcgacccttggtgaagaatccagttgattatatggacctgcccttcagttcctctccttcccgtagtgcaacagcttccccgcagcagccccaagcccaacagagaagagtcaccccagacagatctcagacgtcccaagacctcttctcttatcaagccctctactcatatatcccgcagaacgatgatgagcttgagcttagagacggtgacatcgttgacgtcatggagaaatgtgacgacggatggtttgtgggaacatcaaggcgcactaaacagtttggcacattccctggcaactacgtgaagccactctacctgtag

SEQ ID NO: 135726 - DNA, 2718 bp, synthetic construct
  misc_feature 1..2718: note = Description of Artificial Sequence: Synthetic coding sequence
  source 1..2718: mol_type = other DNA
atgtcctcagagtgcgatggcggttctaaagcagtgatgaatggattggcgcctggctctaatggtcaggataaggccaccgcggacccactgcgggcccggagcatatcggccgttaaaatcatccctgtcaaaacagtgaagaacgcaagtggtctggtccttccaaccgacatggacctgaccaaaatctgtacaggtaaaggggccgttactttacgggctagcagctcctacagggaaacccctagcagcagtccagcaagcccgcaagaaacacggcagcacgagagtaagccaggtcttgaaccagagccatcaagcgcagacgaatggcggctgtcaagttctgccgacgcaaacggcaatgctcagccaagcagcctcgctgccaaaggttataggagcgtgcatcccaatttgccttccgacaagagccaaaggtggccacaccatagtcagccagcccgcgcgtccgggagcttcgctccgatttcccagacaccaccgagctttagccccccccccccactggtccctcccgcacccgaagacttgaggcgagttagtgaacccgatctcaccggcgccgtatctagtactgattcctcccctcttctgaatgaggtctcatcttcactgatcgggaccgattcgcaggcctttccaagcgttagtaaaccatcttctgcttacccctccacaaccatagtgaaccccaccatcgtcctccttcagcacaatcgggagcagcaaaagaggctcagtagtttatctgatccagtgagtgaacggagagtaggggagcaggactcagcccccacccaggagaaacctacctcacctggaaaggcgattgaaaagagggccaaagatgactctcgcagagtagtgaaatcaacccaggacctctcagacgttagcatggacgaggttggtatacctctgaggaatacagaaaggtcaaaggactggtataagacgatgtttaagcagattcacaagcttaaccgcgacgatgactcagacctatactcccccagatactcattttccgaggacaccaagtcgccactctcggtaccccgctccaaatctgagatgtcctatattgacggagagaaagtggtcaagagatcagcaaccttgccattacccgctcgcagtagctctctgaaatcctcatccgagagaaacgactgggaacccccagataaaaaggtcgacacaaggaagtatcgagccgagcccaaatccatatatgaataccaaccgggaaagagttccgtcctcacgaatgagaaaatgagtagagatataagccccgaggaaatcgacctgaaaaacgagccatggtacaaattcttctcagagttggaatttggaaagccaccacctaaaaagatctgggactacacaccaggcgattgctctattctgccccgcgaagatagaaagtcctcggctatcagcccaacccccgagatatcctcggaaacccccgggtatatctatagtagcaacttccacgcggtgaaaagagagagcgatggcgccccgggggatctcacgtcgttggaaaacgaacgacaaatttataaatccgtactggagggcggggatatccctctccaagggctgtctgggttgaagaggccctcctcttcggcaagtactaaagattcagagtcaccccgtcacttcatccccgccgactacttagaatccacagaagagttcatcagacgaaggcacgacgacaaggagaagctcttggccgaccaacggagactgaagcgggagcaggaggaagctgacattgccgcccgccgtcataccggcgtgatcccgacacaccaccagtttatcaccaacgaaagattcggcgacttgctgaacattgatgacaccgccaagcggaagagtggcagcgagatgaggcctgcacgtgctaagttcgattttaaagctcagacacttaaggagctcccactgcagaagggggacatagtgtacatttataagcagatcgatcagaattggtacgaaggagagcatcatggaagggtgggcatcttcccacgaacctacatcgaactgctgccccccgcagagaaggcccagcccaagaagctgactcccgttcaagtcctggagtatggagaggcaatcgcgaaattcaactttaatggagatactcaggtcgaaatgtcttttcgtaaaggagaaagaattaccctgcttagacaggtggacgaaaactggtatgaggggcgaattcctggtactagtcggcaggggatctttcctattacgtatgtggacgtcatcaagcgccctctcgtcaagaacccagtggactatatggacctgccttttagtagttctccttcccggtccgccactgcatcacctcaattgtcacaccactcacttcgagcaggtccggatctgacagaaagtgaaaagagttatgtgcagccacaggctcagcagcggagggttactcctgatcggtcccagacaagtcaggatttatttagctaccaggccctctacagctatatacctcagaatgatgacgaactggagttacgtgatggcgacattgtcgatgtcatggaaaaatgcgatgacggatggttcgtgggcacatcaaggcggacaaaacagtttggtaccttcccggggaattacgtcaaacccttgtatctgtag

SEQ ID NO: 135727 - DNA, 3015 bp, synthetic construct
  misc_feature 1..3015: note = Description of Artificial Sequence: Synthetic coding sequence
  source 1..3015: mol_type = other DNA
atgagcagcgagtgtgacggtggtagcaaggcagtgatgaacggattggctccgggttccaacggacaggacaaagcaacagccgaccccttgcgagccagatcaattagcgcagtgaagattatccctgtgaagaccgtcaagaacgcctccgggctcgtccttcccacagacatggacttaacgaagatctgtactggtaaaggagcggtcactctgcgagccagcagcagctatagagagaccccaagcagctctccagcatcgccccaggaaactaggcaacatgagtctaagccagatgaatggaggctcagttcctccgctgacgctaacggtaacgcccaaccgagtagcctggccgcgaagggttacagatctgtccaccccaacctgccctctgataagagccaggacgcgacctcctctagcgccgcacaaccagaagtgattgtagtcccactgtatctggtgaacacagacaggggacaggagggtaccgctcggccacctacccctttaggccccctcggctgtgtgcccacaataccggccactgcctcagctgccagcccattgacttttccaacactcgatgattttatcccaccccatctgcaacgttggcctcatcactctcaaccggccagagccagcggcagctttgctcccataagccaaacacccccttcattctctccacctccgccgctggttccacccgcccctgaagatctgcgcagagtgagcgagcccgacctcacaggcgctgtgagctctacggattcaagcccattgctgaacgaagtgtccagttcactgattggaacagatagtcaagcgttccccagcgtatctaaaccttccagcgcctacccctcaactacaattgtgaatcccaccatagtactgttgcagcacaatagggagcaacaaaaacgtctctccagtctgtcggaccctgtctccgagcgcagggttggcgagcaggattccgcgcccacccaggaaaagcctacaagtcccggcaaagcgattgaaaaaagagccaaggatgatagccgaagagtggtgaaatctacccaggacctgtcagacgtgtcaatggatgaggtgggcatccccctcaggaacacagaacgctcaaaggactggtataaaacaatgtttaaacagatccataaactgaatagagatacccctgaggagaacccctacttccccacctacaagttccccgagttgcccgagatccagcagacctccgaggacgatgatagtgatttatactcgccgagatactctttctccgaagatacaaagtcgcccctgtcagttccacgttctaaatctgagatgtcctatatcgatggggaaaaggtggtgaaacgctccgccacactgccactgcctgcacgttcatcttctctcaagtctagttctgaaaggaatgactgggaacctcccgacaagaaagtggacacccggaaatacagagctgagcccaagtccatatacgaatatcagcccggtaaatccagcgtgcttacgaatgagaaaatgagtagggatatcagcccagaggagattgatctgaagaatgagccatggtacaaattctttagtgagcttgagttcggaaagcctccgcccaaaaagatctgggactatacccctggcgactgctcaatactccctagggaagaccgtaagaccaacttggacaaggacctgagcttgtgccaaacggagttggaggccgatttagagaagatggaaacgctgaataaggctccctcagcaaatgtgcctcagtcttccgccatttctccaacacctgaaatttctagcgagacacccggctatatatattccagtaacttccacgccgtgaaacgcgagagtgacggagcaccaggcgacctcacatctcttgagaacgaaaggcagatttataaatccgtgctggaggggggtgacattcctttacagggcctttcgggactgaagagaccttcttcctcggcatcaacaaaagacagcgaaagcccacggcatttcattccagccgactacctggaatcgacggaagaattcatccggaggcggcatgatgataaagaaaaactgctggctgaccagcggcggctgaaacgtgagcaagaggaagctgatattgccgctagacgtcatacaggcgtgatccccactcaccatcagttcattaccaatgagcgcttcggggacttgttgaatatcgacgacaccgccaaacgtaagtcaggtagcgagatgcggccagcccgggctaaattcgactttaaggctcagactcttaaagagctccccctgcagaaaggcgatatcgtctatatctacaagcagatcgaccagaattggtatgagggcgaacatcacgggcgcgtgggaatctttccacgtacttacatagaactgctccctcccgccgagaaagcgcagccaaaaaaactcacccctgtgcaagttttagagtatggggaagctatcgccaaatttaatttcaacggggatacccaagtagagatgtcgttcaggaagggcgagagaatcactttgctgcgccaggtggacgagaattggtatgaggggcggatacctggtacatccaggcagggtatctttcctattacctacgtggatgtcattaagaggccgctcgtgaagaatcctgtagattatatggacctccctttcagctcttctccatcccgcagcgccaccgcctcaccgcagcagccgcaggcccagcagcggagggtcaccccagaccggtcccagactagccaggatttgttctcatatcaagcactgtatagctacataccgcagaacgatgacgagcttgaattaagagatggtgatatagtggatgttatggagaagtgtgacgacgggtggttcgtggggacctcaagacgtaccaagcaattcggcacgtttcccggaaattacgtgaaacccctctacctgtag

SEQ ID NO: 135728 - DNA, 3879 bp, synthetic construct
  misc_feature 1..3879: note = Description of Artificial Sequence: Synthetic coding sequence
  source 1..3879: mol_type = other DNA
atgtccagcgaatgcgacggtggctccaaagcagttatgaacgggctggccccaggatctaacggtcaggataaggcaactgccgacccgctgcgcgcgagatccattagtgccgttaaaataatccccgtgaagaccgtgaagaatgctagcggcctcgtcctacccaccgatatggatttgacaaagatctgtacagggaagggcgccgttaccctgcgagccagctcatcttacagggagacccctagcagctcccccgcatccccacaagagacaaggcagcatgagtctaagcctggcctggagcccgagccatcttccgctgatgagtggcggttgagctcttccgctgatgccaacggtaatgcccagccttcttctctggccgcgaaagggtaccggagcgtgcaccccaacctcccctctgataaaagtcaggacgctacttcctccagtgctgcccagccagaagtgattgtcgtcccactttacctagtcaacacagaccgcggtcaagaaggaactgctcggcctcccactccattagggcccctaggttgcgttcctaccatacccgctacagcttcagctgccagccccctgaccttcccaacactggacgacttcatacctccacacctgcaacgatggccacatcattctcaacccgcaagagcctcaggctctttcgctccgatctcacaaaccccaccatcgttctctcctcctcctcccctggttcctccagcccctgaggacttgagaagggtttctgaacctgatctaaccggcgctgtgtcatccaccgattcatcaccgctgctgaacgaggtgtccagttcactgatagggaccgattctcaagcgttccctagtgtctctaagccatcaagtgcttaccccagcaccacaattgtgaacccaactatcgttctgctgcaacacaaccgggagcagcagaagagattatcgtcccttagtgatcccgtgtctgaacgacgtgtcggagaacaagatagcgcgcccacgcaggagaagcccacatcccccggcaaagcgatcgaaaaaagagcaaaagatgactcacgtcgcgtggttaagtctacacaggacctgagcgacgtttctatggatgaagttggcatcccccttcggaatacagagaggagtaaggactggtacaagacaatgttcaaacagatccacaagctcaatagagacacccctgaagagaacccgtacttccctacttataagttcccggagctgccggagattcagcagacttccgaggaggacaacccctataccccaacgtatcaattcccagcgagcacacccagtccaaagtctgaggacgacgacagcgatctgtactccccgcggtatagcttcagcgaggacaccaagtctcctctgagcgtccctagatcaaaaagtgaaatgagttatatagatggtgagaaggtcgtgaaacgctctgccactctgcccctgcctgccaggtcaagcagcctcaaaagctcctcggaacggaacgactgggaaccccctgataagaaagttgatactagaaagtacagggccgagcccaagtccatttatgagtaccagccaggaaaaagcagtgtgctgacaaacgaaaaaatgtcccgcgacatttcccccgaggagatcgacctaaaaaatgagccctggtataaattcttcagcgagctggagtttgggaaacctcctcctaagaagatttgggattatacaccaggggactgttcaattttgccgcgagaagaccggaagacaaacttagacaaggatttgagcttgtgccaaacagagctggaggccgatctcgaaaagatggaaactcttaataaggccccaagtgctaacgtgccccagagctccgcaatctccccaactcccgagatttcgagcgagactccaggttatatttactcaagtaatttccatgccgtcaagcgcgagtctgacggcgccccaggtgacttaacaagcctggagaatgaacgtcagatctacaagagtgttctggaggggggggacattcccctacaagggttatccgggttgaagagacctagctcttcggcttctacgaaagacagcgagagcccccgacatttcataccagctgattacctggaatccacagaggagtttatccgccgacgccacgatgacaaggagaagctgctagcagatcagcgacggctcaagcgcgagcaagaggaagctgatatcgccgctcggcgtcacaccggtgtgatacccacgcaccaccagttcattaccaatgaaaggttcggcgacctgctcaacattgacgatactgcgaagcgaaaaagcggcagtgagatgaggccagcccgggcaaagtttgattttaaggcccaaaccttgaaggagctaccgctgcagaaaggcgacatcgtgtacatctacaaacaaattgaccaaaattggtatgagggtgaacatcatggacgagtgggaattttcccaagaacctacattgagcttctaccgccagctgagaaggcacagccaaagaaactaactccagttcaggtcctggaatacggggaggctatcgctaagttcaacttcaatggtgacacacaggttgaaatgtcattccgcaagggtgaaagaatcaccctgctgaggcaagtggacgagaattggtacgaaggacgaattcccgggacatctagacagggcatttttccgattacctatgtcgacgtgattaagcggcctttggtgaagaaccccgtggactacatggacctgcccttcagctctagtccaagtaggtctgcaaccgcgagcccccaattttcatctcactccaaattgatcaccccagcgccatccagtttgcctcactctcggcgcgccttatcacctgagatgcacgctgtgacttcagagtggatcagcctgacggtcggggttcctggacgtagatccctcgcattaacgccaccacttccaccactgcccgaggcttccatctacaatactgatcatcttgccttgtcaccaagggcaagcccctctttgagtctgtccctccctcacctttcgtggagcgatcggccaacgccacgctcagtagcctctcccctggcgctcccatccccccataagacatacagccttgccccgacatcccaagccagtctccacatgaacggagacggaggcgtgcatacccccagctccggaattcaccaggatagctttcttcaattgccactgggtagcagtgactctgtgatttcacagctctcagacgcctttagctcccaaagcaagcgccagccgtggcgggaggaatcagggcagtacgaacgcaaagctgagcgcggagcgggcgaacgagggcccggcggcccgaagatctcaaagaaatcttgcttgaaaccctccgacgtggtacgatgtttgagcaccgaacagcgactgagcgatcttaacacacccgaagagagccggcctggaaagcccctgggcagtgcatttcctggttccgaggccgaacaaaccgagaggcaccgcggcggcgagcaggccggacgaaaagccgcacgtcgcggaggttcacagcagccccaagcacagcagaggagggtgacgccagatcggagccagacaagtcaggacctgttcagctatcaggccctgtattcttacatcccccaaaacgacgatgaactcgagctcagggacggtgatattgtggatgttatggagaagtgtgatgacggctggttcgttggtacaagccgccggaccaaacagtttggtacattccctggtaattacgtgaagccgctttatctgtag

SEQ ID NO: 135729 - DNA, 3801 bp, synthetic construct
  misc_feature 1..3801: note = Description of Artificial Sequence: Synthetic coding sequence
  source 1..3801: mol_type = other DNA
atgtccagtgaatgtgatgggggatccaaggcagtgatgaacgggctggcacccggaagcaacggacaggataaagcgacagccgatccattacgagccaggagcattagcgcagtgaaaattatccctgtcaagacagtgaagaatgctagtggactggtgttacctaccgatatggatcttacgaagatatgtaccggcaagggagcagttactctccgggcctcttcgagttatagggaaacgcctagctcaagcccagcctccccccaggaaacacggcagcatgagagcaagccaggactggaacccgaacccagctctgccgacgagtggcgtctctcatctagcgccgacgctaacggaaacgcccagccttcttctctggctgctaagggctaccgctccgtacatcctaacttgccctccgataagtctcaggatgcaacatctagcagcgccgctcagccagaggtcatcgtggtgcctctgtatcttgtcaacacagatagggggcaggagggcacggctaggcctccgactcccttgggtcccctggggtgtgtgcctactatcccagccaccgccagtgcagcctcccccctgacgttccctactctggatgatttcatcccgccgcacctccagaggtggccccaccacagtcaaccagcacgtgctagcgggtcttttgcccccattagtcagacacccccaagcttctccccccccccccctctcgtgcctcctgcccccgaggatttacggagagtatcagagccggatctgacgggcgccgttagttctaccgactcgagcccacttctgaatgaagtgagctcatcactgatcgggactgactcgcaggccttcccatccgtgtctaaaccttcttccgcctacccctcgaccacaattgtgaatccgaccattgtgctcctgcagcataaccgcgagcagcagaaacgtctctcatccctgagtgaccccgtctctgagcgacgagttggggaacaggattccgcgccaacacaggagaaacccacaagccccggaaaagccatagagaaacgggccaaggatgactctcgccgggtagtgaagtcaacccaagacctgtctgacgtgagcatggatgaagttgggataccactgcgcaacactgagaggtccaaagattggtataagactatgtttaaacaaatacataagctgaacagagatgatgatagcgatctgtactcacctcgatatagcttttctgaggacaccaaatctccacttagcgtaccccgcagcaagtccgaaatgtcttatatagacggggaaaaagtggtgaagaggtctgctactctccccctgcctgcgcggagtagcagcctgaaatccagctcagagcgcaacgactgggagccacccgataaaaaagtggacacaagaaagtacagagccgaaccaaaatctatttacgagtaccaaccaggcaagtcatccgtgcttacaaatgagaagatgtcgagagatatttctcctgaggaaatagatctcaaaaacgaaccctggtacaagtttttttcggagctggagtttgggaagcccccgcctaagaagatctgggactatacccccggcgactgttccattctacccagggaggacagaaagacaaacttagataaagatctttcgctttgccagacagaactggaggccgacctggaaaagatggagacgttgaacaaagctccgtccgctaatgttccccaatcctcagcgatctcccccactcccgaaattagctcagaaacccccggctatatttactcttccaatttccacgcggtgaagagggagtccgatggtgctcctggggacctcaccagtttggaaaatgagagacagatctataagagtgtgttggaggggggggatatacctctgcagggtctttccggtttaaagcgtccatcaagctctgcaagcactaaggattctgaatctcctcgccactttatccccgcagactacctcgagtctactgaggaattcattcggcgcaggcatgacgataaggaaaagctgttggccgaccagaggcggctgaaaagagagcaggaagaggctgacatagccgctaggcggcacacaggtgtgatccccacccatcaccagttcatcacaaacgaacgcttcggcgatctcctaaacattgatgatacagccaaacgaaagtcaggaagcgagatgcggccagctagagccaagttcgatttcaaggctcagacgctgaaggaattaccattgcaaaagggagatatcgtgtacatctacaaacaaatcgatcaaaactggtatgaaggtgagcaccatggaagagtggggatattcccaagaacatacattgaactgttgccaccagcagagaaggcacagccgaaaaagctgaccccagtgcaggtactggagtacggagaagctatcgctaagttcaattttaacggcgatacacaggtggaaatgagttttagaaagggcgaacgaattacccttctgaggcaggtggatgagaactggtatgaggggcggattccaggcacgtcccgtcaaggcatcttccctatcacttacgtagacgtgatcaagcgcccgcttgtgaaaaacccggtcgactatatggatctgcccttctcttccagcccatcacgtagcgcaacggcctcaccacagtttagcagtcattctaagctgatcactcctgctccatctagtcttccccactcacgccgggcactgagtcctgagatgcatgcggtcacttccgagtggatatctctaaccgtcggcgtcccgggccggcggtcactggcccttacccctcctctgccccctcttcccgaggccagcatatacaatactgaccatctggcactctcccctcgggcatccccctccctaagtctgtccctaccacacctctcttggtcagatagaccaaccccaagaagcgtagcctcaccactggcgcttccctctcctcacaagacatattctctggcgcccaccagtcaagcttccctgcatatgaatggcgatggaggtgtccataccccttcttcaggcatccaccaggattcctttctgcagttgccgttaggctcgtcggactcagtgataagccagttaagcgatgctttctctagtcagagtaaacgccagccgtggagagaggaatcaggccagtacgaacgaaaagctgaacggggagcaggcgaacgcggtcccggaggcccgaagattagcaagaaatcctgtctgaagccatccgacgtagtgagatgcctgtcaaccgagcagcgactgagcgatctgaatacacctgaagaatccagacccggtaagccactcggatcagcatttcctggttcagaggccgagcagactgagcggcaccggggcggcgagcaggccggacgcaaggccgcccgccgcggtggctcacagctaagccaccacagcttaagagccggacctgacctgacggaatccgagaaatcgtacgttcaaccacaggctcagcagcggagagtgacccctgatcggagccagacgtcacaggatctgttctcctatcaggcgctgtacagttacatccctcaaaacgatgacgagttggagctcagagatggagatatcgtggatgtcatggagaagtgcgacgacggatggttcgtagggacatctcggaggaccaagcagttcggtacttttcctggcaattacgttaaacctctgtacctctag

SEQ ID NO: 135730 - DNA, 2436 bp, synthetic construct
  misc_feature 1..2436: note = Description of Artificial Sequence: Synthetic coding sequence
  source 1..2436: mol_type = other DNA
atgtctagcgaatgtgacggggggagtaaggcagtaatgaatggcctggcaccaggctcaaacgggcaggacaaggatatggatcttacaaaaatttgcacaggcaagggcgctgtgaccctgcgtgcctcgagttcttacagagagaccccttcaagctctcctgcttctccgcaagagacgcggcagcatgagtccaaacctggacttgagccagagcctagctctgcggacgagtggaggctctctagcagcgccgacgccaatggaaacgcccagccatcctcgcttgctgccaaagggtaccgatcggtccacccaaatttgccttccgataagtctcaggattccagtcccctcctgaatgaagtgagttctagcctcattgggaccgactcgcaggctttccccagcgtcagcaagcccagctcagcttacccttccaccaccattgtcaacccaaccatagttctgctgcagcacaaccgggaacaacagaagaggctgagttccctcagtgaccccgtcagcgagaggagggtcggggagcaagactctgcgcccacgcaagagaaaccaacttctcctggcaaagccattgagaagcgggcaaaggacgatagtcgccgtgtggtgaaaagtacccaggatctgtccgacgtgtctatggacgaagtgggaattcccctgcgcaacacggagcggtctaaggactggtacaaaacaatgtttaagcagattcacaaacttaaccgggacgacgactctgacctctatagtccacgatacagcttttctgaagatactaaaagtcccctatctgtgccaagatcgaagtctgagatgtcatacatcgacggagaaaaagtggtgaaacgctctgctaccttgccactaccggcacggagttccagcttaaaatcttctagcgagcgaaacgactgggaaccacccgacaaaaaggtcgacaccagaaagtaccgcgccgagccaaaaagtatttacgagtatcagcccggcaaatcctcggtgctgacaaacgaaaaaatgagccgggatattagcccagaggaaatcgacctgaagaacgagccctggtataagttctttagcgaactggagtttggaaaacctaccaatctggacaaggacctttctctctgccaaacagaactggaggccgacctggagaagatggaaaccctcaataaggcgccttcggcgaatgtacctcagtcctctgccatctcaccgactcccgaaatttcgagcgaaacacctgggtatatatactcgtccaacttccacgctgtcaaaagagaaagcgacggagcgcccggcgatttgacaagtctagagaacgaacgccaaatctacaaaagtgttcttgagggtggcgatatccccctgcaagggctctcggggctgaaaagaccctcctcctcggcctccacaaaagacagcgaatctccaaggcattttattccagccgattacctcgagtctactgaagaatttatccggaggcggcacgatgacaaggagaaactgcttgctgaccagaggcgcctgaaaagggaacaagaggaagccgatatcgctgcccgccgtcacaccggagttatccccacccaccatcaattcattaccaacgagaggttcggcgacctgcttaatatcgacgacacagcaaaaaggaaaagtggcagcgagatgcgtccagcccgggccaaatttgacttcaaggctcagacacttaaagagttgccactgcagaagggggatatcgtctatatttataagcagatcgatcagaattggtacgaaggggagcaccacggcagagtgggcatcttcccacggacgtacattgagttactgcctcccgccgaaaaggctcagcccaaaaaactgactcctgtccaggttcttgagtatggtgaagctattgcgaagttcaatttcaatggtgacacacaggtggagatgtccttccgcaaaggagaaaggatcaccctgctgaggcaggtagacgagaactggtatgaggggcgcattccagggacctctcgccagggcatcttcccgatcacatacgtggacgtgatcaaacgcccccttgttaaaaaccccgtggactacatggatctccctttttcttcctcaccatcaagaagcgcaaccgccagccctcaacagccccaggctcagcaacggcgtgtgacaccggatagatcgcagacctcccaggacttgttttcttatcaggccctttattcctatattccgcagaatgatgacgaactcgaactccgcgacggtgatattgtcgatgtaatggagaaatgtgacgatggctggttcgtcgggacatccagaaggaccaagcagttcgggaccttccctgggaactatgtgaaaccactctatctttag

SEQ ID NO: 135731 - DNA, 2055 bp, synthetic construct
  misc_feature 1..2055: note = Description of Artificial Sequence: Synthetic coding sequence
  source 1..2055: mol_type = other DNA
atgagctccgagtgcgacggcggatcaaaggctgtgatgaatggtctggctccgggcagtaatggccaagataaagatatggatctgaccaaaatctgtaccgggaaaggcgctgtgacattacgcgcttccagttcctaccgagagaccccctcatccagcccggcatccccccaggagactaggcagcacgaatccaaaccggacgaatggaggctgagctcaagtgcagacgcaaacggaaacgcccagccatcttctctcgcggcaaagggctatcgatcagtccatcctaatttgcctagtgacaaatcacaggatagttcacccctgctgaacgaagtgtcaagttcgctgattggcacagattctcaggcgtttccaagtgtgtccaagcctagttctgcttacccatctactactatcgtgaatcccaccatagttctgctccagcacaaccgggagcaacagaaaaggttaagcagtctttccgacccagtgtctgagcgtcgagtgggggagcaggatagcgcccccacccaggaaaagccaactagcccaggcaaagccattgagaagcgtgcaaaagatgattccagacgggtggttaagtccacacaagatttaagtgacgtgagtatggatgaggtgggcattcctctgcgcaacaccgagcggtctaaggattggtataaaaccatgttcaaacagattcataagctcaaccgagatgacgattccgatctctattccccccggtactccttctcagaggacaccaagagccccctatcggtcccccggtctaagagcgagatgagttacatagatggtgagaaagtggttaagaggtcggcaactctgcctctgccagccagatcatcaagcctaaagtcttctagtgaaagaaacgattgggagcccccagataagaaggtcgatactcgcaagtaccgcgcagagcctaaatccatttacgagtaccaaccgggcaagtcgagtgtgctcacaaatgagaagatgtctagcgctatcagtccaacgccagagatcagcagcgagactcccggctacatatattctagcaacttccacgccgttaagagagaatctgacggcgcgcccggagatttgacctctctagaaaacgagagacaaatctataaatctgtgctcgaaggtggcgatatcccacttcagggtcttagcgggctcaagaggccttcttcatctgcatcaacaaaggacagcgaaagtccgaggcacttcattccagctgattacctcgaatccacagaagaatttatacgacgccgccacgacgataaggagatgcgccctgcgagagcaaaattcgattttaaagcccagacattaaaggaactgcccctacagaaaggagacattgtgtacatctacaagcagattgatcaaaattggtacgaaggcgaacaccacgggcgagtgggcattttcccccgaacctacatagagctgctgccaccagcggaaaaagcacagccgaaaaagctcacacctgttcaggtcctggagtacggtgaggcaatcgccaagtttaactttaatggggacacacaggtagaaatgtcatttcgaaaaggcgagcgtataaccttgctgagacaggtggatgagaattggtacgagggtaggatacctggcaccagcagacaaggcatctttccaattacctacgtggatgtaattaagcgcccattggtgaaaaaccccgtggattacatggacctaccatttagctctagcccgtcacgtagcgcaaccgcatctccccagcagccccaagcccagcaacggcgggtgactccggataggagccagacttctcaggatctgttcagttaccaggctttatattcttatattccgcagaatgacgatgaattggaattacgagatggtgatatcgtcgacgttatggagaaatgtgacgacgggtggttcgtgggcacaagtaggagaacaaagcagttcggaaccttccccggcaactacgtcaaaccattatacctgtag

SEQ ID NO: 135732 - DNA, 2718 bp, synthetic construct
  misc_feature 1..2718: note = Description of Artificial Sequence: Synthetic coding sequence
  source 1..2718: mol_type = other DNA
atgagcagcgaatgcgatggtgggtcaaaagccgtgatgaatggtctcgcccctggatcaaacggacaggataaggcaactgccgaccccctgcgagccaggtcaataagcgccgtgaagatcattcctgtcaagaccgtaaagaatgcaagcggcctagttctgcccaccgacatggacttaacaaagatatgcacgggaaagggcgctgtgaccttgcgcgcttctagtagctaccgggagacaccctcaagtagtcccgcatctcctcaggagacgagacagcatgaatcaaaaccgggcctggagccagaacctagcagcgccgacgagtggagactgtcatcttctgctgatgctaatggcaatgcgcaaccatcaagccttgccgcaaaaggatataggagtgttcaccctaacttaccttctgataagtctcagagatggccccaccattcacaacccgctagagcttctggctcgtttgctcccatttcacaaaccccaccgtctttctctcctccaccaccgctggttccccccgcaccggaggacttgagaagagtgtccgaacccgatctcactggagctgtttctagtaccgattcatcccctctattgaacgaagtaagctcctccttaataggcacagactcccaggcgttcccatccgtgtcaaaaccttccagtgcctacccaagcaccaccatcgttaaccctacaattgtattgttgcagcataaccgggagcagcagaagagactgtccagtttgtccgaccctgttagcgaaagaagagtgggcgagcaggactccgccccaactcaggagaagccaacgtccccaggcaaggctatagaaaaaagggcaaaggacgacagtagacgtgtcgtaaagtcaacccaggatttaagtgacgttagcatggacgaagtcggaatcccactacgcaacaccgagcggtcgaaggactggtacaagacaatgtttaaacagattcacaaacttaacagggatgacgattcagacctgtactcacctaggtattcattttcagaggataccaagagccccctgtccgtgccccggagcaagagtgaaatgagttacatcgacggtgagaaggtcgtgaaacgcagtgctactttaccccttcccgcaagatcttcttccttaaagtccagttcggagagaaatgactgggaacctccggacaagaaagtggatacccgaaaatatcgggccgaaccgaaatctatctatgagtatcagcctggtaaatccagcgtgcttacaaacgaaaaaatgtcgcgggacatcagtcctgaagaaatcgatcttaagaacgaaccgtggtataaatttttcagcgaactggagtttgggaaaccaccccccaagaaaatatgggattacacccctggggattgctctatactcccaagggaggacagaaagtcctccgcaatcagccccactccggagattagttccgaaactcctggttacatctactcatccaactttcatgcggtgaagagggagagcgatggcgctccgggagacctcacctctctcgagaacgaaagacagatctataagtccgtactggagggcggcgatattcctctccaaggtctgagcggcctcaagcgccccagctcgagcgcctccacaaaagacagcgaatctccaaggcacttcatccccgcagactacttagaatctaccgaagaattcatccgcagacgacacgatgataaagagaaactgttggctgaccagcgacgcctgaagcgagagcaggaagaagcagatattgctgccagacggcacacaggagtgatacctacgcaccaccagtttataacaaacgagaggttcggcgatttattgaatatcgacgataccgcaaagagaaagtcaggatccgaaatgcgtccagctagggcaaagtttgacttcaaggctcagacactcaaagaactgcctctgcagaagggagatatagtttacatctacaagcagatcgatcagaattggtacgagggggagcatcatggaagagtcggcatctttccccgaacctatatcgaattactaccacccgccgaaaaagcacagcctaagaaacttactccagtccaggttttggagtacggggaagcgattgctaaattcaattttaacggggatactcaggtcgagatgtccttccgaaaaggtgagagaatcactctgctcaggcaggtagacgagaattggtacgaagggcggatccctggtacatcccgccagggaatatttccaatcacctacgttgatgtgatcaaacggcccttggtcaaaaatcctgtagactatatggatctgccttttagctcatccccatcccgctcagctacggccagtccccagttaagccatcacagcctccgcgcaggccctgatctaacagaaagtgaaaaatcatatgttcagccccaagcacaacaacgccgtgtcacacccgatagaagccagacaagccaggacctgttcagttaccaggctctgtattcctacattccgcaaaatgatgatgaactggagctccgggacggagatatcgtcgacgttatggagaagtgtgatgatggttggtttgttggcacttcgcggcgcactaaacagttcggcaccttccccggcaactacgtgaaacctttgtatctttag

SEQ ID NO: 135733 - DNA, 3456 bp, synthetic construct
  misc_feature 1..3456: note = Description of Artificial Sequence: Synthetic coding sequence
  source 1..3456: mol_type = other DNA
atgtcatccgagtgtgacggggggtccaaagctgttatgaacgggctggcccctggatccaatggccaggacaaggctactgccgaccctctacgggccaggagcattagtgcagtgaaaataatacctgttaaaacagttaagaacgcctccggcctagtgttgcccaccgacatggacctgacaaagatctgtacaggcaaaggcgccgtgaccctgcgggcctcgagttcatatagggagacaccatcctcatcaccagcttctccacaggaaactcgacaacacgaaagcaagcccggcctggaaccagagccgtccagcgcagatgagtggagactctcttcttccgcagatgcgaatggtaatgcacaaccatcctctctggcggcaaaaggatacaggagcgtccatcccaacctccctagcgataaatctcaggatgccacatcttcgagcgctgcccagcccgaagtgatcgtggtcccgttatacctggttaataccgatagaggccaggaaggtacagcaaggccgcccacacctctcggccccctagggtgtgtccccaccatacccgcgacagcttctgcggcctctcccctgaccttcccaacactcgacgactttatccctccccatctccagaggtggccccaccattcacaacctgctagagcgtcagggtccttcgcacccatctcacaaacgcctccgtctttcagtccacctccccccctggtgcccccagcaccggaggatctgcgccgggtcagtgagccggacctgaccggagctgtgtcttccaccgactccagccccctgctcaacgaggtgagctccagcctgataggaacagacagccaggccttcccctccgtttcaaaaccttcttcagcttatccttccaccaccatcgttaacccgacaattgtgctgctgcagcacaatagagaacagcagaagcgactctcctcccttagtgatcctgtgtcagagcgccgcgtgggggaacaggacagcgctcccacacaggagaagccgacaagcccaggaaaggcgattgagaagcgagctaaggacgacagccggagggtcgtgaaatccacccaggatctctccgatgtctctatggacgaggtgggcatacccctccggaacacggagagatctaaggattggtacaagacgatgttcaagcagatccataaattaaaccgcgatacccctgaagagaatccctacttcccaacctacaagttccctgaactgcccgagatacagcagacttccgaggagacaaagagctgctcggtcatgtcccctagacttgagtgctccggaaccgtcatcgcacactgttcactcaaactgctggattcctctaaccctccaacaagcgcaagccaggtggcgggtacggccgacgatgattctgatctgtacagcccccggtattcattcagcgaggacactaaaagccccctgagcgtgcctcgaagcaagtcagaaatgagctatatagatggtgagaaagtggttaaacgatcagcaacgctaccccttccagctaggtcctcctcattaaagagcagcagtgagcgcaatgactgggagccccctgacaagaaggtcgacacccgaaagtatagagccgagcccaagagtatctacgaatatcaacccggtaagtcatctgtcctgaccaatgaaaagatgtccagagatatctccccagaagaaattgacctcaaaaacgagccttggtataaattctttagtgagctcgagttcggaaaaccaccccccaaaaagatctgggactataccccaggagactgcagcatattgcctcgagaggatcgtaaaacaaacctagacaaggacctctccctgtgccaaaccgaattagaggcagacctcgagaaaatggagaccttgaacaaggcaccctccgctaatgtccctcagagtagtgccattagtcctacaccagaaatttccagcgaaaccccgggatatatctacagcagcaattttcacgctgttaaacgggaaagtgacggagcaccaggagacctcacctcattggaaaatgagcgacagatttacaaatcagttctagagggtggagatatccctcttcagggtctcagtggtctgaaaagaccctcatcctccgctagcactaaagactcggagtcccctcgacactttattcctgctgattaccttgagagtaccgaggaattcatccgtcggagacatgacgacaaagaaaaactgctagctgaccagaggagactgaaacgtgaacaggaagaggctgatatcgcagccagacggcatactggcgtcatacccactcatcaccagttcatcacgaacgagcgattcggggatctcctgaatattgatgatactgccaagcgcaagtctggctccgagatgcgccccgcccgagccaagttcgattttaaggcgcaaacactgaaggagcttccgctgcagaagggagatatcgtgtatatctacaagcagatcgaccagaactggtatgagggagaacaccatggccgggtcggtattttcccaagaacatatatcgagcttctgcctccagcggagaaggcccagcctaaaaagctcacacctgtacaggtattagaatacggcgaagccatcgccaaatttaatttcaatggcgatactcaagtcgaaatgtcatttcggaagggggagcgaattaccctacttagacaggttgatgagaactggtacgaaggacgtattcctgggacttctagacagggaatatttcccattacctacgttgatgtgatcaagcgtccactggtgaagaatccagtcgattacatggatctgcccttctcaagctctccttcgcgctccgctaccgcgtcccctcagccatggagagaagaatctgggcagtacgagaggaaagctgagcgcggggctggcgagaggggccctggcggcccaaaaatttctaagaagtcctgcctgaagccatcggacgtggtaaggtgcctgtctacagaacagcggctgtccgatctgaatacgccagaagagtcaaggcctggaaagcccctgggatcagccttccccggtagcgaggctgaacagactgagcgacaccgaggcggtgagcaagccgggcggaaggcagcccggcggggaggctcccaacagccacaagcccagcagaggagggtgaccccagaccgctctcaaacgtctcaggatcttttttcttatcaggccctctatagctacatcccccaaaacgacgatgaattagagttacgggatggagatatagtcgacgtcatggaaaaatgcgacgacgggtggtttgtggggacttccagacggacaaaacagttcggaactttccctgggaactacgtcaaacctctttacctctag

SEQ ID NO: 135734 - DNA, 3879 bp, synthetic construct
  misc_feature 1..3879: note = Description of Artificial Sequence: Synthetic coding sequence
  source 1..3879: mol_type = other DNA
atgagttcagagtgcgatggcggcagtaaagccgtgatgaatgggctggcccctggcagtaacggacaggataaagcaacagctgatcccctgagggctcgttctatttctgccgtcaaaataatccccgtaaaaaccgtgaaaaacgcttctggcttggtgctgccaaccgatatggacttgaccaagatctgcactggtaaaggagcggtgactctccgtgcatcttcttcttatcgagaaacaccttctagctcaccagcaagcccgcaggaaactagacaacatgaatcgaagcctggattggagccggaaccgagtagcgcagatgagtggaggctgtcttcatcggccgacgcgaacggcaatgcccagccatcttccctcgccgccaagggttatagatctgtacatccgaaccttccctcagacaagagtcaggacgcaacctcctcatctgccgctcagcccgaagttatcgtcgtgccactttatctcgtcaatacagacagaggccaggaaggtactgccaggccccctaccccgcttggccccctgggatgcgtccccacaatcccagcgactgcttccgcagccagcccactgacgtttccgactttggatgacttcatccctccacacctccaacggtggccacatcactcccagccagcccgggcatccgggtcttttgccccaatttctcaaacaccaccatcctttagtccacccccccccctggtgccaccagcacccgaggatctgaggagggtcagcgaacccgatcttacaggagctgtttcatcaacggattcgagccccctgttaaatgaagtaagctcgtctctgattggtactgattctcaagctttcccgagcgtttcaaaaccaagcagtgcttatcctagcacaaccatcgtgaaccccaccatcgtgctgttgcaacacaatagagaacagcagaaaaggctgagtagtttgagcgacccggttagtgagcgacgtgtcggagagcaagattccgctcctacccaggagaagccaacgtctcccggcaaagccatagagaaaagggccaaagatgactctagacgtgtggtcaaaagcactcaggacttgagcgacgtcagcatggatgaggtcggcatcccactcaggaataccgagaggtccaaggactggtacaaaaccatgtttaaacaaatccacaagctcaatagagatacacccgaggagaacccatatttccctacctacaaattccctgagctgccggaaatacaacagacaagcgaagaggataacccttacacgcctacataccaattccccgcctcaacgcctagccccaaaagtgaggatgatgattccgacctgtactctccgcggtactctttttccgaagacacgaagagccctctgagcgtgcctcgatctaagtctgagatgtcatacatcgacggcgagaaggtagtgaagcgatctgccacgttgcctttgcccgcacgttcttctagccttaagtcttccagtgaacggaatgattgggagccaccagacaagaaggtggacacaaggaagtatagggccgaacctaagagtatttacgaatatcagccgggtaagagttccgtactaaccaatgagaagatgagcagggatattagccctgaggagatcgacctaaagaacgagccatggtacaagttttttagtgagctggaattcggcaagccgccacccaaaaagatctgggattataccccaggtgattgctcaatcctgccccgagaggatcgcaagaccaatctcgataaagacctttctctgtgccagacagagcttgaggcagatctggagaagatggagacactaaataaggctccttccgccaacgtgcctcaatctagcgcaatcagcccaacacctgagattagtagcgaaacccctggttacatttactctagcaactttcatgcagtcaagagagaaagcgatggagcccctggtgacctgacctcactcgagaatgaacggcaaatatacaagtctgttctggaggggggcgatattcccctccagggtctctcaggtctgaagcgacctagttcctctgcatccacaaaggacagtgaatctccaagacatttcattccggcagactacttggagtcgaccgaagagttcatccgccggaggcatgatgacaaagaaaagctcctggccgaccaacgccggctgaaacgtgagcaggaagaggctgacatcgctgctcgccggcacacgggggtaattccaacccatcaccagttcataaccaatgagcgattcggcgacctcctgaacatagacgacaccgctaagcgcaaatcaggaagcgaaatgagaccggcccgggcaaaatttgattttaaggcgcagacactcaaagagctgcccctgcaaaagggtgatatcgtttatatttacaaacagatcgaccagaattggtacgaaggtgagcaccatggccgggtcggcatctttccacgcacctacattgagttactgccccctgctgagaaggcgcagcctaagaaactcaccccagtgcaggtgttggagtatggggaagcaattgcaaagttcaacttcaacggggatacccaggtggagatgagtttcagaaagggtgagaggattacccttctcaggcaagtggacgaaaactggtacgaaggtcgaatacccgggacatctcgacagggcatcttccctatcacctatgtagacgttatcaaacgacctctcgtcaaaaatcccgtggactatatggatctgccattttcttcttctccttcaaggtccgcaacagctagcccccaatttagttcacactcgaaattgatcactcccgccccctccagcctgcctcactccagacgggccctgagcccggaaatgcacgccgtgacatctgagtggatctccctcactgtgggcgtcccagggcgcagaagtctggctctaactccccccttacctcctctacctgaagcctctatttacaacacagaccacctagcactgtccccacgtgccagtcctagtctttctctgagtctgccgcacctctcatggtccgaccggccgacgccccgaagcgtggcttcccctctcgcactcccaagtcctcataagacatacagtctggcgcccacaagccaagcgagtctgcatatgaacggtgacggcggtgtccacacaccgagctctggtatccaccaggactcttttctacagctgcccttaggaagctcggacagcgtgatttcgcaattatctgatgccttttcttctcaaagtaagaggcagccttggagagaggagagcggccagtacgagcggaaggcagagcgtggggcaggcgaaagagggcctgggggacccaagatctcaaaaaagagttgcctgaagcccagtgatgtagttcgatgcctgagcactgaacaacggttgagtgatcttaacacccctgaggaatccagacccggaaagcccctgggttctgcattcccagggtcggaggccgagcaaacggagagacacagggggggcgaacaagccggtcggaaggccgccaggaggggtggtagtcaacaaccgcaggcgcagcaaagaagagtgactcccgaccggtctcaaacttcccaggaccttttttcctatcaggccctgtactcatacataccgcagaacgatgacgaactggaactgcgggacggcgacattgtggatgtgatggagaaatgcgatgatggatggttcgttggcacctcaagacggacgaagcagttcgggaccttcccgggtaattacgtaaagccactgtacttatag

SEQ ID NO: 135735 - DNA, 2451 bp, synthetic construct
  misc_feature 1..2451: note = Description of Artificial Sequence: Synthetic coding sequence
  source 1..2451: mol_type = other DNA
atgtccagcgagtgcgatgggggctccaaagcggtgatgaacggccttgcgccaggctctaatggccaggacaaggatatggatctgactaaaatatgtacaggcaagggagctgtgacactgcgagctagttcctcctacagagagacaccttcatcctctcctgcaagtccccaggaaactcggcagcacgagagcaagccagggttagagcctgaaccttcttccgcagacgaatggaggttgtccagcagcgccgacgcaaacggcaacgctcagccaagtagcctggctgctaaaggctaccggagcgtgcacccaaacctacccagcgacaagtcccaggacgccactagttcttccgccgctcagccggaagtaattgtagtacctttgtatctggtgaatacagacagggggcaggagggcaccgcccgcccccctacgcctctcggtccactgggatgcgtgcctactatccccgccaccgcctcagccgccagtcccctaacctttcctacactggacgatttcatcccaccgcacctccagcggtggcctcaccactcccagcctgccagggcttctggctcatttgcgcccatcagccagacgcccccctctttttcaccacctccacctctggtcccacctgctcctgaggatctccgcagggtgtctgagccggacctaacgggagctgtgtctagtacagactcttcaccgctgctcaacgaggtgagtagctccctgatcggcacagatagtcaggcctttccctccgtgagcaagccgtctagtgcttatccaagtacgacaattgtcaaccccactatagtgcttttacagcataacagagagcaacagaagagactttcctcattatcagatccagtcagcgagcggagggttggcgagcaggatagcgcacccacccaggagaaaccgacatccccagggaaagctattgaaaaaagagccaaagacgactctcgccgggttgtgaagtccactcaagatctctcggatgtaagcatggatgaagttggtatccccttgcgcaatactgaacgctccaaagattggtacaagaccatgtttaaacaaatccacaaattaaatagggacgacgactcagatctgtacagcccccgctacagcttctccgaagacaccaagagtccattgagtgtgcccaggtctaagtccgagatgtcttacatcgacggcgagaaggtggtgaagcgctcagcaacattgccgttacctgcacgttcttccagtttgaaatcaagctcagagcgcaatgactgggagcctcctgacaaaaaggtggataccaggaagtatcgggctgagccaaaatccatttatgaatatcagcccggaaagtcaagcgttcttacgaatgaaaaaatgagtagtgccatatcaccgacaccggagatttctagcgaaacacctggctatatttactcatccaacttccatgcagtaaagcgggagtctgatggcgcccccggagacctgacctccctcgagaatgagcggcagatttacaagtcagtcctcgaggggggggacattcccttgcagggactctctggcctgaaaagacctagtagctcagcctcgacgaaagattcagagagtccaaggcatttcattcccgcagattatctcgaaagcacagaagagttcatccggagacgccacgacgataaggagatgcgaccagcaagagctaagtttgatttcaaagcacagacacttaaggagctgccactgcagaaaggggatatagtgtacatttataagcaaatcgaccagaactggtacgagggagagcaccacggacgcgtcggtatcttcccccgaacctatatcgagctcttaccacccgccgaaaaagctcagcccaaaaaactcacacccgtgcaggttctcgagtacggagaggcaatcgcaaaattcaacttcaacggcgatacacaggtggaaatgtcattccgcaagggagagcggataacactccttcggcaggtagacgagaattggtatgaagggcgtatacctggcacctcgaggcagggaattttcccgatcacatatgtagacgtcataaaacggccgttagttaaaaacccagtggattacatggaccttcccttttcatcttctccatcccggtctgccactgcgtccccgcagcaaccccaagcccaacaaaggcgcgttaccccagatcgcagtcaaacttctcaggatctgttctcgtatcaggcactgtacagttatataccacagaacgatgatgaactcgaactccgggatggagatatcgttgacgtgatggagaagtgtgatgatgggtggttcgtgggaacgtctagacggacaaaacagttcggtacctttccaggtaactatgtgaaacccctgtacctgtag

SEQ ID NO: 135736 - DNA, 3015 bp, synthetic construct
  misc_feature 1..3015: note = Description of Artificial Sequence: Synthetic coding sequence
  source 1..3015: mol_type = other DNA
atgagttctgaatgcgacggcggctctaaagccgtcatgaatggactggctcccggttcaaacggtcaggacaaagctaccgccgatccattgagagccagaagcattagcgcggttaaaataattccagtcaaaacagtgaagaatgcaagtgggctcgttctgcccaccgacatggacctcacaaagatctgtactggcaagggagccgttacgctacgggcctcctcgagctaccgcgaaaccccatctagctcccccgctagcccccaggaaaccagacagcacgaaagcaagcccgacgagtggagattatcgtccagtgccgacgcgaatggaaatgcccagccaagtagcctggccgctaaaggctaccgctctgttcacccaaatctcccttctgacaaaagccaggatgctacttcgtcctccgccgcccagcctgaggtaatcgtggtgccactctacttggtcaacactgatagggggcaagagggcactgctagacctcctacccctctcggaccgttgggctgcgtgcctaccattcccgccactgcttccgcagcctcgcctctcacttttccaacccttgatgactttataccacctcacctccagcggtggccccaccactcacagcctgccagagcgtcagggagttttgctcctatttcccagacacccccctcattttcaccccccccccccctagtgccgcctgccccagaagatctcagaagggtatccgagccggacctcacgggcgcagtgtcgagcacagattcaagtccgctactgaatgaagttagttcatcactgattgggaccgattcccaggcctttccgtctgtgtctaagccctcatccgcctatccctccaccacaattgttaatcccacaatcgtgttgctccaacacaaccgggagcagcagaagcgcctcagctctctatccgatccagtttccgaaaggcgggtgggagagcaggattctgcgccaacccaggaaaagcctacctcccctggcaaggcaatcgaaaaaagggccaaggatgattctcggagagtcgtcaagagcacgcaggatcttagcgacgtgtccatggatgaagtgggcattcctcttagaaacacggagcgctctaaggactggtataagacgatgtttaagcagatccacaagctcaatagagatacccctgaggaaaacccttacttcccgacatacaaattccctgaactccctgaaatccagcaaacatcggaggacgacgattccgacctctactccccgaggtactccttcagtgaggatacaaaatcccctctctctgttccccgctctaagtcagaaatgtcttacatagatggcgaaaaggtagtgaaaagaagtgctactctgcccctgccagctcgaagtagttccttaaagtcctcgagcgagcgaaatgattgggaaccacctgataagaaggtcgatactcggaaatacagagccgagcctaaaagtatctacgagtaccagccaggcaaatcaagcgttctcactaatgaaaagatgtcccgggatataagccccgaagagatcgacctcaagaacgagccttggtacaagtttttttctgagctggagtttggaaagccaccccccaaaaaaatctgggattatacaccgggcgactgcagtattctgcctcgcgaagatcggaagacaaatctcgacaaagatctttccctgtgtcagacagagctggaagccgacttagaaaaaatggaaacactgaataaggctccatccgctaatgtgcctcaaagcagcgctattagtcctacacctgaaatcagctcagaaacccccggctatatttactctagcaattttcacgccgtgaagagagagtctgatggagcgccaggcgatttgacctcgttggaaaacgagagacagatctacaaaagcgttctcgaaggaggcgatattcctctgcaggggttgtcagggctaaaacgcccctcaagcagcgcttcaacaaaggattctgagtcccccaggcactttatacccgccgattatttagaaagcaccgaagagtttattaggcgaagacacgatgacaaggaaaagcttcttgcagaccagcggcgcctgaagcgcgagcaggaggaggccgatatagccgcacggcgccacacaggggtgattcctactcaccaccagtttatcacaaacgagagattcggtgatctgctgaacattgatgacactgctaaaaggaaatctggtagtgaaatgaggcccgctagagccaagtttgattttaaagcacagaccctaaaagagctgccccttcagaagggagacattgtctacatctataaacagatagatcaaaattggtatgagggtgagcaccatggccgggtaggtatttttccaagaacctacatcgaattgctgcctccagcagagaaggcccagccgaaaaaattgaccccagtccaggtgctggaatacggagaagctattgctaagtttaacttcaacggcgatacccaggttgaaatgagttttaggaagggcgagcggatcacattgcttagacaggtagatgagaactggtacgaagggaggatacccggaacaagcagacagggaatttttcccatcacttacgttgacgtcatcaagcgccctctcgtaaagaacccagtggactacatggacttaccattctcaagctcgccgtccaggtctgcaaccgcttccccgcagcagccacaggctcagcagaggagagtcactccagacagaagccagacatctcaggatctattttcctaccaggccctttacagctatatacctcagaacgacgatgagctggaactgcgcgatggcgacattgttgatgttatggaaaaatgcgatgacggctggtttgttggaacttcaagacggaccaaacagtttggaaccttccctggcaattacgtgaagcctttgtacctctag

SEQ ID NO: 135737 - DNA, 2016 bp, synthetic construct
  misc_feature 1..2016: note = Description of Artificial Sequence: Synthetic coding sequence
  source 1..2016: mol_type = other DNA
atgcagggacccccacggagcctgagggccggcttgagtttggatgactttattccagggcatctgcaaagtcatattggcagttctagcaggggtacgcgggtccctgtgattcggaacggcggcagcaataccctcaacttccagtttcacgaccccgcacccaggactgtttgcaacggcgggtacacacctcgcagggatgcatcccaacatccagacccggcgtggtatcagacctggccagggcccggaagcaaaccaagcgcctccaccaaaatacctgccagccagcatactcagaattggagcgcgacgtggaccaaagactcaaaacgacgagacaaaagatgggtgaagtacgaaggcataggccccgttgacgaaagtggcatgcctatcgctccgaggtcatccgttgatcgtccccgggactggtatagacggatgtttcagcaaattcatcgaaagatgccagacctacagctcgactggacttttgaggagccgcccagagatcctcgacatctaggggcacagcagaggcctgcccaccgacctggccccgcaacctctagttcaggtcgctcttgggaccactccgaagagctgccacggtccacttttaactaccggccaggcgcattttctactgtgctgcagccttctaaccaggttctgagaagacgagagaaagtggataatgtatggaccgaggaatcctggaatcagttcttgcaggaattagagactgggcagaggccaaagaagccattagttgacgacccaggagagaaaccgtcccagcccatcgaagtgctgttggagagggagctcgctgaactgtcagcagaacttgataaggacctacgtgccattgagaccagactcccttcacctaagtctagtcccgcacccagacgcgctcccgaacaaaggccccctgctggacccgcctccgcctggtctagttcctacccacatgctccttatttgggttctgctcggagtctttcaccccacaaaatggctgatgggggctcgccttttctcggaagaagggacttcgtttacccctcaagcaccagagacccaagcgccagcaatgggggggggagtccagccaggagagaggaaaagaagaggaaagctgctaggctgaagttcgattttcaggcccagtctccaaaagagctgacattacagaaaggggacatcgtctatatccataaggaggtggacaagaattggctagagggagaacaccacggccgcctcggcatctttcctgctaactacgtggaggtattacctgccgacgaaattcccaagccaattaaacctcctacgtatcaggtgttggagtacggggaagcagttgcccagtacacctttaagggcgacctggaggttgagctgagcttccgcaagggtgaacatatttgtttgattcggaaggtgaacgagaattggtacgagggaaggatcactggcacaggcagacagggaattttcccagcctcatacgtgcaagtgagtcgggaaccgcgcctgcgcttgtgtgatgatggtccacagttacccacctcacctcgattgaccgccgccgctagaagcgccagacatccaagctcgccctccgccctgcggagcccagccgacccaatcgatttaggcggacagacttccccaaggcgcaccggcttcagctttccaacccaggagccgagaccgcaaacccaaaacctggggacacccggtcctgcattatcacattcccggggaccctctcaccctctcgacttgggaaccagttcacccaacacctctcaaatccactggaccccttaccgcgccatgtatcagtatagaccgcagaatgaggacgaattggagctaagggagggggatagagtggatgtgatgcagcagtgcgatgatggctggtttgttggagtgagtaggcgtactcagaagttcggaaccttccccggcaactatgtggccccagtgtag

SEQ ID NO: 135738 - DNA, 990 bp, synthetic construct
  misc_feature 1..990: note = Description of Artificial Sequence: Synthetic coding sequence
  source 1..990: mol_type = other DNA
atggccgacggaggaagtccattcctgggccgcagggatttcgtctacccttccagcaccagagatccgagcgccagtaatggaggaggctccccggccaggagagaagagaaaaagcggaaagcagcaagactgaaatttgactttcaggcccagtctccaaaagagctgaccttgcagaagggagatattgtgtacatccacaaggaggtggataagaactggctcgagggagagcatcatggtcgcctgggaatctttcctgctaactatgtagaggtcttgcctgcagacgagattccaaagccaatcaagccgcccacataccaggtgttggagtatggcgaggcggttgcacagtacactttcaagggagatctggaggtggaactctcttttaggaagggagagcacatttgtctcatccgaaaggtcaatgagaattggtacgagggccggatcacaggaaccggacgccagggaatttttcccgcatcttacgttcaggttagcagggagccgcgtttacggctgtgtgatgatggccctcagctgcctacgagcccacgcctgacagccgccgccagaagtgccaggcacccatctagcccctctgcgcttcgaagccctgcggacccaatagatctgggaggtcagaccagtcctcgtcgcacagggttctcttttcccacccaggagcctagaccccaaacccagaatttagggacacctggtcccgctttatcacattctcgcgggccgtcacatcctctggacctgggcactagtagccccaacacgtctcaaatccattggaccccgtaccgcgcaatgtatcagtaccgccctcagaatgaagatgagctcgagctgagggaaggtgatagggtcgacgtcatgcaacaatgtgacgatggctggttcgtgggcgtatctagaagaacacagaaatttgggactttcccaggcaactacgtggcgccagtttag

SEQ ID NO: 135739 - DNA, 1074 bp, synthetic construct
  misc_feature 1..1074: note = Description of Artificial Sequence: Synthetic coding sequence
  source 1..1074: mol_type = other DNA
atggccgcggctgcaaaacccaataatctgtccctagtcgtgcacggaccaggcgatctaagattagagaactatcctataccagagcctggtccaaacgaagttttgttgcgaatgcactctgtcggaatatgtgggagtgacgttcattactgggaatacggtcgcatcggcaacttcatcgtgaagaagcccatggttctgggtcacgaggccagcggaactgtcgagaaagtgggcagctctgtcaagcatcttaagcccggtgatcgagttgcgattgaaccgggagcccccagggagaatgatgagttttgcaagatgggccgatacaacctctcaccatccattttcttctgtgcaacccctccagacgatgggaatctctgtaggttttacaagcataacgctgctttttgctacaaattacctgataacgttacctttgaggaaggtgctctaattgaacccctgtctgtggggatccacgcttgtagaaggggcggtgtgacgctgggccacaaggtgctggtttgtggcgccggccccattggaatggtgacactgttagtggctaaagccatgggggcagctcaggtggtggtcaccgacttgtctgccacgagactctccaaggcaaaggaaatcggggctgatctagttctgcagatctcaaaagagtcacctcaggaaatagcccgcaaggtggagggccagttaggctgcaaaccagaggtgactatagagtgtaccggggctgaggcttctattcaggccggaatctatgcaacgaggtcggggggcaaccttgtgctcgtgggcctaggatcagagatgaccacagtgcctctgctccatgcagctataagagaggttgatattaagggtgttttccggtactgcaatacatggcccgtcgcaatatccatgctcgctagcaaatcagtcaatgttaagcctctggtaactcacagattccccctcgaaaaggcgctggaggcctttgagacttttaaaaaaggattaggcctgaagatcatgctgaagtgcgaccccagtgaccagaacccatag

SEQ ID NO: 135740 - DNA, 597 bp, synthetic construct
  misc_feature 1..597: note = Description of Artificial Sequence: Synthetic coding sequence
  source 1..597: mol_type = other DNA
atggcctacccagggcatcctggggcgggcggcgggtactaccccggaggctatgggggcgcgcccgggggccctgccttccctgggcaaacccaagacccgctttacggttactttgctgctgtcgccggccaggacggccaaattgacgcggatgagttgcagaggtgcctcacccaaagcggtattgccggtgggtataaaccattcaatctggaaacttgccggcttatggtctcaatgctagatcgggacatgagtggcactatgggcttcaatgagttcaaagagctctgggctgtcctgaacggctggcgacaacactttatctcctttgacactgatcggtccggtacggtcgatccccaggagctccaaaaggctttgacaaccatgggctttaggctgtcccctcaggccgtgaacagcattgcgaagcgctatagtacgaatggaaagataacctttgacgattacattgcctgctgcgtgaagctccgcgccctgactgactcatttcgcagacgcgataccgctcagcagggcgtggtaaacttcccatatgacgatttcattcagtgcgtaatgtctgtttag

SEQ ID NO: 135741 - DNA, 552 bp, synthetic construct
  misc_feature 1..552: note = Description of Artificial Sequence: Synthetic coding sequence
  source 1..552: mol_type = other DNA
atgcagtacgggggcgccccgggagggcctgccttccctggccagacccaggaccccctctacggctactttgccgcagtagctggccaggacggccagatcgacgccgatgaattacaaagatgcttaacacaatctggtattgcaggggggtacaaaccctttaatttagaaacatgccgcctgatggtctcaatgttggacagggatatgtcaggcactatgggtttcaacgagttcaaggagttatgggccgtcctgaacggttggaggcagcactttatttcctttgacacagatcggtcagggacagtcgatccccaggagctacagaaggctctgactaccatgggttttcgcttatcacctcaagccgtgaacagtattgccaaaaggtattccaccaacgggaaaatcacctttgacgattatatagcctgttgcgtgaagctgcgcgcgctcactgattctttcagaagacgggacaccgcccaacagggcgtggtgaacttcccttatgatgattttatccagtgtgtgatgtctgtttag

SEQ ID NO: 135742 - DNA, 543 bp, synthetic construct
  misc_feature 1..543: note = Description of Artificial Sequence: Synthetic coding sequence
  source 1..543: mol_type = other DNA
atgcagtacggcggtgcccccgggggtccagccttcccaggtcagactcaagacccattatatggatacttcgccgccgtcgcaggtcaagacggccagattgacgccgatgagctgcaacgctgcctaacacaatctggaattgcaggcgggtataaaccctttaacctcgaaacttgtagactcatggtgtccatgttggatagagacatgagcgggacaatgggttttaatgagttcaaagagctgtgggctgtgctgaacgggtggcggcagcactttatatcatttgatactgatcggagtggaaccgtggatccccaggagctgcaaaaggccctgaccaccatggggtttagacttagcccccaggcggtcaacagtattgccaaaagatacagcacaaacggaaagatcacctttgatgactacatcgcctgctgcgtaaagctgcgtgcccttaccgattcttttcgcagaagggacacagcccagcaaggcgttgtgaattttccatacgatgacgtatctctgcgcaattag

SEQ ID NO: 135743 - DNA, 6645 bp, synthetic construct
  misc_feature 1..6645: note = Description of Artificial Sequence: Synthetic coding sequence
  source 1..6645: mol_type = other DNA
atggcaacacggagtagccggcgggagtcaagactgcccttcctttttacattggttgcactcttgccccccggcgcgctgtgcgaggtgtggactcagcgccttcatggcggcagcgccccactcccacaagacagaggatttctggtggtccagggcgatccaagagaactgcgtttgtgggctaggggagatgcacggggggcttcgagagctgatgaaaagccgcttagaaggaaacgaagtgctgctctccaaccagagccgattaaagtgtacggccaagtcagtctgaacgactctcataaccagatggttgtccactgggccggagagaaaagcaatgttattgtggccctggcaagagattccctggctctcgcccggccaaagtcatcagacgtctacgtgagctacgactatggaaaaagctttaagaaaatcagtgacaagctgaatttcggtttgggtaaccggtcagaggccgtgatagctcagttctaccatagtccagccgataacaagcggtatatctttgccgatgcctatgcacagtacctttggatcacatttgatttctgtaataccttgcagggattctcaattccctttcgtgccgccgatttactactgcacagtaaggcctctaacttgctactagggttcgatagatctcatccaaataagcagctgtggaaatccgacgattttggacaaacatggatcatgatacaagagcacgttaaatctttcagctggggtattgacccctacgacaaaccaaataccatttacattgaacggcacgaaccgtctggttactcaacggtgttcagatcaacggatttctttcagtcacgcgagaaccaggaggtgatcctggaagaagtccgcgacttccagttaagggataagtatatgttcgctactaaagttgtgcatctattggggtctgagcagcagagcagcgtacagctgtgggtgagcttcggcaggaagcccatgcgcgctgcccagtttgttacacgccatcctattaacgaatactacattgcagatgcgagtgaggaccaggtgtttgtctgcgtgtcccatagtaacaacagaactaacctctatatctccgaagcagagggtctaaaattcagccttagcctggagaacgtgttgtattactcgcccggcggagcggggagtgataccctggtaaggtatttcgcaaatgagccttttgcggattttcaccgggtagagggtctgcaaggcgtttacattgctacattaattaatggttccatgaacgaggaaaacatgagaagtgtgataacgtttgacaaaggcggcacctgggaattcctacaggcaccggctttcactggatacggagagaaaatcaattgtgaactcagccaggggtgctccctccatttggcccaaagactgagccagcttctcaatttacagttacgacgcatgccaatactgtccaaggagagcgccccgggcctcattatcgctacggggagcgtcggaaagaatctggcctcaaaaactaacgtgtacatctccagctctgcgggcgctcggtggcgcgaggccttgccggggccccattattacacctggggcgatcacggcggaattataacagccatcgcacagggcatggagaccaatgagcttaaatacagtacaaatgaaggtgaaacttggaagacattcattttcagcgagaaaccagtttttgtctatggactcctgactgagcccggggagaagagcacggtctttactatttttggcagcaacaaggagaacgtacatagctggctgatcctgcaagtcaacgcgacggacgccttaggggtgccttgcacagagaatgactacaagttgtggagcccttccgatgagaggggaaatgaatgtctcttgggccacaaaaccgtgttcaagcgccgcacgcctcatgccacgtgcttcaacggagaggacttcgaccgaccagtggtggtgtcaaactgctcatgcaccagagaggattacgagtgcgactttggcttcaaaatgtccgaagacctgtctctagaggtctgtgtgcccgaccctgaattcagcggcaagtcttacagtccaccagttccctgtccggtcggttcaacgtataggcgaacgaggggctatcggaagatcagcggagatacctgctccggtggcgatgtagaggcgaggctcgaaggggagctggttccatgccctctggccgaagagaatgaatttattctttatgccgtgcggaagagtatctatcggtacgacctggcgtccggcgccaccgagcagttgcctcttaccggactgagggccgcagttgcgctggattttgactatgagcataattgcctatattggtcagatctggccctggatgtgatccagcgcctgtgcctgaatgggagcaccgggcaagaagtcattattaactcaggcttagagaccgtcgaagccctcgcattcgagccacttagtcagttactctactgggtggacgccgggtttaagaaaattgaagtggctaaccccgatggcgacttcagacttacaattgtcaactcaagcgtgctcgaccggccgagggccctggttcttgtgcctcaggagggggtgatgttctggaccgattggggtgacctcaagcccggcatctacagatctaatatggacggatctgctgcatatcacctcgtgtcagaggacgtaaaatggcctaacgggatatccgtcgacgaccagtggatctactggacggacgcctatcttgagtgtatcgaacgcatcacgttttcgggacaacagaggtcagtgatcctggataatctgccgcatccatatgcaatcgctgtgttcaagaacgagatttattgggatgactggagccaactcagtatctttagggcctcaaaatatagcgggagtcagatggagatcctcgccaatcaactaactggcctgatggacatgaagattttctacaagggaaagaatacgggcagcaacgcctgcgtcccaaggccctgcagtcttctgtgcttgcccaaggcaaataactcacgttcttgcagatgtcccgaggacgtgtccagctctgtcttgccctctggggatctcatgtgtgattgccctcagggataccagctaaagaataacacctgcgtcaagcaggaaaatacttgcctgaggaaccaatatagatgcagtaacgggaactgcattaacagcatatggtggtgtgactttgacaatgattgtggggacatgtctgacgagcggaactgcccgactaccatctgtgatttggacactcagtttaggtgccaggaatctgggacctgtattccactctcttacaagtgtgatctagaagacgattgtggggacaattcggatgagagccattgtgagatgcaccagtgccgttcagacgagtataattgctcttcgggcatgtgtattcgttcctcctgggtctgtgatggggacaacgattgtagagattggtccgatgaagccaactgcacagcaatttaccatacctgcgaggccagtaactttcaatgccgtaatggacactgcatcccgcagcggtgggcatgtgacggggatacggattgccaggacggaagtgacgaagacccggtgaactgcgaaaagaagtgcaacggcttccgctgtcccaacggcacatgcatcccatccagcaagcactgcgatgggcttcgggattgctccgacggcagtgatgaacagcactgtgagcccctgtgtacgcattttatggatttcgtgtgcaaaaaccgacagcagtgcctctttcattccatggtgtgcgacggcattatccaatgcagggatggcagtgatgaggatgcggcattcgcaggctgtagccaggatcccgagttccacaaggtatgtgacgagtttgggtttcagtgccagaatggagtgtgcattagcctgatctggaagtgtgacggtatggatgactgcggggactatagtgatgaggcaaattgcgaaaatcccaccgaagccccaaactgttcgagatacttccagttcaggtgcgagaacgggcactgtatcccgaatagatggaagtgtgatagggaaaacgactgtggcgactggagcgacgagaaagactgtggagatagccacatcctgcctttctccacacctgggccatcaacctgcctccccaattactatcgatgtagttctggcacctgtgtgatggatacttgggtctgtgacggatatagggactgtgcagatggctccgacgaggaggcttgcccgcttctagctaacgtgacagctgcctctacacccactcaactagggcggtgtgacagattcgagtttgagtgccatcaaccaaaaacctgcatcccgaattggaaacgttgtgacgggcaccaggattgccaagatggacgggacgaagcgaattgccccactcactcaacactgacatgcatgagcagagagttccagtgcgaggacggcgaagcctgcatcgtgctctccgagagatgcgatggattcctcgactgtagcgatgagtctgacgaaaaggcttgttctgatgagttgaccgtgtacaaagtgcagaatttgcagtggaccgctgatttcagcggcgatgtgaccctcacgtggatgcgtcctaagaaaatgcccagcgcttcctgtgtctataatgtatattatagggtagtgggagaaagcatatggaaaacactggagacccactctaacaagaccaacacagtcctaaaagtgctgaaacctgacactacctaccaggtgaaagtccaggttcagtgtttaagcaaggctcataacaccaacgacttcgtgacgcttaggacacctgagggactaccggacgccccacgtaaccttcagctatccctgcctcgcgaggccgagggagttattgttggacattgggccccccctattcatactcacgggctgataagagaatacatcgtggagtactcgcgttccggaagcaagatgtgggccagtcagcgggctgcaagcaatttcactgaaattaagaatctgcttgttaatactctatatacagtgcgcgtcgcggccgtgacctctcgcggcatcggcaattggagtgactctaagtcaataacaaccataaaaggcaaagtcatcccaccacctgatatccacatcgatagctacggcgagaactacttgtccttcacgttaactatggagtccgatatcaaggtaaatgggtacgtcgtcaacctgttctgggccttcgatacacacaagcaggagaggaggacccttaacttcagagggagtatcttgagccacaaagtgggcaatctcacagcccacacgagctacgagatatccgcctgggccaaaaccgatcttggcgacagtcccctagccttcgaacacgtaatgactcgcggtgtgcggccaccagccccttcccttaaagcaaaggcaatcaatcaaaccgcggtagaatgcacctggacaggaccacggaatgtggtgtacgggatcttttatgccacaagtttcttggatctttataggaaccctaagagtctaacaacctctctgcataacaaaaccgtgatagtgtctaaggatgaacaatacctttttctggtccgggtggtcgtgccctatcagggaccctcatctgactacgtggtggtcaaaatgattcccgacagtaggttgccccctaggcatcttcacgtcgtgcatactggaaagacaagtgtagtgatcaaatgggaatctccctatgattccccagaccaggacctgttgtacgccgttgcggtgaaggatctgatacggaaaaccgaccggagctacaaagttaaatccaggaactccacagtagagtacaccctgaacaaactggagcccggagggaaataccatattatagtgcaactcggaaatatgagtaaagactctagcattaagattacaacagtctctctgtccgcgcctgatgccttaaagatcattaccgagaacgaccatgtgctcctgttctggaagagccttgccctgaaggaaaaacacttcaacgagagccgcgggtatgagatccatatgtttgacagcgccatgaatatcactgcctacctcggaaacacaacagataactttttcaaaatatccaatctcaaaatgggccacaactacaccttcacggtgcaggccagatgcctctttggtaatcagatttgtggagagccagcaattctactgtacgatgaactggggagtggcgctgatgcttccgctacacaggccgcccgctctacagacgtagctgcagtcgtggtgcctatcctgtttcttatcttattgtcactaggtgttggttttgccatcctctacactaaacatagacggcttcagtccagtttcacagcgtttgctaattctcattacagctctcggttgggtagcgccatcttttcttctggcgatgatctgggggaggatgatgaagatgctcccatgattactgggttttcagatgatgtaccgatggtcatagcatag

SEQ ID NO: 135744 - DNA, 3507 bp, synthetic construct
  misc_feature 1..3507: note = Description of Artificial Sequence: Synthetic coding sequence
  source 1..3507: mol_type = other DNA
atgggcaaggtgggagctggtggcggctctcaggcccgattgagcgcccttttagctggagccggtttgttaatactgtgtgcacccggcgtgtgcggaggcggatcttgctgcccctcaccccatcctagttctgccccacgctccgcctccacccccagggggtttagccatcagggccggcccggtcgagctcctgccactccactccctcttgtggtgcgcccgctcttctctgtggctccgggtgacagagctctcagcctagagcgggctagaggaaccggcgcttccatggcagtggcagccagatccggccgccgacgccgcagtggagcagaccaagagaaggcggagcgaggggaaggggcctctaggagccctcgtggcgtgttaagggacggaggccaacaggaacctggaaccagggaaagagatcccgacaaggcaacacgctttcgaatggaagagttgcgcctgacatcaacaacattcgctctcacgggcgactctgctcacaatcaggccatggtgcactggagtggccacaactctagcgtaatccttatccttacaaagctgtacgattacaacctggggtccatcaccgaatccagcctctggcgctctactgattacggtacgacttacgaaaagctgaacgacaaggtgggtctgaaaaccatccttagttatctgtatgtctgccccaccaacaaaagaaaaatcatgttactgacagatcctgagatagaaagctccctgctgatttcgtccgacgaaggcgctacttatcagaaatatagactgaatttctatatccagagcttactcttccaccctaagcaggaggactggatcttagcctattcccaggatcaaaaactatactcctccgccgagtttggcaggaggtggcaactcattcaggagggagtcgtcccaaaccggttttactggtccgtgatgggatccaacaaggagcctgacttggtccacctcgaagctaggacagtcgatggtcactctcattatctgacttgcagaatgcaaaattgtacggaggctaaccgcaaccagcctttccctggatacatagacccggattcacttattgtgcaagaccactacgtatttgtccagctcacttccggcggcaggccacattactatgtgagttacagacgcaacgcttttgcccagatgaagctgccaaaatacgccctccccaaggacatgcacgtcatctcaaccgacgagaaccaagtctttgccgccgtgcaggagtggaatcagaacgatacttataacctgtatataagtgatacaagaggcgtttactttactctagccctggaaaacgtgcaaagcagccgcggacccgaagggaacatcatgattgatctgtatgaggttgccggcataaaagggatgttcctagctaacaaaaaaatagataaccaggtgaaaaccttcataacatataacaaggggagggactggagactgcttcaggccccagataccgatctgcgaggcgatcccgttcattgtttattgccttattgtagtctccacctccatcttaaagtgtcagaaaatccttacacgtccggcatcattgcgagtaaagataccgcaccctccatcatcgtggcctctggaaacatcggatctgagctgtcagacactgacatctcaatgtttgtgtcttccgacgccggcaacacctggcgccagatctttgaggaggagcactccgtgctgtatctggaccaaggaggggtgttggtggccatgaaacacactagtctgcctattcggcacctgtggctcagtttcgatgagggtcggtcctggagcaagtacagttttacatccattcctctgttcgtggacggcgtgctgggggagcccggtgaagaaacactgattatgaccgtgttcggtcacttctcccaccgtagtgaatggcagctggttaaggtcgattacaagtcaattttcgataggagatgtgctgaagaggactaccgcccctggcaattgcattctcagggtgaagcctgtatcatgggggcaaaacgaatttacaagaagcggaaatctgagagaaaatgtatgcagggaaagtatgccggcgccatggagagcgaaccctgcgtgtgcacggaggctgactttgattgcgactacggatatgaacgacacagtaatggacagtgcttgcccgcgttctggttcaatccctccagcctctcaaaggactgtagcctgggtcagtcctatctgaactctaccggctacagaaaagtggtgagcaacaattgtacagatggagtccgagaacagtacaccgccaaaccacagaaatgccccggcaaggcccctaggggtctgcggattgtgaccgcagatggcaaactgaccgcagagcagggacacaacgtcactttaatggttcagctggaggagggcgatgtgcagagaaccctgatacaggtggactttggagacggcattgctgtctcgtatgtcaacctctcatctatggaagatggtatcaaacacgtttatcagaatgtgggaatctttagagtgacagtgcaggtagacaattctctgggctcagactctgccgtgctgtacttgcacgtgacttgtcccctggagcacgtacacttaagtttgccattcgtgactacaaaaaacaaggaggtgaacgctaccgcagtgctttggcctagccaagtggggaccttaacttatgtgtggtggtacggcaacaatactgaacccctcattacacttgaagggtctatttcttttcggttcaccagcgagggaatgaacaccattactgtacaggtaagcgcagggaacgccattctgcaggacacaaaaaccattgctgtgtacgaagaattccgctcactgaggttgagcttctcgcctaacttggacgactacaaccccgatatccctgagtggagaagggatatcggtcgcgttattaagaagagcttggtggaggcaactggagtgcctggccagcatattctcgtggctgttctccccggtctaccaacgacagcggaactttttgtccttccttatcaggacccagctggagaaaacaagcgcagcaccgacgatctcgagcaaatcagcgagctgctgatccatacccttaaccaaaattctgtccattttgagctaaagccaggagtgagagtgttggtgcatgctgcccacctgactgctgctccgctcgttgacttgacccccacacactctggatctgctatgctgatgctgctgtccgtcgtgttcgtggggctggcagtgtttgttatctataagtttaaacgacgagttgcgctcccgagtccgccctctccatccactcagccaggcgacagcagcctgcggctccagagggctagacacgctacaccacccagtactcccaaacgggggtctgcaggtgcacagtacgccatctag

SEQ ID NO: 135745 - DNA, 3597 bp, synthetic construct
  misc_feature 1..3597: note = Description of Artificial Sequence: Synthetic coding sequence
  source 1..3597: mol_type = other DNA
atggggaaagtcggggcaggtggaggctctcaggccagactgtccgccctgttggctggagccggattgctcattctttgtgcccctggggtgtgtggagggggatcctgctgtccttcaccgcatcctagtagtgccccccgaagcgcatcaactcccagggggttctcacatcagggccggccaggccgagcccccgccactccccttccactagtagttaggccactcttcagcgtagccccaggcgatcgcgccctgagtttagaacgcgcacggggtaccggtgcaagcatggcagtggccgctcgcagcggccgtcggcgaagaagtggtgcagaccaggagaaagcagagagaggtgagggcgccagtcgctctccaagaggggtgttgcgggacggggggcagcaggagcccgggacaagagagagagaccccgataaggccaccagattcaggatggaggaactgcgacttacttctacaacatttgcgttaaccggcgactctgcccacaatcaggccatggttcactggtctggacacaactcatctgtgatcctcatactgacaaaactgtacgactataacctgggatctattacggagtctagtctctggcgatcgactgattatggaacaacctatgaaaaattaaatgacaaagtcggattgaaaaccatcttgagttacctttacgtgtgcccaaccaacaagagaaaaattatgctccttacagatcctgaaatcgaatcctcgttacttatctctagtgacgagggagccacttaccagaagtatcgcctcaacttttatattcagtcccttctctttcaccctaaacaagaggattggattctcgcttactcgcaagaccagaaactctactcaagtgcggaattcggccgtcgttggcaactcattcaggagggagtggtgccaaaccggttttattggtcagtaatgggaagcaataaggagcctgacctggtccacctcgaggcaagaactgtcgacggccactcgcattatctgacatgtcgcatgcagaattgcacagaagctaatcgtaatcagccatttcctgggtatattgaccccgatagcttgatcgtacaggaccactacgtattcgtccagttgacttccggcggacgaccacactactatgtgagttatcgaagaaatgcattcgcacagatgaagttgccaaagtatgctctacccaaagacatgcatgtcataagtactgatgaaaatcaggtgttcgcagcggtccaggagtggaaccagaatgacacttataacctgtacatctccgacacgaggggtgtgtacttcaccttggccctggagaatgtgcagtcgagccgaggccccgagggaaacattatgattgacctgtatgaggtggcaggaatcaagggtatgttcctcgctaataagaagatcgataatcaagtcaagacctttattacctacaacaaaggtagagactggcgactcttgcaagctcccgacacagatctgagaggtgacccggtgcattgcctgctgccctactgctcgttacatttacacctgaaggtgtctgagaacccctacaccagcggcattatcgcgagtaaggacacagccccttctatcatcgtcgcctccgggaacattggaagtgagttgtcagatacggatatctcaatgtttgtctcctcagatgccggcaacacatggaggcagatattcgaagaggaacattcagtgctctacctcgaccaagggggcgtactggtggccatgaagcacacctcgctacccattcggcacctgtggctctcattcgacgaagggagatcctggtccaaatatagctttaccagcattcctctgtttgtagatggagtgctcggagagccgggcgaggaaaccctgattatgacagtttttggacactttagtcaccggagtgagtggcagctcgtgaaggtagattacaaatccatttttgaccggcgttgcgccgaagaagactatcggccctggcagttgcacagccagggcgaggcctgtataatgggcgccaagcgcatctataagaaacggaaaagcgaacgaaaatgtatgcagggcaagtacgccggagctatggaatcagagccttgtgtgtgcacagaagccgacttcgactgcgactatggctatgaacgtcactcaaacgggcagtgcctgcctgcattctggtttaacccttccagtttgtcaaaggattgcagcctaggacagagctatctgaacagcacagggtacaggaaggtcgttagcaataactgcacagatggggtgagagagcaatatactgccaagccccagaagtgtcccggcaaagctccccggggtctgcggatcgttacggcagacggcaaactgactgccgagcagggacataatgtgacactcatggtgcagttggaggaaggcgacgtccagcgaacgctcatccaggtggatttcggggatggaatagcagttagctacgtaaacttgagttcaatggaggatggaatcaagcacgtgtatcagaatgtgggcattttccgggtaaccgtacaggtcgacaacagcctcggatcagatagtgctgtcttgtatctccatgttacatgtcctcttgaacatgtccatctgagcctgccattcgtaacaaccaaaaacaaggaggtgaatgcaactgctgtgctctggcctagtcaggttggaacacttacttacgtctggtggtatggcaataatacagagcctctgatcacgttggagggtagtatcagcttcaggttcacaagtgagggaatgaataccatcacggtccaagtctccgccgggaacgcgatacttcaagacactaagaccatcgccgtgtacgaagagttccgttcactgcggctcagcttttcaccgaaccttgatgactacaatcctgatattcctgaatggcgcagagatattggacgcgtgatcaaaaaaagtttagtagaggccacgggcgtacccggacagcacatcctcgtagcggtccttccaggtttgcctactaccgccgagctcttcgtgctaccgtatcaggaccctgccggcgagaataagaggagcactgatgatctggaacaaatctctgagctccttatccatacgcttaaccagaactccgttcatttcgaactgaagccaggtgtgagagtgctggtacatgccgctcatctcactgctgctccgctagtggacctgactcccactcactccggcagtgctatgctaatgctcctatctgtggtatttgtgggtctggcagtgttcgtcatttataagttcaaacgaaaaattcctgggattaatgtatatgcacagatgcagaatgagaaagagcaggagatgatcagtcccgtgagccacagtgaatccagacctaacgtgccacagacagagctgagaagacctgggcagctgatagacgaaaaagtggagagtcagctcattggaagcatctccattgtggctgagaaccagtccaccaaggagatccctacatacgttaacgtgtag

SEQ ID NO: 135746 - DNA, 2145 bp, synthetic construct
  misc_feature 1..2145: note = Description of Artificial Sequence: Synthetic coding sequence
  source 1..2145: mol_type = other DNA
atgattgatttatacgaggtggctgggatcaaaggaatgttcctggcaaacaagaaaattgacaatcaagtcaaaaccttcataacttataacaagggaagagattggcgactgctacaggcccctgacaccgatctgcgtggggaccccgtccactgcctcttgccctactgctccctgcacctgcatcttaaggtcagcgaaaacccttacacatctggcatcatagcaagtaaggataccgccccatcgattatcgtagcatccggcaacattgggagcgagttgagtgatacagatatcagcatgttcgtgtctagcgacgctgggaacacatggcggcaaatattcgaagaggagcactccgttctttatcttgaccagggcggagtattagtcgccatgaaacatacctctctgccgatcaggcacctgtggctctcctttgacgagggcagatcatggagtaaatattcatttacctctattccactgtttgtggatggagttctcggagagccaggcgaagaaaccctgataatgacggtattcggccatttttcccaccggagcgagtggcagttggtcaaagtggattataagagcattttcgaccggagatgcgccgaagaggattacagaccttggcaactgcactcccaaggcgaagcttgcatcatgggagctaagcgcatttacaagaaacgtaagtctgagagaaaatgtatgcagggcaagtacgccggagcaatggagtccgagccatgcgtctgcactgaagccgacttcgactgcgattatggatacgagaggcactctaatggccagtgtcttcccgctttctggttcaatccttcatctctgagcaaggactgctcactgggtcagtcctacctcaattcaaccggctaccggaaggtcgtctccaataattgtaccgacggagttagagaacagtacaccgccaaacctcagaaatgccctggaaaggccccaagggggcttagaattgtgaccgccgatgggaagctgacggccgaacagggccacaacgtgaccctgatggtgcagctggaagagggagacgtgcagcgcacacttatccaggtcgactttggcgacggcattgccgtaagctatgtgaatctctcttcgatggaggacggtattaagcatgtctaccagaacgtgggcatctttcgcgtcaccgtgcaggtggacaattcgctcggcagcgacagtgccgttctgtatctccacgtgacttgccccctggagcacgtgcacctgagtttgccctttgtcacaactaaaaataaggaggttaacgctaccgccgtgctttggccctcccaggtgggcacattaacatacgtgtggtggtacggtaataacaccgaacctctgatcacgctggaagggtccatctccttccggttcacctccgagggcatgaacactattacagtgcaggtgagcgccggaaatgccattctgcaggacaccaagactattgctgtttatgaggaatttcggtctttgaggctctcattctcacctaacttagatgactataatcccgatatccccgaatggagacgggacattggaagggtcataaagaaatctcttgtggaagccaccggtgttcctggccagcacatcctcgtggcagttctgccgggcttacccactaccgctgagttgttcgtgctgccgtaccaggaccctgccggagaaaataagagatctactgacgatctagaacagatatccgagttgctcatccacaccctgaaccagaatagcgtgcactttgaactcaagccaggggtaagggtgctggtccacgctgctcacctgacagccgcacccctcgtagacctgacgcctacccacagtggttccgcaatgctgatgcttttgagtgtggtgttcgtggggctggcagttttcgttatctacaagtttaagcggaaaattccgggtatcaacgtttatgcccagatgcaaaacgagaaggaacaggagatgatcagcccagtcagccactctgagagcagacccaacgtgcctcagaccgagctgcgtcggcccggtcagctcatcgatgagaaggtggagtcacagctgatcggcgagtag

SEQ ID NO: 135747 - DNA, 642 bp, synthetic construct
  misc_feature 1..642: note = Description of Artificial Sequence: Synthetic coding sequence
  source 1..642: mol_type = other DNA
tgactagatgattacaacccagatattcctgagtggaggagagacataggccgggttataaagaaatcccttgttgaggccacgggggtgcctggtcaacacatactggtggcagttctgcctggtcttcccaccaccgccgagctctttgttttaccataccaggacccagcaggggagaataaacgctctacagacgacctggagcagatctccgaactgctgatccatacccttaatcagaacagcgtgcacttcgaacttaagcctggagttagggtgttggttcacgcagctcacttgacagctgctcccctggttgatctgacccctacgcatagcgggtccgctatgctgatgctcctgagcgtcgtatttgtgggcttggcggttttcgtgatatataaatttaaacgcaaaattccaggaataaacgtgtacgcgcaaatgcaaaacgagaaggagcaggaaatgattagcccggtgtcccactccgagagcaggccaaatgtgccacagaccgagcttcgtcgcccaggccagcttattgacgaaaaagtcgagtctcaactcatcggatccattagtatcgtggctgagaatcagagcaccaaggagattcccacatacgttaacgtgtag

SEQ ID NO: 135748 - DNA, 3009 bp, synthetic construct
  misc_feature 1..3009: note = Description of Artificial Sequence: Synthetic coding sequence
  source 1..3009: mol_type = other DNA
atgggaaaagtgctagagagcagcctttggagaagcagcgattttgggacaagctacaccaagctgacactgcagcccggggtaaccacagttatagacaacttttacatatgcccaaccaacaaaagaaaagtgatcttggtgagcagttccttatctgatagggatcagtctttgttcctgagcgctgacgaaggcgccaccttccaaaagcagcctattccgttctttgtggaaacactgattttccaccctaaggaggaagacaaggtgctcgcatacacgaaggagtctaaattgtatgtaagctcggacctgggcaaaaagtggactctgttacaggaacgggtgactaaagatcacgtgttttggagtgtttccggggtggatgccgatcccgacctggtccacgtggaggcgcaggatctcggcggagacttccgttacgtgacctgcgcaattcacaactgctcggagaagatgctgaccgctccatttgcgggacctatcgaccacggcagcctgaccgttcaggacgattacatcttcttcaaggccacttccgccaatcagacaaaatattatgttagctaccgcaggaatgagtttgtgctcatgaagctccccaagtacgctctcccaaaggatctccaaattatcagcacagacgagtcccaggtgttcgtagccgtccaggagtggtaccagatggatacgtacaatttataccagagcgatcccagaggagttaggtatgccctggtgttacaggacgtacggtcgagtcggcaagctgaggagagcgtattgatagatattctcgaggtgagaggggtaaagggagtatttctggccaaccaaaaaattgacgggaaggtgatgaccctgatcacctacaataaaggccgagattgggattatttaaggccaccttcaatggatatgaacggaaaaccaacaaattgtaagccacctgactgccacctccaccttcacttgaggtgggctgacaatccttacgtttccggaaccgtacatacgaaggacaccgccccaggcttgattatgggagcgggcaacctcggatctcagttagtcgagtataaagaagaaatgtacatcacctccgattgcggccatacatggcgtcaggtgtttgaggaagaacaccatatcctatatctggaccatggcggcgtgattgtggcaatcaaggatacatccattcccctgaagatcctaaaattttccgtcgacgagggtctgacctggtccactcataactttacctctacttccgtctttgtggatgggctgctttctgaacctggcgacgaaacgctggtcatgaccgtatttgggcacatcagttttcgctctgattgggaactggtcaaagtggatttccgtccatccttttctaggcaatgtggcgaggaagattactcttcttgggagctctccaatctacagggcgataggtgcataatgggacagcagcgatcattccgcaagaggaagtccacctcttggtgtatcaagggccgtagcttcacctctgctctgacttcaagggtctgcgaatgcagagattctgattttctgtgtgattatggcttcgagaggagcagcagttctgagtccagcactaataaatgttccgccaacttttggtttaacccgttgtctcctccagacgattgtgctctgggacagacgtacacatctagtttgggataccgcaaggttgtttccaacgtctgcgagggcggcgttgatatgcaacagagtcaggtgcaactccaatgccctctgacccctcctcggggtttacaggttagcattcagggagaagctgtggcagttaggcctggtgaggacgttctctttgtagtgaggcaggaacagggggacgtgctgacaaccaagtatcaggtggacctgggtgatgggtttaaggcaatgtacgtgaacttgacactgacgggggagcccatccgtcataggtatgagtcccctggcatctacagggtttccgtgcgagctgagaatactgccggtcacgatgaggcagtcctctttgttcaggttaatagccccctgcaggcgttatacctagaagtcgtgccagtgattgggctcaatcaagaggtgaatctcaccgctgtgctgctccctctaaatcctaatctgaccgtgttttactggtggatcggacacagcctgcagccgctcctctctctggataatagcgtgacgactagattctctgacacaggagacgtgagggtgacagtccaggccgcttgcggcaatagcgtcctgcaggacagtcgcgtactcagagtcctggatcagttccaggtcatgccactgcaattctcaaaagagctcgacgcttacaaccctaacaccccagaatggcgggaggacgtcggattggtcgtgacacggttgcttagtaaagaaacctccgtccctcaggaactactggttacggtggtcaagcctgggctgcctactctcgctgatttgtatgtgcttcttcccccaccacgtcccactagaaagagatctctcagcagcgacaagaggctggccgcaatccagcaagtgctgaacgctcagaaaattagtttcctgttacgtggcggggttagagtcctcgtggccctgcgcgatacgggcacaggggccgagcagctgggggggggcggcggctactgggctgtggtggtgctgtttgtgatcggtctgttcgccgctggtgcgtttattctctataaattcaagagtagaaagcggcccggacgaaccgtgtacgcacagatgcacaatgaaaaagagcaggagatgacgagtcccgtgtctcatagcgaggacgtccaaggggctgtgcagggagaggaatttatcgacgacgacctagattcacaaacattagggaaccatagtggtgtcgtgctgtccatcaattctcgagagatgcactcttatctcgtgagctag

SEQ ID NO: 135749 - DNA, 3480 bp, synthetic construct
  misc_feature 1..3480: note = Description of Artificial Sequence: Synthetic coding sequence
  source 1..3480: mol_type = other DNA
atggcccatcggggtccctctagggccagcaaaggcccgggccccacggcccgggcgccctcccccggcgccccccctcctccaagatcacctcgctctcggcctctgctgctgcttctcctgcttctgggtgcttgtggtgccgcaggccgctctccagagccaggcaggctgggccctcacgcccagctcacacgcgtccctagaagccccccagctgggcgggccgaacctggaggaggagaagacagacaggctcggggtaccgagcccggagctcccgggcccagccctggccctgctccaggaccaggtgaggatggggcccctgccgccggatatcgccgctgggagagagccgcccccctggcaggtgtggccagccgcgcacaggtctccctgatttctactagcttcgtgctgaaaggagatgccacccacaatcaggccatggtgcactggacaggggaaaatagctcggtgatcctgatattgactaaatactaccacgccgatatgggaaaggtcctcgagtcttctctctggagaagtagcgactttggaacttcatataccaaactgacactccagcccggagtcaccacagtcatcgacaacttttacatttgcccaactaacaagagaaaagtgatccttgtatccagctctttgagcgacagggatcagtcccttttcctgagcgctgatgaaggggcgaccttccaaaaacagcctatccctttcttcgtagagactctgatctttcaccctaaggaggaagacaaggtattggcatataccaaggagtctaagctttacgtttctagcgacttaggcaagaagtggaccctcctgcaggagcgggtgactaaagatcacgtgttttggtccgtctccggtgtggacgccgatcctgacctcgtacatgtagaggcccaggacctagggggggattttcgctacgttacctgtgcaattcacaactgcagtgagaagatgctgactgcacccttcgccgggcctatcgaccacggctcacttactgtccaggatgattacatcttttttaaggctacttccgctaatcaaaccaagtattatgtgagctatagacgaaacgaatttgtgctcatgaagttgcccaaatacgcgctccctaaagatcttcagattatcagcacggacgagtcacaggttttcgtggcggttcaagaatggtatcagatggacacgtataacctctaccagagtgaccctcggggtgtgcgctacgctctcgtgctccaggatgttcgctcatccagacaggcggaagaaagtgtcctgattgacatcttagaagtgcgaggggttaagggggtcttcctagcaaatcagaaaattgacgggaaagttatgaccctaatcacatacaataagggacgcgactgggactatcttaggcctccatccatggatatgaatgggaaacccacaaattgtaaaccgccggactgtcatctgcatctccatttacgttgggcggacaacccgtacgtgagtgggactgtacataccaaggacacagcgcctggcctcattatgggggcagggaatctcggaagtcaattggttgagtacaaggaggagatgtacatcacgagcgattgcgggcacacttggagacaggttttcgaggaagagcatcatatcctctacctggatcatggaggagtgatcgtggctatcaaagacacctccattcccctgaaaatcctgaaatttagtgtggatgaaggcctgacctggagcacccataattttacttccacatcagtcttcgttgacggtctcctgagtgagccaggggacgaaaccctggtcatgacggtttttggacatatctctttcaggtccgattgggaattagtgaaagtggactttcgtccatccttttctagacagtgcggagaagaggattattcaagttgggagctgtccaacctgcagggagataggtgcataatgggccagcagaggagcttccgcaaacgcaaaagcacatcttggtgtatcaagggaagaagcttcactagtgccctcacatcacgcgtatgtgagtgtcgcgacagtgatttcctgtgcgattatgggtttgagaggagcagttccagcgagtcctccacaaacaaatgctcagctaatttctggtttaatccactgtcaccgccagacgattgcgccttgggacagacgtataccagcagcctcggttatcggaaagtggtgtctaatgtttgtgagggtggcgtggacatgcagcagtctcaagttcagctgcaatgccccctcactcctccgagggggctacaggtgtcaatacaaggcgaggcggttgcggttcgacccggagaggatgtcttgtttgtggtgagacaggagcagggagatgttctaaccaccaagtatcaggtggacttgggtgacgggtttaaggccatgtacgtgaacctgaccctcacgggcgagcccatacgtcacaggtatgaatcacccggcatttaccgtgttagcgttcgcgcggaaaacacggctggccacgacgaagcagtgttgttcgtccaggtcaacagccccctccaagctctgtaccttgaggtggtccctgtgattggtttaaaccaagaggtgaatcttacagccgttctgctgcccctgaacccaaatcttacagtcttttattggtggattggacatagccttcaaccgttgctatcccttgataacagtgttactacaaggttcagcgatactggagatgtccgcgttaccgtacaggcagcctgcggcaactctgtcctgcaagatagtagggtactccgcgtgctggatcagtttcaagttatgccactgcagttttctaaagaactcgacgcctacaacccaaatacccccgaatggcgtgaggatgttggattagttgtcactaggctgctgtcaaaagagacaagcgtacctcaagagttactcgtaacagttgttaaaccgggacttcccacgttagctgacttatacgtcttactgccacctcccagaccaacccggaaacggagtctgtcctccgacaagcgcttggccgcaattcagcaagtgctcaacgctcagaaaattagtttcctcttaaggggcggggtcagagtgctggtggccctgagggacacaggaacaggtgctgagcagctgggtggcggcggaggctattgggccgtcgttgttctgtttgtaattggcctcttcgcagccggtgcattcatactctacaaatttaagagaaagcgccccggccgtaccgtgtatgctcagatgcataacgagaaggagcaggaaatgacatcacctgtctcccattctgaggacgttcagggtgccgtgcaaggaaaccactccggcgtcgtgctaagcataaatagtcgcgagatgcactcatatcttgtcagttag

SEQ ID NO: 135750 - DNA, 594 bp, synthetic construct
  misc_feature 1..594: note = Description of Artificial Sequence: Synthetic coding sequence
  source 1..594: mol_type = other DNA
atgggggagcggaagatcttcaagaagaggaaacctggcgcccagtgcgccctggggagagatcactcaggcagcgttgtctccgaaccctgtgtgtgtgctaactgggacttcgagtgcgattacggttacgagcgccacggtgagagccagtgcgtgcccgctttttggtacaaccccgcatctccatctaaggactgttctctcggtcagtcatacctgaattctaccgggtacagacggatagtgagcaacaattgcacagacggactgagagagaagtataccgcaaaagcgcaaatgtgtcccgggaaagctcctcggggcttgcacgtagtgacaaccgatggccgcctggtagcggaacaggggcataacgcaaccttcataattctgatggaagagggggacctgcagcgcaccaacattcaactagatttcggggacggaatcgctgtgagttacgccaacttttcccccatcgaagacggaatcaaacacgtatataagagcgcaggcatcttccaagtgactgcttacgccgagaacaaccttgggagcgacaccgccgtgctgttcctgcatgtggtgtag

SEQ ID NO: 135751 - DNA, 3669 bp, synthetic construct
  misc_feature 1..3669: note = Description of Artificial Sequence: Synthetic coding sequence
  source 1..3669: mol_type = other DNA
atggaggcagctcggactgaacgacctgccggcaggccaggggccccactggtcagaacaggcctcttgctgttgagcacatgggtgctagcaggtgcagaaatcacctgggacgcaacaggcggccctgggcggccagcggcaccagcgtcaaggcctcctgccctgagtcccctgtcaccccgagcagttgcgagccagtggcctgaagaactggcatcagctaggagagccgctgtcttgggcagaagagccgggccagagcttctgcctcagcagggtggcggacgtggtggtgaaatgcaggttgaggccgggggcaccagccccgccggcgaaaggagagggagaggaatccccgcccctgctaaacttgggggagctagaaggtccaggagagctcagccccccattacacaggagaggggtgatgcatgggctactgcccctgccgacggtagcaggggctccagacccctggcaaaaggctccagggaggaggtgaaagctcccagagccggaggcagtgccgctgaagatttacgcctgcctagtacatctttcgcactcactggcgactcagcccacaatcaagccatggtccactggagcggacacaactctagtgtaatattgatcttgacgaagttatacgactttaacctggggtccgtgactgaaagctcactgtggcggtccaccgattacgggacaacatatgagaaacttaatgataaggtagggttgaagacagttctatcctacctgtatgtgaatccaacaaacaaacggaagataatgcttttgtccgaccccgaaatggagtcctcaattctcataagcagcgatgaaggagctacgtatcaaaaatataggctgaccttctatatccaaagcctcctgttccaccccaagcaggaagactgggtgctcgcttatagcctagatcagaagctgtactcatctatggacttcggcagacggtggcaattaatgcatgagaggatcacccctaataggttctactggtccgtggccggcctagacaaggaggctgatcttgtccatatggaggtgagaacgacagatgggtacgcccactatctcacctgtaggatccaagagtgtgcagagacgaccagatccggtccattcgcccggtccatagatatctcctccctggttgtacaggacgagtacatctttattcaggtgaccacaagtgggagagcaagctattacgttagctaccgcagagaggcctttgcacagatcaagctccctaaatatagcctgcccaaggacatgcacatcatatccaccgatgagaatcaggtgtttgccgctgtccaggaatggaaccagaatgatacctacaacctgtacatttccgatactcggggaatctactttaccctagccatggagaacatcaagagttcccgcgggctgatgggaaatattattatcgagttgtacgaggtggcgggcatcaaaggcattttcttggccaataagaaggtcgacgatcaggttaagacatatataacctataacaaagggcgggattggaggttgcttcaggctccagatgtggatctgcgcggcagcccggtgcactgccttcttcccttctgttctctgcatcttcacttacaactttcagagaatccgtattcctccggtagaatcagcagcaaggagacagccccaggccttgtagtcgccactggtaatatcggccccgaattgtcctacaccgatattggtgtattcatatcttccgatggcggaaacacgtggcggcagatcttcgatgaggagtataacgtctggtttctcgattgggggggcgccctggtggccatgaaacacacaccactcccggtgcggcatctttgggtctcattcgatgaaggtcacagctgggataaatacgggtttaccagcgtacctctgttcgtggatggagccctagtggaggctgggatggaaacccacataatgacagtattcgggcatttctccctgaggagcgagtggcagcttgtaaaagtggattacaagtcaatcttctccagacactgcaccaaggaggattaccagacgtggcacctcctgaaccagggggagccctgtgtcatgggcgagcgaaaaatttttaaaaaaagaaagcctggggctcagtgtgccctaggcagagaccactcaggaagcgtggtgagtgaaccctgtgtgtgtgccaattgggacttcgagtgtgattacggctacgagcgccacggggagtctcagtgtgtccccgccttttggtacaacccagcctcccctagcaaagattgcagcttgggtcaatcgtatctgaacagcacgggctacaggcgcatcgtatccaataattgcactgacggcctgcgtgagaagtatacagcgaaggcccaaatgtgcccaggcaaagcccccaggggcctccacgtggtgaccaccgacggtcggctcgtcgcggagcaggggcacaacgccacattcatcatactgatggaggagggggatctccagagaactaacattcagctcgactttggtgatggtatagccgtgagctacgctaatttctcccctatagaggatggaataaagcatgtgtacaagagtgcagggatctttcaggttaccgcatacgcagagaacaatctgggctccgataccgcagttcttttcttacacgtggtatgtcctgtagagcatgtacacctcagggtgccgtttgtggctattagaaacaaagaggtgaatattagtgccgtggtatggccttcccagttagggactctgacttatttctggtggttcgggaacagcacaaagccactgatcacccttgactcttcaataagcttcacatttcttgcggaaggcacagatactataactgtgcaggtggcagccgggaacgctctgattcaggataccaaggaaatcgctgtgcatgagtactttcagagccagcttctgagttttagtcctaacctggattaccataaccccgacattccagaatggcggaaagacataggcaatgtgattaagcgagccctggtgaaagtgacatcagttcctgaggatcagattctcatcgctgtattcccagggctgccgacttccgcagagctgtttattctgcctccaaagaatctgacagaaagaagaaaaggaaatgagggagacctggaacagatcgtggaaaccctcttcaatgctttaaatcaaaacctagtccagtttgagctgaaaccaggcgttcaagtgatcgtgtacgtcacacagctgacccttgcgccgctggtggactcatccgcggggcactcatcttccgctatgctcatgctactgtctgtagttttcgtaggcttggcagtgttcctgatttataagttcaaacgcaagattccttggattaatatctacgcccaggtccagcacgataaagagcaggagatgattgggagtgtctctcagagcgagaacgcccccaaaattactctgtccgatttcactgagcctgaggagttactggacaaggagttggatacccgggtaataggcgggattgccactattgccaactctgagtcaacaaaggagattccaaactgtacttcagtgtag

SEQ ID NO: 135752 - DNA, 462 bp, synthetic construct
  misc_feature 1..462: note = Description of Artificial Sequence: Synthetic coding sequence
  source 1..462: mol_type = other DNA
gagaacccctattcaagcggccgcatcagcagtaaagagaccgcgcccggtctggtggtggccaccggtaacattgggcctgagctatcctacactgacatcggggtttttatttcctccgacggcggcaacacttggcggcagatttttgacgaggagtataatgtatggttcttggattgggggggtgcactcgttgctatgaaacacaccccactgccagttcgccatctttgggtgagcttcgacgaggggcacagttgggacaagtatggtttcactagtgtacccctttttgtcgatggagccctggtcgaggccggcatggagactcatattatgaccgactatggctatgaacgtcacggcgagagtcagtgtgttccagcgttctggtataaccctgcgtctccctccaaagattgcagtttgggtcagtcctaccttaacagtacgggatag

SEQ ID NO: 135753 - DNA, 1410 bp, synthetic construct
  misc_feature 1..1410: note = Description of Artificial Sequence: Synthetic coding sequence
  source 1..1410: mol_type = other DNA
atggggaccgtccatgcccggagccttgaaccgctgcccagcagtggcccagacttcggcggattgggggaggaagctgagttcgtcgaagtggagcccgaggctaaacaggagattctcgagaacaaggacgtggtcgtgcagcatgtacattttgacggactgggcaggacaaaagacgacattattatttgtgaaattggagacgtctttaaggccaagaatctgatcgaggtaatgagaaagagccacgaggctcgggaaaagctccttagacttggcatctttcggcaagtcgacgtcctgatcgatacctgccaaggagacgatgcactccctaatgggctcgatgtgacatttgaagtgactgaactgcgacggctgacaggtagctataataccatggtgggcaataatgaagggtctatggttttgggtctgaaactcccaaatctgttaggtcgtgccgagaaggtgacattccaattctcctacggcactaaggaaacctcctacggtctctccttctttaagcctcgcccaggaaactttgagaggaatttctccgttaacctgtacaaggtgactggtcagtttccttggagttctctgcgcgaaacggatcgcgggatgtctgctgagtactctttcccaatatggaagacatcccatactgtcaaatgggaaggagtgtggcgagagctgggttgcctcagcagaaccgcttcatttgcagtgaggaaagaatctgggcacagtctgaaaagtagcttgtcgcacgccatggtaattgacagcagaaatagcagcattctcccacgcagaggtgcccttctgaaggttaatcaagaattggctggctacactggcggagatgtgagcttcatcaaagaggacttcgagctgcaactgaacaagcagttgatttttgactcagttttcagcgcttccttttggggaggaatgctggtacccattggtgataaaccgagcagtatcgccgaccgtttctatcttggcggaccgacttctattcgtgggttttcaatgcactctatagggccacagagcgagggcgactatctcggcggtgaggcctactgggccgggggcctgcatctgtacactccgctcccttttcgacccggccaaggtggatttggggaactgtttaggacacactttttccttaacgccggaaacctttgcaatctcaactatggagagggaccaaaagctcatatcagaaaactggccgaatgtattcgatggagctacggcgccggaatcgtactgaggttgggaaacatcgcaagacttgaattaaactactgcgtgcccatgggtgtccagactggagaccgaatttgtgacggcgtgcagtttggtgctggaatacgattcctttag

SEQ ID NO: 135754 - DNA, 780 bp, synthetic construct
  misc_feature 1..780: note = Description of Artificial Sequence: Synthetic coding sequence
  source 1..780: mol_type = other DNA
atgagtgccgaatattcttttcctatttggaagacctcacacactgttaaatgggaaggagtgtggagggagctggggtgtctgagtcgaactgcaagcttcgccgtgcggaaagagagtggccactctctgaagtcgtcactctcccacgcaatggtgattgattctaggaacagctcaatcttgcctagacgaggggctttactgaaggtgaatcaggagctggctggttataccggcggcgatgtcagttttattaaggaggacttcgagctgcagctcaacaagcagctcatttttgattccgtcttctcagcatctttttggggggggatgttggtgccaattggagataaacccagcagtatcgcggacaggttttaccttggcggtcccactagcattcggggatttagcatgcatagtattggaccacagtcagaaggagactaccttggcggagaggcttattgggctggcggacttcacctatatactcccctgccattccgtccaggacaaggggggttcggggagctgttcagaactcatttctttcttaacgccggaaatctgtgcaacttaaattacggcgaaggccccaaagctcatatccgtaagttggcagaatgcattaggtggtcctatggggccgggattgtgctgaggctgggaaatatcgctcgacttgagctgaactactgtgtgcctatgggggtacaaacaggagaccggatttgcgatggagtgcagtttggcgcaggcattaggtttttatag

SEQ ID NO: 135755 - DNA, 1425 bp, synthetic construct
  misc_feature 1..1425: note = Description of Artificial Sequence: Synthetic coding sequence
  source 1..1425: mol_type = other DNA
atggcctctgggggagggggatgcagcgcaagcgagagattaccccctcccttccccggcttggagccggaatccgagggtgcggcaggtgggtccgagccagaggccggcgacagcgataccgaaggcgaagatatcttcacaggagccgccgtggtgtctaagcaccagagccccaaaattactacttcactcctccctataaacaatggtagtaaagagaatggaatccacgaggagcaagatcaagaacctcaggatctcttcgccgacgccaccgtggaactcagcctcgactccactcagaataaccagaaaaaggtgctggccaaaaccctcatctctctacccccacaggaagccaccaactcttctaaaccacaaccaacatacgaagagctggaagaggaggaacaggaggatcagttcgatctcactgtaggaatcaccgatccagaaaagattggcgacggtatgaacgcttacgttgcctataaagtcactacccaaacatccctccctctgttcagatctaaacagtttgctgtcaagcggcgcttttctgattttctgggtctttacgagaaactgagcgaaaagcactcgcaaaatggtttcattgttcctcccccacctgagaagtccctgattggcatgaccaaagtcaaggtagggaaggaggattcctcttctgctgagtttctcgagaaacggcgggcggccctcgaaagatacctgcagaggattgtgaatcacccgacgatgttgcaggatcctgacgtacgggagttcctggagaaagaggagctgccaagagccgtggggacacagactttgtccggagctgggctgctgaaaatgtttaacaaggcgaccgacgcagtgagcaagatgaccatcaagatgaacgagtcagacatttggtttgaggaaaaactgcaggaagtggagtgcgaggagcagcgcctccgtaaactgcatgctgttgtggaaaccctcgtcaatcaccggaaggaattagccctgaatacagctcaattcgcgaaaagtttggctatgttgggcagctcagaagacaatacagcactaagcagagccctatcccagttggctgaagtcgaagagaagatcgaacaattacaccaggaacaagcaaacaacgacttttttcttctcgcggagctgttgtctgactacatccggctcttggcaatcgtgaggtgggagtcgcgggttacacagtacgagcgagattttgagcggatctctaccgtcgtgagaaaggaagtcattaggttcgagaaggaaaagtcaaaagatttcaagaatcacgtaattaaatatctggaaacgctactttactcccaacagcagctcgcgaaatattgggaggcctttctccctgaagcaaaggctatctcttag

SEQ ID NO: 135756 - DNA, 1569 bp, synthetic construct
  misc_feature 1..1569: note = Description of Artificial Sequence: Synthetic coding sequence
  source 1..1569: mol_type = other DNA
atggcaagcggaggaggcgggtgtagcgcttctgagcggcttcctccgcctttccctggactggagcctgagagtgagggggccgctggtggaagtgaaccagaagccggagattccgacactgaaggggaagatatctttacaggcgctgcagttgtttcgaaacaccagagccctaagattacgacctccctcctgccaattaataatgggtccaaggagaacggcattcatgaggaacaggaccaggaaccccaagacctattcgctgacgcaaccgtggaactgtctctggattcgacacagaataatcagaagaaggtcctggcaaagaccctgatctctctaccgcctcaggaagcgacaaactcttccaaaccacagccaacatatgaggagctcgaggaggaggagcaagaagatcagttcgacctgacagtcgggatcacggatcccgagaagattggagatggcatgaatgcttacgtggcatataaagtcacaacgcaaacatccttacccctattccgcagcaagcagtttgcagtaaagcgccggttctctgactttctggggttgtatgaaaaactaagtgagaagcactctcagaacggcttcatagttcctcctccaccggaaaagtcattgatcggcatgaccaaagtgaaagtcgggaaagaagacagcagcagcgctgagttcctagagaagcggcgcgctgccctggaacgatatctgcagcggatcgtgaaccacccaaccatgttgcaggaccctgatgtgagggagttccttgaaaaagaggaattgccgagagccgtgggcactcaaacattgtctggagctggcctcctaaagatgtttaataaagccactgatgcagtttctaaaatgacaataaaaatgaatgagtcagatatctggttcgaggaaaaactacaggaggtagaatgtgaagagcagcgcctgcgcaaacttcacgctgttgtcgagacactggtgaaccaccgcaaggagctcgccctaaacactgcccagttcgccaagagcctcgccatgctgggatcctcagaggacaacacagcactgtcgcgcgccctgagccaactggctgaggttgaagaaaagatcgagcagctgcaccaagaacaagcaaacaatgattttttcctgctggccgagctcctgtctgactacatacggctacttgctattgtgagggccgccttcgaccagcgtatgaagacatggcagcgctggcaggacgcacaggccaccttgcagaagaagcgggaagctgaggctaggctgctatgggccaataaaccagataagctgcaacaggccaaagatgagattcttgaatgggagagcagggtgactcagtatgagagagatttcgagcgtatctccactgtcgtgagaaaagaagtcatcaggttcgaaaaagagaaatctaaggactttaagaaccacgtcataaagtacctggaaactcttctttactcacaacagcagctggccaaatactgggaagctttcctgcccgaagcaaaagccataagctag

SEQ ID NO: 135757 - DNA, 1374 bp, synthetic construct
  misc_feature 1..1374: note = Description of Artificial Sequence: Synthetic coding sequence
  source 1..1374: mol_type = other DNA
atggcaagcggcgggggcggctgcagcgcaagcgagcgacttccaccgcccttccctggcctggaaccggagtctgagggcgccgctggcggaagtgagccagaggccggggacagtgatacagagggcgaggatattttcaccggcgcggcagtggtaagcaaacaccagtcaccaaaaataaccaccagcctgctaccaattaataacggctctaaagaaaacggaatacatgaggagcaggaccaggaaccgcaggacctgtttgctggtgatggtatgaacgcctacgttgcttataaggtgaccacacaaacttcccttccgctgtttcgcagcaagcagtttgcagtaaagaggcggttttcggatttcctcggcctgtacgagaagctcagtgagaagcacagtcagaatggatttatcgtgcccccaccacctgaaaagagtcttatagggatgaccaaggtgaaagtgggaaaagaggatagcagcagcgccgagttcttagaaaaaagaagggcagccctagagcgctacctccagcggatagtaaatcacccaaccatgctgcaggaccctgatgtgcgggaattcttagagaaggaagagctcccacgagcagtcggcacccagaccctgagcggtgccggcctgttaaagatgttcaacaaggctactgacgctgtaagtaagatgacaattaagatgaacgagtcggatatatggttcgaagaaaaactccaggaggtcgagtgcgaggagcaaagactaaggaagctgcacgcagtggtggagaccctggtgaaccaccgcaaagagctcgctctaaacaccgcccagtttgctaaatccctggccatgttaggcagcagtgaggataacactgccctgtccagagcgcttagtcagttagccgaagttgaagagaaaattgaacagttgcaccaagaacaggctaataacgacttttttctgcttgctgagctgctctccgactatatcaggctgctggctattgtgcgtgccgcattcgaccaacgcatgaagacttggcagcgctggcaagatgcgcaggctactctgcaaaaaaagcgagaggccgaggctcgactgctatgggccaataaacctgataagctacagcaggccaaagatgagattctggagtgggaatctagggttacccagtacgaaagagattttgaacggatctccaccgtggtcagaaaggaggtgatccgctttgaaaaggaaaaatctaaagacttcaagaaccatgtaatcaaatatttagagaccttgctctattctcagcagcagcttgcaaaatactgggaagcttttctgcccgaagccaaagcaatctcctag

SEQ ID NO: 135758 - DNA, 1374 bp, synthetic construct
  misc_feature 1..1374: note = Description of Artificial Sequence: Synthetic coding sequence
  source 1..1374: mol_type = other DNA
atggcatccgggggcgggggctgttccgccagtgagagactcccaccgccattccccggtttggaaccagagtctgaaggcgctgctgggggctccgagccagaggccggagattccgacaccgaaggcgaagacatttttactggagccgcagtggtgtctaagcaccaaagtccaaagatcaccacaagcctgttgcccatcaacaacggttcaaaggaaaacggaatacacgaggagcaggaccaggagccccaagacctgttcgccggagatggcatgaatgcttacgtcgcttacaaagtcactacacagaccagtctgccactatttagaagcaaacaatttgcagtgaagagaagattttccgatttcctgggtctctatgagaagctctctgagaagcactcacagaatgggtttattgtgccgccacctcctgagaaaagtctgataggaatgaccaaggtgaaagtgggcaaagaggacagctcgtccgcagaatttttggaaaaacggcgggccgccctagaacgatatctccagcggattgtgaatcatcccacgatgttgcaggacccagacgtgcgcgagttcctggagaaggaggagctgcctcgcgcagtgggcacacaaactctgtccggcgccggcttgctcaagatgttcaataaagctactgatgcagtgtcgaagatgacgatcaaaatgaatgaatcagacatctggttcgaggagaagcttcaggaggtcgaatgcgaggagcagcgccttcgaaaactccacgcagtggtggaaactctggtgaatcacaggaaagaattggcattaaacaccgcacagtttgcaaagtccctggcaatgcttggcagttccgaagacaataccgcactgtctagggcactgtctcagttggccgaggttgaggaaaaaatagaacagctccaccaggagcaggctaacaacgactttttcttattggcggagctactatctgactacattcgtctgcttgctatcgtgcgcgctgcctttgatcagcgcatgaagacatggcagcgatggcaagatgcgcaagctaccttgcagaagaagcgagaagctgaagcacgtctgctgtgggccaataaacctgataagctccagcaggcaaaagatgagattttggaatgggaatcaagggtcacacaatacgagagggatttcgaacggatctctaccgtggtccgcaaggaagtgattcgctttgaaaaagagaaatcaaaagattttaagaaccacgtgattaagtacctagaaacactgttgtattcccagcagcagctggcaaaatactgggaagcattcctgcccgaagcaaaagccatctcctag

SEQ ID NO: 135759 - DNA, 3018 bp, synthetic construct
  misc_feature 1..3018: note = Description of Artificial Sequence: Synthetic coding sequence
  source 1..3018: mol_type = other DNA
atggccgcgagacctagtcgcgctaccggcccacgagggggacaacgaagtcgagtcaaacccccccctggtcgccgtttgaaggaacagctgccgcccctggccgctgcgcgcgctgtgtttgctgctgccacagctgtcataatgctaaccgaagcctcactgagtatctggggctggggctccctcggcatcgtcctgttccttatcacatttgggccctttgtgatcttttacctaaccttctatattctgtgtttcgttgggggcgggttggttgtgaccctgcttttcggcaaaacgaactccgagaagtatctggaacagtgcgagcattcatttctgccaccgacatctccgggggtccctaaatgcctcgaagagatgaagcgggaagcccgaactatcaaaatagatcgtcgcttaaccggcgctaatatcatcgacgaacctctgcagcaggtaattcaattctccctgcgcgattacgtccaatattggtactatactttgtctgacgatgagagttttctgctcgagatcagacaaactctccagaacgccctcatccagttcgccacaaggtctaaagagatcgactggcagccttacttcaccaccagaattgtcgatgatttcggcacacatctgagagtctttagaaaggcgcagcaaaagattaccgagaaggatgaccaagtgaagggtaccgccgaggacctggtggacacgtttttcgaagttgaggtggagatggagaaggaggtctgcagagacctggtgtgcacatcccctaaagatgaggaagggtttctccgcgacttatgcgaggttttgctctatctgctactcccccccggcgatttccagaacaagataatgagatacttcgtgcgcgaaatcctagcacgggggatactgctaccacttataaaccagctgtcagacccagattacatcaaccagtatgtgatttggatgattcgggactctaactgcaattatgaagccttcatgaatattattaagttaagtgacaatataggagagctggaggcggtacgggacaaggccgccgaagaactgcagtacctacgatccctcgatactgccggggacgacatcaacacaataaagaatcaaattaactcactgctgttcgtcaagaaggtgtgcgactctagaatccaacggctgcagtctgggaaagagatcaacactgtgaagcttgccgccaacttcggcaaactctgcacggtcccactcgactcaatacttgtggacaacgtggccctccagtttttcatggactatatgcagcagacaggcgggcaagcgcacctgttcttctggatgactgtagaaggataccgggtgaccgcccagcagcaactggaggtactactgagtagacaaagggatggtaagcatcagaccaatcaaacaaagggcctactgcgcgctgcagccgtgggaatctacgagcagtatctgtcggagaaggcctccccacgcgtaactgtggatgactatcttgtcgctaagctcgctgacactttaaatcacgaagatcccacccccgagatcttcgacgatattcagagaaaagtgtacgaactgatgcttcgcgatgaaagattctacccaagttttcgacagaacgctctatacgttcggatgctggccgagcttgacatgctcaaagacccttcctttcgcgggtccgatgatggcgacggtgagagttttaacggctccccgaccggaagtattaacctgtcactcgatgaccttagcaatgtgtcgagcgacgactccgtgcagctgcatgcctatatcagtgacacaggtgtgtgcaacgaccacggaaagacatacgccctgtacgccataaccgtgcacagacggaatctcaactcggaagagatgtggaagacatatagaagatacagtgacttccacgattttcatatgaggatcaccgagcaatttgaatcactgtcaagcatacttaaattgccagggaagaagacatttaacaatatggaccgtgattttctggagaagcgtaaaaaggacctcaatgcctacctgcagctgctgcttgcccccgagatgatgaaggcttcgcctgccctcgctcattatgtgtacgacttcttggaaaataaggcctacagtaaggggaagggggacttcgctcggaagatggatacttttgtcaacccactccgcaactccatgcgaaacgtctcaaacgctgttaaatcgctgccagattctcttgccgagggcatgactaaaatgagcgacaatatgggcaagatgagcgaacgcttaggacaggatattaaacagagcttcttcaaggtcccaccacttatccccaagactgattcagatccggaacacagacgggtttctgcccagctcgatgacaatgttgatgataatatcccactcagggtgatgctgctactgatggacgaggtttttgacctaaaggagagaaatcaatggttgcgtaggaatataaaaaacttattacagcagctcattcgtgcaacatacggggatactataaatcgcaagattgtggaccatgtagattggatgacatccccggagcaggtcgccgatagcgtgaagagattccgggacgctttttggcctaacggaattctcgcagaggctgtcccctgcagggacaaaagcatacgaatgcgtactcgcgtggccggaaaaactaaactgctggctataatgccagatgaactgaaacatataatcggagcggagacaactcgtaaaggcatcctgcgcgtttttgaaatgttccaacataaccaactcaacaggaggatggtctatgtcttcctggaaggctttctggagaccctatttccgcaatacaagtttcgggaactgtttaacaagctgcattcccggtccaaacagatgcagaagtataagcagaaactgcagaccacacaggctcccagtctgcagaaaagatag

SEQ ID NO: 135760 - DNA, 2874 bp, synthetic construct
  misc_feature 1..2874: note = Description of Artificial Sequence: Synthetic coding sequence
  source 1..2874: mol_type = other DNA
atgctgacagaagcaagtctgtctatctggggctgggggagtctgggcatcgtgcttttcttaatcacattcgggccctttgtgattttctacctgactttttatattctatgctttgtcggagggggtctcgtggtaaccttattattcgggaagacaaactctgaaaaatacctggagcagtgcgagcactcctttctgccacctaccagcccgggtgtccctaagtgtctggaggaaatgaagcgggaggctagaaccataaagatcgacagacggctgacaggagcgaatatcattgacgagcctctgcagcaggtcatccaattttcattacgcgattatgtgcaatactggtattacactctgagcgacgacgagagctttctgttagaaatccgccaaacactccagaacgcactgatccagtttgcaacccgctcaaaagagatcgactggcagccctatttcactacaagaatagtcgacgacttcggaacccacttgcgcgtcttccggaaagcccagcaaaagattactgaaaaagatgatcaggtgaagggtacagccgaggacctggtggatactttttttgaggttgaagtggagatggagaaagaggtgtgtcgggatctggtgtgcacaagtcccaaggatgaggaggggttcctgagggatctgtgcgaagtgctgttatatttgctgctcccacctggtgactttcagaacaaaatcatgcgatatttcgtacgcgagatcctggcccggggtatcctgttgccattgatcaaccaactgagtgacccggactatattaaccagtacgtgatctggatgatcagagattcgaattgcaattacgaggccttcatgaacatcattaagctgagcgacaatataggtgagctggaggccgttagggacaaagccgccgaggaattgcagtacttacgcagccttgacaccgccggtgatgatatcaatactatcaaaaaccagatcaactcattgctgtttgtgaaaaaagtctgcgattcgcggattcagcgtttacaatctggtaaagagattaacacagttaagctggccgccaattttggcaagctatgcacggtaccgttggacagcatactggtagacaatgttgccctacagttctttatggattacatgcagcaaaccggaggtcaggcgcacctctttttctggatgactgttgaaggatacagagtgactgcccagcaacagcttgaggtcctgctctcccgacaaagggatggtaagcaccagaccaaccagaccaaggggcttctgagggcagcagccgtcggcatttacgagcagtacctgagcgagaaggcgagtcctcgggttacagtggacgactacctcgtcgcgaagctggccgacacgctgaatcatgaggatccaacgccagaaattttcgacgacatacagagaaaagtttacgagctgatgctccgcgacgaacgcttttatccctctttccgacagaacgcactgtatgtgcgcatgctcgctgagttggatatgttaaaggatccatcattccgaggtagcgatgacggggatggggagtcctttaatggcagccccactgggtccatcaatcttagcctggatgacttaagcaacgtgtcaagcgatgatagcgtgcagttgcatgcttatatcagtgataccggagtttgcaacgaccatggcaagacatatgctctctatgcaatcaccgttcataggcgaaatctgaattccgaggaaatgtggaaaacttaccgcagatacagcgacttccacgattttcacatgcgtattaccgagcagttcgaatccttaagtagtatcttaaagttgcctggcaagaagaccttcaacaacatggaccgcgactttctcgaaaaacggaaaaaagatcttaacgcttacttgcaactgcttcttgcacctgagatgatgaaggcttctcccgctctggcgcattacgtttacgattttctagagaacaaggcctacagtaaagggaaaggggattttgcacggaaaatggacaccttcgtcaatccactgagaaattccatgcgaaatgtaagtaatgcggttaaaagtcttcctgatagtttggccgaaggcatgacaaaaatgtccgacaacatggggaagatgagcgaaaggctgggccaagacataaaacaatcattttttaaggtgccgccactaataccaaagacggactccgatcctgaacataggcgggtctctgcacagctagacgataacgtggacgataacatccctttaagagttatgctcctgctgatggacgaagtgttcgacttaaaagagcgtaaccagtggctgcgccgtaatattaagaacctcttgcagcagctcatccgtgccacttacggcgacacaatcaatcggaagatcgttgatcacgtagactggatgactagccccgaacaggtcgccgactctgtgaaaagattcagggatgcattttggccaaatggaatcctggccgaagcggtaccctgcagagacaagagcattcggatgcgcacccgtgtcgcagggaagaccaagctgttagctatcatgcctgacgagttgaagcacatcatcggcgcagaaaccactcgtaaagggatcctgcgcgtgtttgagatgtttcagcacaaccaacttaaccgacgcatggtctatgtgttcttggaaggtttccttgaaaccctgtttccccaatacaagttcagagagctattcaacaagctgcactcccgctccaaacagatgcagaaatacaaacagaaacttcaaacaacccaggcaccgagcttacaaaaacgctag

SEQ ID NO: 135761 - DNA, 771 bp, synthetic construct
  misc_feature 1..771: note = Description of Artificial Sequence: Synthetic coding sequence
  source 1..771: mol_type = other DNA
atgtcccggcaggctaaggatgactttctgcgacattatactgtgagtgacccaagaacacacccaaaagggtatacagaatacaaggtgacagcccagtttatcagtaaaaaggaccccgaggacgttaaggaagtcgttgtatggaagcgatattctgatttcagaaagctacacggtgacctcgcgtacacccacagaaacttgtttcggcggctggaagagtttcccgcattcccaagagctcaagtgtttgggagattcgaagcgtcggtgattgaggaacgccgaaaaggagcagaagacctcctacggtttaccgtgcacatccctgccctaaataattcaccacagttgaaagaatttttcagaggtggcgaagtgacacgaccgctcgaggtgagcagagaccttcatatcttgccacctcccctgatccccactcctcctccagacgatccgagattgtcacaactgcttccagccgaacgccgcggattggaggaactcgaagtccccgtcgaccccccgcctagctcccccgcacaggaagcgcttgatctactgttcaactgtgaatctaccgaggaggcctcagggagtcctgctaggggaccactgaccgaagcagagcttgctctgttcgacccctttagtaaggagggtgatccactcccagcacgccaggaaggagtcaaaaagaaggcagccgaatacttgaaaagggccgaagaaatccttcggctacatctctcccagctgccaccatag

SEQ ID NO: 135762 - DNA, 1029 bp, synthetic construct
  misc_feature 1..1029: note = Description of Artificial Sequence: Synthetic coding sequence
  source 1..1029: mol_type = other DNA
atgtcacgccaggctaaggacgacttcctgaggcattacacggtgtccgatccgagaactcaccctaaagggtatacagagtataaggtgaccgcccagttcatcagcaaaaaggaccccgaagatgtcaaggaggtggtggtttggaagcgctatagtgactttcgcaaactgcacggcgacttagcctatactcaccggaacctcttcaggagactggaagagtttcctgcctttcctcgcgctcaagtcttcggtcgctttgaggctagcgtgatcgaggaacgcagaaagggagctgaagatctcctcaggtttactgtgcatatcccagctcttaacaactctccccagcttaaggaatttttcagggggggtgaggtcactcgaccactcgaggtctcgagggacctgcacattctcccgccacccctcattccaacccctccaccagatgatccccgcctcagccagctgctgcccgctgagaggcggggcctggaagaacttgaggtacctgtggaccctccacccagtagtcccgcacaggaggcattggacctcttatttaattgtgaaagtaccgaagaagcttccggttctccagcacggggccccttgaccgaagctgaacttgctctgtttgatcccttctcaaaagaagaaggggctgctccttcaccaactcacgtagccgaactagcaacaatggaggtggaaagcgctcgactggatcaggaaccctgggaaccaggcgggcaggaggaggaagaggacggggagggcggtccaacccctgcttacctgtctcaggccacagagctgatcacacaggctctgcgtgacgagaaggccggcgcctacgcagctgccctacagggataccgcgatggtgtacacgttttattgcagggcgtaccttccgatccgctgcctgctaggcaggagggcgttaaaaaaaaggcagcagaatacctgaagcgggccgaagagattttgcgcctacacctttcgcagctgccaccttag

SEQ ID NO: 135763 - DNA, 1608 bp, synthetic construct
  misc_feature 1..1608: note = Description of Artificial Sequence: Synthetic coding sequence
  source 1..1608: mol_type = other DNA
atgagcgagggagagtctcaaaccgtcctgtcaagcggttcagatccaaaggtggaatcatcatcatctgcccccggattgacgagcgttagtccccctgtgacaagcacgacaagcgccgctagtccagaggaagaagaggagtccgaggatgagagcgagatcctggaagaaagcccttgcggtcgatggcagaagcgaagagaagaagtaaaccagagaaatgtaccaggaattgatagcgcatacctcgccatggatacggaagagggagtcgaggtcgtgtggaatgaagtacagttctctgagaggaagaattataaactgcaagaggaaaaggtccgcgccgtttttgataatctaattcagctggagcacttgaatatagtcaaatttcataaatattgggccgacattaaagagaacaaggcacgggtcatcttcatcacagagtacatgtctagcggctcactgaaacaattcctgaagaagaccaaaaaaaaccacaagactatgaacgaaaaagcctggaagcgttggtgcactcaaatcttgtccgctttgtcctacttgcactcttgtgaccctcccatcattcatggcaatctgacttgcgacaccatctttatacaacacaacggactgattaagattggaagcgtcgccccagatactattaataatcatgtgaaaacatgtcgggaagagcagaagaatctccacttttttgcacctgagtacggagaagttaccaatgtgactactgcggtcgatatctactcatttggtatgtgcgctcttgagatggcggttctagagatccagggcaatggagagtcttcatatgtgccgcaggaggcaatttcctctgcaatccagctgctggaggaccctttgcagcgggagttcatacagaagtgtttgcagtctgagccagctcggcgccccactgcccgcgaattactgttccatccggctctcttcgaggttccttcactcaagctgttggctgcacattgtattgtaggacaccagcacatgatccctgagaatgcactggaagaaatcaccaaaaatatggacacttccgccgtgttggcagagattcctgccggcccaggcagagagcctgtgcagacactctacagtcaatcccctgctctggagctggacaaatttctggaagacgttagaaacggcatttaccctttaaccgcctttggactacccagacctcagcagccgcagcaggaagaggtgacctcacccgtcgtccccccgtcagttaaaacacctactcctgagcctgctgaggtcgaaaccagaaaggtggtgctaatgcagtgcaatattgagagtgtggaggagggggttaagcaccacctgaccctgctacttaaactggaggataaactgaataggcacctgagttgcgatctgatgcccaacgaaaatattcccgagctggcggcggaactcgtccagctagggtttatttccgaggcagaccaaagtcgattaacatctctcttagaggagacattaaacaaattcaatttcgcccgcaacagcacactgaactccgccgcagtcacggtttcctcgtag

SEQ ID NO: 135764 - DNA, 1338 bp, synthetic construct
  misc_feature 1..1338: note = Description of Artificial Sequence: Synthetic coding sequence
  source 1..1338: mol_type = other DNA
atgcacttttcgatccccgagaccgaaagcaggagcggcgattccggagggtcagcttatgtattgcgaaaagagtacggcgcaaatgtgctccctgcttttcctcccaagaaactgtttagtctcacgccagccgaggttgaacagcgcagggaacaactggagaagtatatgcaggccgtcagacaagatccgctgctaggctcctctgagacatttaattctttcttacggcgcgcccaacaggagacccagcaggttcctacagaggaggtgtcattagaggtgctgctttctaacggccagaaggtgctggttaacgtgctgacatccgatcagaccgaggatgttctggaagctgtggccgccaagctggacctgcctgatgaccttatcggctattttagcctgttcctggtccgagaaaaggaagacggcgctttttctttcgtgcgcaaactccaagagttcgagttaccctacgttagtgttacctcattacggtctcaggagtacaaaatcgttttgcgtaagtcatattgggactccgcctacgatgatgacgtcatggagaaccgggtaggcctgaatctgctgtatgcacagacagttagcgatattgaaaggggatggattctggttaccaaagaacagcaccgacagctaaagagtttacaggagaaggtcagcaagaaagagttcctaaggttggcacagacccttaggcactatggctacttgagatttgacgcttgcgtggccgatttccctgagaaggactgtcctgtcgtggttagtgcagggaactctgaactctccctgcagttaaggttaccagggcagcagctgcgtgaggggtccttccgggtgactcggatgaggtgttggagggtgacctcaagtgtgccccttcccagcggttcaactagctcccccgggcgcggccgcggtgaggtgcggctggaactagcgtttgagtatctgatgtccaaggacaggctgcagtgggtcactattacatctcctcaagccatcatgatgagcatctgcctccaatctatggtggatgaattgatggttaagaagtccggcggatccataaggaaaatgctgcgccggagggtcggagggacactgagaagaagcgactcccagcaggcagtgaaatctccccccttgctagagagccccgatgcaactagagagtcgatggtgaaactgtctagcaagctgagtgcagtttcgcttagagggataggatcaccatccactgacgccagtgcctcagacgttcatggtaactttgctttcgaaggaatcggcgatgaggatctgtag

SEQ ID NO: 135765 - DNA, 771 bp, synthetic construct
  misc_feature 1..771: note = Description of Artificial Sequence: Synthetic coding sequence
  source 1..771: mol_type = other DNA
atggagaaccgggttggcctgaacctgttgtatgcacagaccgtttctgatatcgagcggggatggatattagtgacaaaagagcagcatcgccagctcaagagtctgcaggaaaaagtgtccaaaaaggaattcctgcgtcttgcccagaccttacgccattatggatacttgagatttgatgcatgtgttgctgattttcctgaaaaggactgccccgtggtggtctctgccgggaatagcgagctctcccttcaactaaggttgcctggtcaacagctgcgggaggggagtttccgtgtcacccgtatgagatgctggagagtcacgagcagcgttcctctccccagcggttctacttcttctccaggacgcggaagaggggaggtaaggctcgaactggcatttgaataccttatgtctaaggatcggctgcagtgggtaacaattacctctccccaggccattatgatgagcatttgcctgcaatcaatggtggatgaacttatggttaaaaagtccggcggatctatcagaaagatgttacggcggcgggtggggggaactctgcggagaagcgattcacagcaggccgtcaaaagcccgcccctcctggagtcacccgatgccacaagggagtccatggttaaactgagctcaaagctttccgctgtctcactccgcggaatcgggtctccgagtaccgacgcctccgcttccgatgtccacggtaatttcgcatttgaaggaattggagacgaggatctatag

SEQ ID NO: 135766 - DNA, 771 bp, synthetic construct
  misc_feature 1..771: note = Description of Artificial Sequence: Synthetic coding sequence
  source 1..771: mol_type = other DNA
atggagaatcgcgtcggtctgaacctgctgtacgcccagactgtctctgacatcgagagaggatggatcctcgttaccaaggagcagcatagacagctcaagtccctgcaggagaaagtgagcaagaaggagttcttgcgtctggcccaaaccctgaggcattacggctatcttcggttcgatgcatgtgtggccgatttccctgaaaaggactgcccggtcgtagtgagcgcaggcaacagcgagctgtctctgcagctgcgactaccgggacagcagttgagggagggaagctttagggttacaaggatgcgctgttggagagtcacgagttccgtgcccctaccctctggatccacgagctccccaggtcgggggaggggggaggtgcggctcgagttggcgtttgaatacctcatgtcgaaggatcggctgcaatgggtgactattacctccccacaggctatcatgatgagcatttgcctccaaagtatggtggacgagttgatggttaagaagagtggcggctccatccgcaaaatgttgagaagacgggtaggtggcaccctgcgccgcagtgacagccagcaggcagttaagtctcccccactgctggagagtcccgacgccacaagagaaagcatggtcaaactgagttcaaaattgagtgccgtgtctctcagggggatcggaagtccttccaccgatgcatccgccagcgatgtgcacggaaatttcgcatttgagggaatcggagatgaagatctttag

SEQ ID NO: 135767 - DNA, 1560 bp, synthetic construct
  misc_feature 1..1560: note = Description of Artificial Sequence: Synthetic coding sequence
  source 1..1560: mol_type = other DNA
atggcggccgagcgagaaccaccgcctctgggagatggcaaacccaccgactttgaggatctggaagacggagaggatctttttacatccactgttagtaccctagaaagttcccccagcagtcccgagcccgcaagcctccctgccgaggatattagcgcgaattctaatgggcccaagccgacggaggttgtcttagatgatgatcgggaagatctatttgccgaagcgactgaagaagtctctctcgattcaccggagcgcgaacccattctttcatccgaaccatctccagctgtgacaccagtgacccctactacactgatagccccccggattgagagcaagagcatgtccgcccctgtgatatttgaccgctcacgggaagagatcgaggaagaggctaatggcgatatattcgatatcgagatcggcgtctccgatccagagaaggtcggcgacgggatgaatgcctatatggcttaccgcgtgacaaccaaaacctctctgtcaatgttttccaaaagcgaattcagtgtgaagaggaggttctctgacttcttaggcttgcatagtaagcttgcctcaaaatatttgcacgtgggatatattgtgcctcccgctccagagaaatctatcgtgggtatgactaaggtgaaggtcggtaaggaagatagttcaagtaccgagttcgtggaaaagcgccgagccgctttagagcgctacttgcagcgtaccgtgaaacaccccacattgctccaggatcctgacctccgccaatttctggagagttcagaactgcctcgggcagttaacacacaggccctgtcaggggctggtatcctgagaatggtgaacaaggctgcagacgctgttaataagatgaccatcaagatgaacgagtccgatgcctggttcgaggagaagcagcaacagtttgaaaacctggaccaacaactgcgtaagcttcatgtatcagttgaggccctggtctgccatagaaaggaactgtccgccaataccgctgccttcgctaaaagcgctgccatgctgggtaacagtgaggatcacacggccctgtcacgcgccctctctcaactcgccgaagtggaggagaaaattgaccagcttcatcaagagcaggcttttgctgatttctacatgttctctgagctattaagcgattacataaggttgatcgctgcagtaaagggtgttttcgaccatagaatgaagtgttggcagaagtgggaagatgcccaaattaccctgctgaagaaaagggaagctgaagccaagatgatggtcgcaaacaagcccgataagatccagcaagcaaagaatgaaatcagggaatgggaggccaaggttcagcagggtgagagagatttcgagcagattagtaaaacaattaggaaagaggtgggtaggtttgagaaagaacgggtcaaggactttaagaccgtgatcatcaagtatctcgagtccctagttcagacccagcagcaactcatcaaatattgggaagcctttctccccgaagccaaagcgattgcttag

SEQ ID NO: 135768 - DNA, 390 bp, synthetic construct
  misc_feature 1..390: note = Description of Artificial Sequence: Synthetic coding sequence
  source 1..390: mol_type = other DNA
atggcgagccctgagcaccccggtagccctggttgtatgggccccattacccagtgtacggcaagaacgcagcaggaagcaccagccacaggcccagaccttccacatcctggtccagacggacaccttgacacccactcaggccttagctcgaacagttcgatgacaactcgcgagctgcagcagtattggcaaaaccaaaaatgccgctggaagcatgtcaagctgttattcgagatagccagcgcacgcattgaggaaaggaaggtgtccaaattcgtcatgggtaaatcacgcccgggtgagatgacttacccaggatctagaggcgagactggaacagccccagagccagacccgcgatgtcctcgccagtctgacatgctgtag

SEQ ID NO: 135769 - DNA, 951 bp, synthetic construct
  misc_feature 1..951: note = Description of Artificial Sequence: Synthetic coding sequence
  source 1..951: mol_type = other DNA
atggccagtccagagcatcctggctcacctggttgtatgggaccgatcacacagtgcacagcgcgcacacagcaggaggcccccgccaccggacctgatctgccccatcccggcccggacggacatttggacacacattctggcctaagttcgaactcaagcatgacaaccagagagctgcaacagtattggcagaaccagaaatgccgctggaagcacgtgaagctgctttttgaaatcgcttccgcccgcatagaggagcgcaaggtgtctaagttcgtggtctaccaaatcatcgtgattcagactggcagtttcgataacaataaagcagtgctggagagaaggtactctgatttcgccaagctgcaaaaggccctgctgaaaacattccgggaggagatcgaggatgttgagtttccccgaaagcatctgactggcaacttcgccgaagagatgatttgcgagagacggcgtgccttgcaggagtacctgggtctcctctacgccatcaggtgcgtgcgtcgaagcagggagttcctcgatttcttgacacgcccggaactcagggaggcctttggatgtttgcgggccggacagtacccccgggcattagaactgcttctcagggtgttgcctctacaggaaaagcttaccgcccactgcccagccgctgcggtcccagctctgtgcgccgtcctcctgtgtcaccgagaccttgacaggcctgcggaagcctttgctgccggcgaaagggccctgcagcgtctccaagcccgcgagggccacaggtactatgctccacttctcgacgctatggtgcgcttggcctatgccctggggaaagactttgtgaccctacaggagagactggaggagtcccagctccgccggcccacccctaggggtataacacttaaggagcttaccgtgcgcgagtacctgcattag

SEQ ID NO: 135770 - DNA, 459 bp, synthetic construct
  misc_feature 1..459: note = Description of Artificial Sequence: Synthetic coding sequence
  source 1..459: mol_type = other DNA
atggctagtcctgagcacccaggaagccccggatgtatgggacccataacgcaatgcactgcgcgcacacagcaggaggctcccgctactgggcctgacctccctcatcctggcccggatgggcacctggacacacactcaggactttcctctaactcctctatgactaccagagagcttcagcagtattggcagaaccagaagtgtaggtggaaacatgtgaagctgttgtttgaaatagcgagtgcacgcattgaggaacggaaggtgagcaagtttgtggtgtatcagattatagtgatccagaccggcagctttgacaataataaagcagtcctggagcgacgctactctgatttcgtaacactgcaggagcggctcgaggagtcccagcttcgccgccctacccccaggggtattaccctgaaagagcttaccgtgcgagagtacctgcattag

SEQ ID NO: 135771 - DNA, 309 bp, synthetic construct
  misc_feature 1..309: note = Description of Artificial Sequence: Synthetic coding sequence
  source 1..309: mol_type = other DNA
atggcttcaccggagcacccagggtccccaggatgtatgggaccaataacccagtgtaccgccaggacccagcaagaagcccccgctacagggcccgatctgccccaccctgggcccgacggccacctggatactcattcaggactctcgagcaattcttccatgaccaccagagaactccagcaatattggcagaatcagaaatgcagatggaaacatgtaaaactgctattcgaaatcgctagcgcaagaatcgaggagagaaaggtgtccaaatttgtcgctcctgcacccgatgctaccccttag

SEQ ID NO: 135772 - DNA, 807 bp, synthetic construct
  misc_feature 1..807: note = Description of Artificial Sequence: Synthetic coding sequence
  source 1..807: mol_type = other DNA
atgcaacagattagacctccatttattcgggggcctcctcatcacgcgtccaaccctaattcccccctatctaatcctatgctgccaggcatcggtcccccgcccggagggcccaggaatctgggccctacgtcatcgcctatgcacagacccatgctgtcccctcatattcatcctccctcaacccctacaatgcctggcaacccccctggactccttcccccacccccgcccggggcccctttaccttccctccctttccccccagtttccatgatgcctaatgggcccatgcccgttccacagatgatgaactttggactgcccagcttggcccccctggtccccccacccactcttctggtgccctatcccgtcatcgtgcctctgcctgtgcctatccccataccaatccccatccctcatgtctcggattcaaaacctcctaagaagctacttagccccgaagagccagctgtctcagagctggagagcgtcaaggaaaacaactgcgcttctaattgtcacctagacggcgaggccgctaagaagctcatgggtgaggaggccctggctggaggtgataagtccgacccaaacttgaataatccagctgacgaggaccacgcatacgctttgaggatgctgcccaagaccggctgcgtcatccagcccgtcccaaagccagctgaaaaagcagcaatggccccttgcattatctcctcgcctatgctaagcgccggacctgaggacctcgagccaccactgaagcggaggtgtttaagaatacgcaatcaaaacaaatag

SEQ ID NO: 135773 - DNA, 423 bp, synthetic construct
  misc_feature 1..423: note = Description of Artificial Sequence: Synthetic coding sequence
  source 1..423: mol_type = other DNA
atggccgaaacagtggccgacacccgaagactgatcaccaaaccacagaacctgaacgacgcttacggaccacccagtaacttcctcgagatcgacacaaacttaccaatatttaaactgaaagagagcacagtgcgcaggaggtactccgactttgagtggcttcggagtgagttggaaagagagtctaaggtggtagtaccaccactgcctgggaaggcatttctgcggcagttaccgttccggggagacgacgggatcttcgatgacaatttcatcgaggaaaggaagcaaggactagagcagtttatcaataaagtcgctgggcaccccctggctcaaaacgagaggtgcctccatatgtttttacaggatgagattattgataaaagctacactcctagtaagatcagacacgcgtag

SEQ ID NO: 135774 - DNA, 342 bp, synthetic construct
  misc_feature 1..342: note = Description of Artificial Sequence: Synthetic coding sequence
  source 1..342: mol_type = other DNA
atggctgaaaccgtggccgacacccggaggctaattactaagccacagaacctcaacgacgcatatgggccgccaagtaattttcttgagatcgacgtgtctaatcctcaaacagtgggggttgggagagggcggtttacgacctacgagatccgggtgaagacaaatctgccgatctttaaactcaaggaatcaaccgtccggcgtcggtactctgactttgagtggctgcgatccgaattggaacgggaatccaaaccctgccttcggatgacttctgaggcacgaagccatggcaggacctggtgcgcccagaatgacgagaagcttttttgtgattag

SEQ ID NO: 135775 - DNA, 393 bp, synthetic construct
  misc_feature 1..393: note = Description of Artificial Sequence: Synthetic coding sequence
  source 1..393: mol_type = other DNA
atggctgagacagttgccgacacgcgaagactaattacgaagccccagaacctcaacgacgcctatggacccccctcaaatttccttgagattgatgtgagcaatcctcagacagtcggcgtcggacggggacggttcactacatacgagatcagggtgaaggtggtcgttccacctttgcctggcaaggcgtttcttcggcaactgccatttcggggggacgacggcattttcgatgataacttcattgaggaacgaaaacagggccttgagcagttcatcaacaaggtcgctggacaccctctagcccagaacgaacgctgcctccacatgttcctgcaggacgagattatcgataaaagttacaccccctccaagattcgacacgcctag

SEQ ID NO: 135776 - DNA, 1353 bp, synthetic construct
  misc_feature 1..1353: note = Description of Artificial Sequence: Synthetic coding sequence
  source 1..1353: mol_type = other DNA
atggagcaggcacctcctgacccagagcgccagctccagccagctcctcttgagcctctaggctcgcccgatgccggccttggggcggctgtcggcaaagaggctgaaggagcgggtgaagagtcttccggagtggatacaatgacacacaacaatttctggctgaaaaagatcgagataagcgtctctgaggctgagaagcgtactggccgcaatgcaatgaacatgcaggaaacatataccgcatacctcatcgagactcgatctgtggagcataccgacggacagtcggtgctcacagattccctttggcgcaggtattcagagttcgaactcctgcggagttatcttctcgtgtattatccacacatcgtggttcccccgttgcctgaaaagagagccgagtttgtctggcacaagctcagcgctgacaacatggaccccgattttgtagaaagacgcaggattgggttggagaactttcttcttaggattgcatctcatcccattctctgtagagataaaattttctacctgttcctgactcaggagggtaattggaaggagacagttaacgaaaccggctttcagctgaaggccgactcccggctgaaagcactaaacgccacgtttcgtgtgaaaaatcccgacaagcgtttcaccgatctcaagcactatagcgacgaactgcaatctgtaatttctcatcttcttcgggtgcgggcaagggtggccgatcgtctgtacggagtgtacaaagttcacggtaattacggccgggtcttcagtgagtggtctgccatagaaaaggaaatgggcgacggactgcagtccgcgggccatcacatggatgtatatgcatcctcgatcgatgatatcctggaagatgaagaacattatgcagatcagttgaaagagtacctgttctacgcagaagcgctgcgagccgtatgccgtaaacacgagcttatgcagtatgatcttgaaatggcggcccaggatctcgcctctaagaagcagcaatgcgaagagctagtgactgggacggttcgaacattttcgctcaaaggaatgacaactaagttgttcggtcaggagacacccgaacagcgagaggcccgcattaaagtcctggaagaacagatcaacgaaggagagcagcagcttaagtcaaaaaacctagaggggagagagttcgtgaagaatgcctgggcggacattgagcggttcaaggaacagaagaaccgggatcttaaagaggctttgatctcttatgccgttatgcaaatctccatgtgtaagaaaggcattcaggtatggacgaatgccaaagaatgcttctcaaagatgtag

SEQ ID NO: 135777 - DNA, 918 bp, synthetic construct
  misc_feature 1..918: note = Description of Artificial Sequence: Synthetic coding sequence
  source 1..918: mol_type = other DNA
atggaccccgattttgtagaacggcgtcggatagggctggagaactttctgctgcggattgctagccacccaatactgtgccgggacaagattttctacctgtttttgactcaagaaggcaactggaaggaaactgtcaacgagaccggttttcagctcaaagccgatagcaggctcaaggccctgaatgccacctttcgagtgaaaaacccagacaagaggttcacagacctgaaacactactcagacgagcttcagagcgtaatttcccatctcttgcgagtcagggctagagtggcggacagactctatggcgtgtataaggtacatggcaattacgggagggttttctcagaatggagcgctattgagaaggagatgggggacggcctccaatctgcaggccatcatatggatgtgtacgccagctccatcgatgacattctcgaagatgaggagcactacgcagatcagctgaaagaatacttgttctatgccgaggcgttacgtgccgtttgcaggaagcatgagctgatgcagtacgatctcgaaatggccgcccaggacttggcctcgaaaaaacagcagtgcgaggaattggtcacgggaacggtgcgtactttcagcttgaaaggtatgaccaccaagctgtttggccaggagactcccgagcagagagaggccagaatcaaagtgctggaagaacagatcaatgagggagaacagcagttgaagagtaagaatcttgaaggacgagagttcgtcaagaatgcgtgggctgacattgagcgctttaaagagcaaaagaaccgggatctgaaggaagcccttatatcctacgcagtcatgcagataagcatgtgcaagaagggcattcaggtgtggacgaatgcaaaagaatgcttcagcaaaatgtag

SEQ ID NO: 135778 - DNA, 1215 bp, synthetic construct
  misc_feature 1..1215: note = Description of Artificial Sequence: Synthetic coding sequence
  source 1..1215: mol_type = other DNA
atggccgcagtgcccgagctgctgcagcagcaagaggaggacagatctaaattgagatctgtctccgttgaccttaatgtagacccatctctgcaaatcgacatccctgatgcgttgtcagagcgggacaaggtgaagtttaccgtacacacaaagacaacactacccacattccagtcacctgaattctccgtcacacggcagcacgaagattttgtctggcttcacgataccttgattgaaaccacagactatgcaggtctcattataccccccgcccctacaaagcccgactttgacggccccagagaaaagatgcaaaagctgggtgagggggaagggtcaatgaccaaggaggaattcgccaaaatgaaacaggaactggaggccgaatacctggcggtgtttaagaagacagtgtcgagccacgaggtgttcttacagcgactctcctctcaccctgtgctttccaaggataggaattttcacgtattcctggaatatgaccaggacttgagtgtgcggagaaagaatactaaggagatgttcggaggcttcttcaagagcgtggttaaatcagcggatgaggtgctgttcacaggcgtaaaggaggttgacgatttttttgagcaagagaaaaactttctcatcaattactataaccgcataaaggactcctgcgtcaaggccgacaagatgacccggagccacaagaacgttgcagatgactacatacataccgccgcttgtctgcatagtctggcattggaagagcctactgtcattaaaaagtacctgctcaaggtggccgagctctttgagaagctccggaaggtggaaggccgcgtatcctctgacgaggatctcaaactgaccgaattattgcgatactacatgttaaatattgaggccgccaaggacttactatataggcggaccaaagcgctgattgactacgagaactctaataaggcactggacaaggctagattaaaaagtaaggatgtgaaactggcagaggcacaccagcaagagtgctgtcagaagttcgagcagttaagtgagagcgccaaagaagaactgatcaactttaagcgcaaaagggtggccgcttttagaaagaatctaatcgagatgtccgagctggagattaaacacgctcgtaataacgtatctttattgcaaagctgcatcgacctgttcaaaaacaattag

SEQ ID NO: 135779 - DNA, 1215 bp, synthetic construct
  misc_feature 1..1215: note = Description of Artificial Sequence: Synthetic coding sequence
  source 1..1215: mol_type = other DNA
atggcggcagtgccggagctgctgcagcagcaggaagaagaccggtctaagcttcggagtgtctccgtggacctgaacgtagatccatctttgcagatcgatattccagacgcactcagcgaacgtgacaaggtcaaatttaccgtacacaccaagacaacacttcctacttttcagagccccgagttttcggttacacgtcagcatgaagatttcgtgtggctccatgacacattaattgagacaactgactatgccggcctaattattcctcccgctccgactaagccagacttcgatggaccgcgggagaaaatgcaaaagttaggggagggggaaggcagtatgactaaagaggagttcgccaagatgaagcaagaactcgaggccgagtacctggcagtgttcaaaaaaaccgtcagtagccatgaagtgttcctgcagcggctcagtagtcatccggtgctgagtaaagaccgcaattttcacgtgttcttagaatacgaccaggatctgtccgttcggaggaagaatactaaagaaatgttcgggggttttttcaaatcagttgtcaagtccgccgacgaagtgcttttcaccggggtgaaggaagttgatgatttcttcgaacaggagaagaacttcctcatcaattactataaccggattaaggacagctgtgtgaaagccgacaaaatgactaggtctcataagaatgtcgccgatgactacatccataccgcggcttgcctgcatagcttggccttggaggaacccacagtgatcaaaaagtacttgctgaaggtggcagagctgtttgagaagctccgcaaggtggagggaagagtgtccagtgacgaggacctcaagttgaccgaactgctgaggtactatatgcttaacattgaggcggcaaaagacctgctatatcgacggactaaagctctcatcgactatgaaaatagtaacaaagccctggacaaggccaggctcaagtccaaagatgtgaagctggccgaggcccatcagcaggaatgctgccagaaatttgagcagctgtctgagtccgccaaggaggaactaattaacttcaagaggaagcgcgtggccgccttcagaaagaatctgattgagatgagcgagttggagatcaagcatgcccgcaacaatgtcagtctgctccagtcatgcatcgatcttttcaaaaacaactag

SEQ ID NO: 135780 - DNA, 687 bp, synthetic construct
  misc_feature 1..687: note = Description of Artificial Sequence: Synthetic coding sequence
  source 1..687: mol_type = other DNA
atggccgccgtgccggagcttctgcagcagcaggaggaggatagatccaagaccacactgccaacatttcaaagccctgaatttagcgtgactcgacagcacgaagatttcgtgtggttgcatgatactctcattgagacgacggattatgcaggcttgattatcccccctgcccccaccaaacctgacttcgacggcccccgagagaaaatgcagaagctaggagagggagaaggcagcatgaccaaggaggagtttgccaagatgaagcaagagctggaagctgaatacctggctgtctttaagaagacggtgtcctctcatgaggtgttccttcagcggttatcgtcacatcctgtgctaagtaaagatcgtaacttccatgtgttcttggagtacgatcaggacctgtcagttcggcgcaaaaataccaaagaaatgttcggaggttttttcaagagtgtggtgaagagtgcagacgaggtgctgttcactggggttaaggaagttgacgatttcttcgaacaggaaaagaattttctcattaactactacaataggatcaaagattcctgtgtgaaggctgacaagatgacccgaagccacaagaacgtagcagatgactacatccacaccgccgcttgcctccactctctggctctcgaggaacctaccgtgataaagtag

SEQ ID NO: 135781 - DNA, 810 bp, synthetic construct
  misc_feature 1..810: note = Description of Artificial Sequence: Synthetic coding sequence
  source 1..810: mol_type = other DNA
atggcggccgtgccagagctgcttcaacagcaagaggaagaccggagcaagctgagatccgtctcagtagacctcaatgtggaccccagcctgcagatcgatataccagacgccctcagtgagcgagacaaagtaaaattcactgtgcacacaaagatccccccagcccccaccaaaccggacttcgatgggccccgggagaaaatgcagaagctgggcgagggagagggatccatgacaaaggaggagttcgctaagatgaaacaggagctggaggctgagtatttagcagtcttcaaaaagacggtatcttcccatgaggtgttcttacagaggcttagcagccaccctgtgcttagcaaagatcggaacttccatgtgttcctggaatatgaccaggacttatccgtacggcggaagaataccaaagaaatgtttggcgggtttttcaagagcgttgtgaaatctgccgatgaggtcctgttcacaggggtcaaggaagtcgatgatttcttcgaacaagagaagaattttcttattaactattacaatcgcattaaggacagttgtgtcaaagctgacaagatgaccagaagtcataagaacgtcgcagatgattacatccacaccgccgcatgccttcatagtctcgctctcgaggagcccaccgtgataaagaaatatttactgaaagtcgctgaacttttcgagaaactgcgaaaagtcgaagggcgggtgtctagcgatgaggacctgaaactcactgagttgcttagatattacatgcttaacatagaggccgccaagtag

SEQ ID NO: 135782 - DNA, 885 bp, synthetic construct
  misc_feature 1..885: note = Description of Artificial Sequence: Synthetic coding sequence
  source 1..885: mol_type = other DNA
atgacaactcttaccgagattaagctactgcctagcctggtgctacttgtgtgttgtgagtatttagccattttcaaaaagacagtagccatgcacgaagtgttcttgtgccgcgtagccgcccatcccatcctgagaagagatcttaacttccacgtcttcctggaatacaatcaggacctctccgtaagggggaaaaataagaaagagaaattggaggatttcttcaagaatatggtaaagtctgcagatggtgtgattgtttccggggttaaggacgtggacgacttttttgagcacgagcggacattccttctggagtaccacaaccgggtgaaagacgcctccgcaaaatccgaccgcatgaccaggtcccataaatccgctgccgacgactataacaggatcgggtcctctttgtacgctcttggcacccaagatagtacagacatttgtaaattcttcctcaaagtatccgaactgttcgacaaaaccaggaaaattgaggcacgcgtctcagccgacgaagatctaaagctcagcgacctcttgaaatattacctgagagagtcccaggctgcaaaggatctactgtatcgccgatccagatcgctggtggattacgagaacgctaataaagctctggataaggccagagcgaaaaataaagacgtattgcaagctgaaacatctcagcagctatgctgtcaaaaattcgaaaagatcagtgaatccgccaagcaagagcttatagattttaagactagacgcgtggctgcttttcggaagaatttggtggagctagctgaactcgaactaaagcatgcgaaggggaatctccaactgctacagaactgtctggctgtcctgaatggagacacatag

SEQ ID NO: 135783 - DNA, 1257 bp, synthetic construct
  misc_feature 1..1257: note = Description of Artificial Sequence: Synthetic coding sequence
  source 1..1257: mol_type = other DNA
atgcgggcgtgtgctggaccccggctcggagcagccatgatggaaggattagacgacgggccagacttcctgagtgaggaagaccgcggtctgaaggcgataaatgtggatctccaatccgatgctgccctgcaggttgatattagcgacgccctctccgagagagacaaggttaagttcaccgtacacaccaaatcctccctccctaattttaaacaaaacgaattttcggtcgttaggcagcacgaagaattcatctggctgcatgactctttcgtcgagaatgaagattacgcaggctatataattccacctgctccccctagaccggattttgacgcaagcagggagaaattgcagaaactgggagagggagaagggtctatgaccaaggaggagttcacaaaaatgaagcaggaactggaggcagaatacttggccatttttaagaagaccgtggcaatgcacgaagtctttctgtgtcgggtggctgcacatccaatcttgaggcgtgatttgaatttccacgtgttccttgaatacaaccaggacctgtctgtgagaggtaagaacaaaaaggagaagctggaggatttcttcaagaatatggttaagtctgctgatggggtgatagtctctggagtgaaagacgtggacgattttttcgagcatgagcggacctttcttctggaatatcacaatcgggtgaaggatgcctccgccaagagcgatcggatgacacgtagtcacaaatcagcagccgacgattacaataggattggctcctccttatacgccttgggcacacaggattctacagatatctgcaaatttttcctaaaggtgagcgaactgtttgacaagaccaggaagatcgaggccagagtcagcgccgacgaagacctgaaactgtcagacctgctgaaatactatcttcgcgaatcccaagccgctaaggacctcctctaccgtagaagccgttccctggtcgactatgagaacgccaacaaggctttggacaaagccagggctaagaacaaggacgtcttacaggccgagacctctcaacagctttgctgtcaaaagtttgaaaaaattagcgagtctgccaagcaagaactgatcgattttaaaactagacgtgtcgccgctttcagaaaaaatctggtggagctggccgaacttgaactgaagcacgccaaaggtaaccttcagctgttacagaattgcttagcggttctcaacggcgacacatag

SEQ ID NO: 135784 - DNA, 873 bp, synthetic construct
  misc_feature 1..873: note = Description of Artificial Sequence: Synthetic coding sequence
  source 1..873: mol_type = other DNA
atgaccaaggaggagtttacaaaaatgaagcaagagttggaagctgaataccttgcaatttttaaaaagacagtcgccatgcatgaggtgtttctgtgcagagtggccgcccatcccatcctacgtagagacttgaattttcacgtcttcctagagtacaaccaggacctgtccgtccgtggcaagaacaagaaggagaagcttgaggacttcttcaagaacatggtgaaatcggcagatggcgtcatagtttctggcgttaaggacgtcgacgattttttcgagcacgaaagaaccttcttattagagtaccacaatcgagttaaggatgcaagtgctaaatctgatcggatgacacggagtcataaaagcgctgccgatgattacaaccgcatcggcagctccttgtacgccttaggtacacaggactccaccgatatctgtaagttcttcttaaaggtcagtgaactgttcgataagacaaggaaaatcgaggcgcgtgtgtccgcagacgaagatcttaagctctctgacctcctcaagtattaccttcgcgagtcccaggctgcaaaggacctgctatacaggcggtctcgcagtcttgttgattacgaaaacgcgaacaaagcactggataaagcccgagctaaaaacaaggatgtgctgcaggcagaaacttctcaacagctatgttgccagaaattcgagaagatttctgagtcggcaaagcaggagctcattgattttaaaacaagacgggtggccgctttcaggaagaacctggtagaactggccgaattggaactgaaacacgccaaaggtaacctgcagctgcttcaaaattgtctcgctgtcctcaatggcgatacctag

SEQ ID NO: 135785 - DNA, 873 bp, synthetic construct
  misc_feature 1..873: note = Description of Artificial Sequence: Synthetic coding sequence
  source 1..873: mol_type = other DNA
atgactaaagaggaatttaccaaaatgaagcaagagctggaggccgaatatcttgcaatttttaaaaagaccgtggcaatgcatgaggtcttcctgtgcagggtggccgcccaccccatcctgagacgcgacctgaatttccatgtcttcctggaatataaccaagatctgtccgtgcgtggcaaaaacaagaaggagaagctcgaggacttcttcaagaacatggtcaaatctgccgacggcgtgatcgtctctggagtgaaagacgtggatgatttttttgaacacgagcggacctttctgttggagtaccacaaccgcgtgaaggatgcgtccgccaaatctgatcgaatgacacggtcccacaagagtgctgcagatgactacaatcggattggttcgtccctgtatgctttaggaacgcaggacagcactgatatctgtaaattcttcttgaaggtgagcgagctgtttgacaagacaaggaagatcgaagcgagggttagcgccgacgaggatctgaaactgtccgatttgctgaaatactatctgcgggaaagtcaagcagccaaagatttgctctatcgccggtcgcgcagcctggtagactatgaaaatgctaataaggcccttgataaagcccgggctaagaacaaagatgtgctgcaggccgagacctcccagcagctgtgctgccagaaatttgagaaaatatccgaaagtgcgaagcaggagctgattgacttcaaaactcgtcgcgtggccgcgtttcggaagaacctcgtggaactagcagagttggagctgaagcacgccaaagggaacttacagttactgcagaattgcctcgctgtgctcaacggagacacgtag

SEQ ID NO: 135786 - DNA, 1188 bp, synthetic construct
  misc_feature 1..1188: note = Description of Artificial Sequence: Synthetic coding sequence
  source 1..1188: mol_type = other DNA
atgaaaatccctctgaacaagtttcctggcttcgccaaaccagggaccgagcagtatcttctagccaagcaactagccaagcccaaagagaaaatccctatcatcgtgggggactacggtcctatgtgggtttacccaacctcgacttttgactgcgtagtcgccgatccccgcaaagggtccaagatgtacgggctcaaatcatacatcgagtatcagctaacgcccaccaataccaaccgctccgttaaccatcggtataagcattttgactggttgtacgagcgcctgctggtcaagtttgggtctgcaatcccgatcccaagtctgcccgacaagcaagtgactggcagattcgaggaggaatttatcaaaatgcggatggaaaggctgcaagcttggatgacacgcatgtgcagacaccccgttatatctgaatctgaagtgtttcaacagtttctgaattttcgggacgagaaggaatggaagaccgggaagaggaaggcggaacgtgatgaattggccggtgtgatgatctttagcaccatggagcccgaggcgcccgatttggatctggtggagatcgaacagaaatgcgaagctgtgggcaaatttaccaaagctatggacgacggagttaaggagctactgaccgtgggccaggagcactggaaaaggtgtacaggtccactgcctaaggagtatcagaagatcggcaaggccctacagtcactagccaccgtcttttcttcttccggataccagggggagacagatttaaatgacgccatcactgaagcagggaaaacatacgaggagatcgctagcctggtggccgagcagcctaaaaaggatctgcactttttgatggagtgcaaccacgagtataaggggtttttgggctgtttccccgacatcataggaacccacaagggcgctattgagaaagtgaaggaatcagataaactcgtggccacgtctaaaattaccctgcaagataaacaaaacatggtgaagagagtctcaatcatgtcatatgcacttcaggcagagatgaatcactttcactctaatcgcatttatgattataattctgtcattcggctgtacttggaacagcaggtccagttctacgagaccatcgctgaaaagctccgccaagctttgtccaggttccctgtgatgtag

SEQ ID NO: 135787 - DNA, 1788 bp, synthetic construct
  misc_feature 1..1788: note = Description of Artificial Sequence: Synthetic coding sequence
  source 1..1788: mol_type = other DNA
atggctactaaggcacgagtcatgtatgactttgccgccgagcccggtaacaatgagttgaccgtcaatgaaggcgagataatcaccattacaaatccggatgttggcgggggatggctcgaggggcgtaatattaagggcgagcgcggcctagtgcccaccgattacgtggaaattctgccctccgacggcaaggatcaattctcatgcggaaactctgtggctgaccaggcctttctggatagcctgtcagccagcacagcccaagccagttcttccgccgcatccaataaccaccaggtcggaagtggcaacgacccctggagcgcatggagtgcatctaagagtggcaattgggagtccagcgaaggttggggggcccagccggaaggcgctggcgcgcagcggaatacgaacacacctaataactgggataccgcttttggccatcctcaggcttatcaaggcccagctacaggtgatgatgacgattgggatgaagactgggatgggcccaagagttctagttatttcaaggactctgagtcagctgacgccggtggtgcccagaggggcaacagtcgcgcgtcgagtagttctatgaaaataccccttaataaatttccaggattcgccaagcccggaacagagcaatatcttctggccaaacagctcgccaagccgaaggagaagatcccaattatcgtgggtgactacggccccatgtgggtttaccctaccagcactttcgattgcgtggtggccgacccccgtaaaggctcaaagatgtacggcctgaaatcctacatagagtaccaactcacgccgactaatactaaccggtctgtaaaccaccgttataagcattttgattggttatatgaacggcttctcgtaaaattcggatccgccattcctatcccttcgttgccagacaagcaggtcaccggacgctttgaagaagaatttattaaaatgcgaatggagcgtctgcaggcctggatgactaggatgtgtcgtcaccccgttatcagcgaatcggaggtgttccaacagttcctcaacttcagggatgagaaggaatggaagaccggcaagaggaaagctgaaagagacgaattggccggggtgatgatcttttcaaccatggaacctgaggcccccgatttagacctcgttgaaattgaacagaaatgcgaagccgtggggaaatttacgaaggcaatggatgatggtgtgaaggagcttctcacagttgggcaggaacactggaagcgttgtaccggtccactccccaaggagtatcagaagattggtaaagccctgcagagcctggcaaccgtttttagcagttctggctatcagggagaaaccgatctgaatgacgcgatcactgaagcaggaaagacatatgaagagattgcatctctggttgccgagcagccaaagaaggacctccactttttaatggagtgtaaccacgagtacaagggctttctcggatgctttcccgatatcatcggaacccacaaaggcgcaatagaaaaagtgaaagaatcagataagctggttgcgaccagcaagatcacgctgcaggacaaacagaatatggtgaagcgggtgtctataatgagctacgccctgcaggctgagatgaatcactttcactctaatagaatatacgattacaattccgtcattcggctgtacctggagcagcaagtgcagttttatgagaccatagcagagaagttaagacaagcactgagtaggtttccagtcatgtag

SEQ ID NO: 135788 - DNA, 1788 bp, synthetic construct
  misc_feature 1..1788: note = Description of Artificial Sequence: Synthetic coding sequence
  source 1..1788: mol_type = other DNA
atggccactaaggcaagagtaatgtacgactttgccgctgaaccaggaaacaacgaattaactgttaacgagggtgagattatcaccatcaccaaccctgatgttggtggtggctggcttgaaggtcggaacattaagggagaaagaggtcttgtgcctaccgactacgtcgaaatcctgccgtctgacggtaaggatcagttttcgtgcggcaattctgtagcagatcaggccttccttgactcactgtccgcatccactgctcaagcctcttcatccgcagccagcaacaatcaccaagtagggtcaggcaacgatccgtggtctgcatggagcgcgtctaaaagcgggaattgggagtcttccgaaggctggggagcgcaacccgaaggcgctggagctcagcggaatacgaacactcctaacaactgggatacagcctttgggcatccccaagcatatcagggaccagcaacaggcgatgatgatgactgggacgaggactgggatggaccaaagtccagctcgtattttaaagatagtgaatccgcggatgccggcggggcccaacggggcaactctcgcgcaagctcaagttctatgaaaatcccgctgaataaatttccaggatttgcaaagccagggacggagcagtaccttcttgccaaacagctcgctaaacctaaggagaaaatacccattatcgtcggagattatggacctatgtgggtctatcccacttcaactttcgattgcgtcgtggctgatccacgcaagggctcaaagatgtacggactcaaatcttatatagagtaccaattaactcctactaatacgaaccgctccgtcaaccacagatacaagcactttgattggctttacgaacgcctcttggtcaagttcgggagtgccattcccattccgtccttaccagataagcaggtcacgggccgctttgaggaggagttcattaagatgcgcatggaaaggctgcaggcctggatgactagaatgtgccgccaccccgttatcagcgagagtgaggtatttcaacagttcctgaactttcgtgacgaaaaggagtggaagaccggaaaacggaaggccgagagggacgagctcgccggcgttatgatttttagcaccatggagccggaagcacccgatcttgacctagtggagatcgaacagaaatgcgaggctgtcggcaagtttactaaggcaatggatgatggggttaaggagctgttaaccgttggtcaagagcattggaaacgctgcacgggaccgttgcccaaggaataccagaaaatcggaaaggctctgcagagtttggccactgtgttctccagttcgggttatcagggcgaaacagaccttaatgacgcgattaccgaggctgggaaaacctatgaagagattgcatcactggtggctgagcagcctaaaaaagacctgcacttcctcatggaatgtaatcacgagtataaaggattcctggggtgttttcccgatatcattggcacccataaaggcgctattgagaaagtgaaggagtcggacaaactggtagccacctccaaaatcacattgcaggacaaacagaacatggtgaagagggtgagcataatgtcatacgcgctccaagctgagatgaaccatttccatagcaatagaatctatgactacaattcggttatccgactgtatcttgagcaacaggttcaattttacgagacaatcgcagaaaagctacggcaggccttgagtcgttttcccgtcatgtag

SEQ ID NO: 135789 - DNA, 1308 bp, synthetic construct
  misc_feature 1..1308: note = Description of Artificial Sequence: Synthetic coding sequence
  source 1..1308: mol_type = other DNA
atgggactctctttcagcctctttccactccggaatcatgtcaacgttgagggggctacacataaacaggtggtggacttaattagggctggagaaaaggagctgatccttactgtgttgagcgtccctccccatgaggccgacaatctggatccatccgatgacagcctgggacaaagtttctatgattataccgagaaacaggctgttcccatatctgtcccgcgatataaacatgtggaacagaatggagagaagttcgtggtatacaacgtttatatggccgggcgtcagctgtgcagtaagaggtatagggagttcgcaatactccaccagaatcttaaacgcgaatttgctaactttacatttcctagacttccaggcaaatggccgttctctctgtctgagcagcagctcgacgcgagaagaagagggttggaggaatacctggagaaagtgtgctctatcagggtcataggggagagcgacatcatgcaagaattcctatcagaaagcgatgaaaactataacggcgtcagcgatgtggagctgagggtagcgctgcctgacgggacaaccgtgacagttcgagtgaagaaaaactccaccactgaccaggtataccaggccattgccgccaaagtggggatggattccaccaccgtgaactacttcgcactgtttgaggttatcagccattctttcgtgagaaagcttgcccccaacgagtttccacataaattgtatatccaaaattatacttcagccgttccaggcacttgcctgaccatccgaaagtggctttttactacagaggaagagattctcctgaatgacaacgatctggctgttacatacttcttccaccaagcagtcgatgacgtaaagaagggctacataaaagccgaagagaaatcctatcagttgcagaagctgtacgagcagcgcaaaatggtgatgtatcttaacatgctgagaacttgcgaaggatacaacgagattattttcccacactgtgcctgcgacagccgccggaagggccacgtaatcactgcgatctcgatcacccacttcaaattacacgcatgcacagaggagggacaactggagaatcaggtcatcgcatttgagtgggacgagatgcagcggtgggatacggacgaggaaggaatggctttttgttttgaatatgctcgaggcgagaaaaaaccacgatgggtgaaaatcttcaccccttacttcaactatatgcacgaatgcttcgaaagagttttctgtgagcttaaatggcgcaaggaggagtattag

SEQ ID NO: 135790 - DNA, 1587 bp, synthetic construct
  misc_feature 1..1587: note = Description of Artificial Sequence: Synthetic coding sequence
  source 1..1587: mol_type = other DNA
atggccgacgaggatggggaagggatccacccgagtgccccccaccggaacgggggaggcggcggcggaggaggatctggcttacattgcgctggcaatggcggcggcggtgggggaggtcccagagtggttcgcattgtcaagtctgagtctggatatgggttcaatgtgcgcggacaggtgtcggaaggcggtcagctgaggtctataaacggggaattatacgcgcccctgcagcacgtgtccgccgtgcttccaggcggtgctgccgatcgagcaggcgtgcggaagggagatagaattcttgaggtgaaccacgtgaatgtggagggtgctacccacaaacaagttgtggacttaatcagggccggcgagaaggagcttattctgaccgtgctgtcagtacccccccacgaggcagacaacctcgatccaagcgatgattcactgggacaatctttttacgattataccgagaaacaagcagttccaatctctgtgcctaggtataagcatgttgaacagaacggcgaaaagttcgtggtgtataatgtttatatggccggccgccagctgtgctctaagaggtatagagaatttgccatcctacatcagaatctgaagcgggagtttgcaaatttcacttttccacggctcccaggcaagtggccattctccctgagtgaacagcaattagatgctcggaggcggggcctggaagaatatttagagaaggtgtgcagcattagggttatcggtgaatccgacatcatgcaagagttcctgtctgagagtgacgagaactacaacggtgtctcagatgtcgagctgagggtggcactccccgatggcacaacagtcaccgttagggtgaaaaagaacagcaccacagaccaggtttaccaagcaattgcagcaaaagttggaatggactcgaccactgtgaattacttcgcactttttgaggtcatttcccactctttcgttcgcaagctggcaccgaacgaatttccccacaaactgtatattcagaactacactagcgcagtccctgggacctgcctgacaatcagaaaatggttattcactaccgaggaggagatcttgctaaacgataacgatctcgccgttacctacttcttccatcaagcagtggatgatgtaaaaaaagggtacattaaagcggaagaaaagtcctatcaactccaaaagctctatgaacaaaggaagatggtaatgtatttgaacatgttgcggacatgtgaaggttataacgagattatatttcctcactgtgcttgtgattctcgtaggaagggccacgttattacagctatcagtataacccactttaagttacacgcgtgcacagaggagggacagctggagaaccaggtgatcgccttcgagtgggacgagatgcagcgctgggatacagacgaagagggaatggccttctgctttgaatatgccaggggggagaaaaaaccgcgctgggttaagatctttaccccgtatttcaattacatgcatgaatgcttcgaaagagtgttctgcgaactgaagtggcggaaggaggagtactag

SEQ ID NO: 135791 - DNA, 1626 bp, synthetic construct
  misc_feature 1..1626: note = Description of Artificial Sequence: Synthetic coding sequence
  source 1..1626: mol_type = other DNA
atggccgacgaagacggcgagggcatccaccccagcgctccccatcgaaacggtggaggggggggcggcgggggttccggactgcattgtgctgggaacggcggagggggcggtgggggccctcgtgtggtccgtattgtgaagtctgagtccggatacgggtttaacgtaagggggcaggtgagcgaaggcgggcagctgcgatccatcaacggcgaactgtacgccccactacagcacgtgtcagctgttctgcctggcggggccgctgatagagccggggtcaggaagggcgatcgaattctggaggttaaccacgtgaacgttgagggcgctactcacaaacaggtggtggacctgattcgggctggcgagaaggagctcatcctcacggtgctcagtgtcccccctcacgaagccgataacttggaccccagtgatgattccctaggccagtcattctatgactacactgagaaacaggccgtgcctatctctgtaccccgctataagcatgtagagcaaaatggggaaaagtttgtcgtgtacaacgtctacatggcgggtcgccagctgtgttccaaacgttaccgagagttcgctatcctccaccaaaatctgaagcgggagtttgcgaatttcacattccctaggctccccgggaagtggccttttagtctctctgaacaacagttggacgcccggcgtagggggctggaggaatatttggagaaggtgtgtagtatccgcgtaatcggagagtcagatatcatgcaggaattcctttccgaaagcgatgagaactataacggggtcagcgacgtcgagctacgcgtggctcttccagacggtaccacagtcactgtgagggtcaaaaagaactccaccaccgatcaggtttaccaagccattgcggcaaaagtgggaatggattcgacaaccgtgaattatttcgccctgttcgaagttatctcgcattcgtttgtacgcaagctggctcccaatgagtttccccataagctctacattcagaattatacttcggctgtgccaggaacctgtttaacgataagaaagtggttattcaccacggaggaggaaattctccttaacgacaacgacttagccgtaacatacttttttcatcaggcagtggatgacgtgaagaagggatacattaaggcagaggagaagagctatcagcttcaaaaattgtatgaacagcgcaaaatggtcatgtatctgaacatgctgcgcacgtgtgagggctataacgaaatcatctttccccattgcgcctgtgactccagacgcaagggccatgtaattaccgccatcagcatcacccacttcaaactgcacgcctgcaccgaagaggggcaactggagaaccaggtgatcgcatttgagtgggatgagatgcaaagatgggatactgacgaggaaggcatggccttctgctttgaatacgccaggggggagaaaaagcctcgatgggtgaagatattcactccatacttcaattacatgcacgagtgcttcgaacgagtcttctgtgagcttaagtggagaaaagagaatattttccaaatggctcgctctcagcagcgcgacgttgcaacatag

SEQ ID NO: 135792 - DNA, 2640 bp, synthetic construct
  misc_feature 1..2640: note = Description of Artificial Sequence: Synthetic coding sequence
  source 1..2640: mol_type = other DNA
atggctggaggtggaggggacttatctacaaggcggctgaatgagtgtatctctcctgtcgccaacgagatgaatcatctccccgcccacagtcacgacttacagcggatgttcaccgaggatcagggtgtcgacgatcggcttctgtacgacattgtgttcaagcactttaaacgaaataaggttgagatttctaacgcgatcaagaagacctttccatttttggaagggctgcgggatcgcgaccttatcacaaacaagatgtttgaagatagccaggatagctgcagaaatctggtgcccgtccagcgcgtcgtgtataatgttttgagtgagttagagaaaactttcaatcttccagtcttagaggcactcttctcagacgttaacatgcaggagtaccccgacctcatccacatttataaagggtttgagaacgttattcatgataagctcccgctccaagagtccgaagaagaggagagagaggaacgttctggactgcaattgagcctggagcagggcacaggcgagaattctttcaggagcctgacctggccaccaagtggctctccctcccatgctggaacaactccacccgagaatgggttgagcgagcacccctgtgaaaccgagcagatcaacgccaagcggaaggataccacctcggacaaagacgactccctcggcagtcaacaaacaaatgaacagtgcgctcaaaaagctgagccaactgagtcctgtgagcagatcgcagtgcaggtcaacaacggggatgccgggcgcgagatgccatgtccgttgccctgcgacgaggaatctccagaggctgagctgcataaccacggtattcagattaatagttgttctgtaaggctggtcgacatcaagaaggagaaaccgttctctaattccaaagtggagtgtcaggcccaagcgcggacacaccacaatcaggcatctgacattatcgtgatttctagtgaagacagcgaggggagcaccgatgtagacgagcctctcgaggttttcatctccgccccaagatcggagccagtaattaataatgacaatccactcgagagtaacgatgaaaaggaagggcaggaggcaacttgctcccgcccgcagattgtccctgaaccgatggattttaggaagctgtccacgtttagagagagcttcaagaagagagtaattgggcaggaccatgacttctccgaaagcagtgaggaggaggccccagctgaagctagcagcggggcactgcggagcaagcatggcgagaaggcccccatgaccagccgctccactagcacctggaggataccgagcagaaagcgtcgattttcctctagcgattttagtgatctgtcaaacggcgaagagctccaggaaacttgttcgtcctcgttgagacggggtagcggtagtcagcctcaagaaccagaaaataagaagtgtagctgtgtaatgtgctttcctaaaggagtcccgcggtctcaggaggcgcgcacggaatcctctcaggcttcagacatgatggataccatggacgtggagaacaactcgacgttggaaaaacactcaggtaaacgtcggaagaagagaaggcacaggtcaaaagtgaacggacttcagagggggcgcaaaaaggatcgccccagaaagcaccttacgttgaataataaagtgcagaaaaaaaggtggcagcagagaggccgaaaggctaacacacggcctctcaaaaggaggcggaaacgcggccccaggatcccaaaggatgagaatattaattttaaacagtcagagctgcccgtcacctgcggagaagtgaaggggacgctctacaaagagcgcttcaaacagggcaccagtaaaaaatgcatccagtcagaggacaagaagtggtttaccccacgtgagttcgaaatcgagggagatcggggtgcgagcaagaactggaaactgagcatcagatgcggtgggtacactctgaaggtgctcatggaaaataagtttctccccgagccaccaagcactcgcaaaaagcgaatactcgagagccacaataacaccctggtagatccttgcgaggagcacaagaagaagaatccggacgcatccgtgaagttttctgaatttcttaagaaatgttctgagacgtggaagacaattttcgccaaggaaaagggtaagtttgaagacatggcaaaggctgacaaagctcattacgagcgggagatgaaaacctacatcccgcccaagggtgagaagaagaagaaattcaaagatcctaatgcacccaaacgccctcccctggcattttttctattttgttctgagtataggcccaaaatcaaaggggaacatcccggcttgtctattgatgacgtcgtcaaaaaactggctggcatgtggaataacaccgcagccgcggacaagcagttttatgagaaaaaggcggcgaaacttaaggagaagtataaaaaagacatagcagcgtatcgtgcgaaaggcaaaccgaatagtgcaaaaaagcgcgtggtcaaagccgagaagtcaaaaaaaaagaaggaagaagaggaggatgaggaagacgagcaggaggaagagaacgaggaagatgatgataagtag

SEQ ID NO: 135793 - DNA, 2658 bp, synthetic construct
  misc_feature 1..2658: note = Description of Artificial Sequence: Synthetic coding sequence
  source 1..2658: mol_type = other DNA
atggcaggcggcggtggtgacctcagcaccagaaggctgaacgaatgtattagtcctgtggcaaatgaaatgaatcatctcccagctcattcccatgatttgcagcgcatgtttaccgaggaccagggtgtggatgaccgactactctatgacatcgtcttcaagcacttcaagcggaataaggtcgagatttccaatgccattaagaaaacgttcccatttctcgagggattacgcgaccgtgatctgatcacaaacaaaatgtttgaggacagccaagactcctgccggaatcttgtccccgtccagagagtggtatacaatgtgctcagcgaactagaaaagacattcaatttacccgtactggaagccctgttcagtgacgttaacatgcaggagtacccagacctcattcacatctataaggggtttgaaaatgtgatacacgataagctccctctgcaggaaagtgaggaagaagaacgagaggagcggtccggcctgcagctgtctctggaacagggaaccggcgaaaacagcttcaggtcactcacttggccgcccagcggtagcccaagtcatgccggaactaccccgccagagaatggcctgtccgagcacccttgcgagactgaacaaatcaatgctaaaagaaaggacaccacgagcgataaagatgactcgctaggatcacagcagacgaatgaacagtgtgcacagaaggccgagccaacggagagttgtgagcagatcgcggtgcaggtgaacaacggcgacgctggcagagagatgccatgtcccctgccttgtgacgaggaaagccccgaagccgagctgcataaccacggtattcaaattaattcttgttccgtgcggctggtggatataaaaaaagagaagcccttttcaaattccaaggtcgagtgtcaggctcaagccagaactcaccataatcaagcctctgacatcatcgttatctcctcagaagattctgagggtagcaccgatgtcgacgagccactggaagtgttcatttccgctcctaggtcggagccagtgattaataatgataaccctctcgaatccaacgacgagaaggagggacaggaggcaacatgtagtcgaccacaaatagtaccagagcccatggacttcaggaaattgtccacatttcgggagtcttttaaaaaaagggtcattggacaggatcatgacttctctgagtcaagcgaggaggaagctcctgccgaagcctccagtggcgccctcaggtcaaaacacggtgaaaaagccccaatgacctccaggtcaacaagtacctggagaattccttcaagaaagaggagatttagcagctccgatttcagtgatttgtcaaatggggaggaactgcaggagacttgttcatcctctctgaggcgagggtccggctcccagcctcaggaaccagaaaataagaaatgcagctgcgtgatgtgctttccaaagggggttccgcggtctcaggaggcacgcacggaaagtagccaggcctccgacatgatggataccatggatgtggagaataactcaacattggagaaacacagcggtaaaagaagaaagaagcggagacatcggagcaaggtcaacggcttgcagcgcggtagaaagaaggatagaccccgtaagcatctgactctgaacaacaaagtgcagaaaaagcgttggcagcaacgtggcagaaaagccaataccagacccctcaagaggcgtcgcaaacgagggccacgtattcctaaagatgaaaacatcaactttaaacagtccgagttgcccgtgacgtgtggtgaagttaagggaacactctataaagaacggtttaagcaagggacgtcaaaaaaatgcatccagagtgaggataagaagtggttcactcccagggagtttgagattgaaggcgatcgcggagcatccaaaaattggaaacttagtatcagatgtggtggatatactctcaaggtgctgatggagaacaagttcctgcccgagccccccagcacgaggaagaagagaattctcgagtcacataataacacacttgtagacccctgtcctgagaactcaaacatatgtgaagtgtgtaacaaatgggggcggctgttttgctgtgacacctgtcctaggtccttccacgagcattgtcacattccatctgtcgaggcgaacaagaatccctggagctgcatcttttgccgtataaagaccatccaggaaaggtgtcccgagtcccagtccggtcatcaggaatcagaagtgctgatgcgtcagatgctcccggaagagcaactaaaatgtgagttcttgctccttaaagtgtattgtgacagtaaaagctgttttttcgccagcgagccctattataaccgagaaggtagccagggtccacaaaaacccatgtggctcaataaggttaagactagcttaaatgaacagatgtatactagagtggaggggttcgttcaggacatgcgactgattttccataaccacaaagagttctatagagaagataaatttacgcgcctgggtatccaggtgcaggacatctttgaaaagaacttccggaatattttcgctattcaagaaaccagtaaaaacatcattatgtttatctag

SEQ ID NO: 135794 - DNA, 1422 bp, synthetic construct
  misc_feature 1..1422: note = Description of Artificial Sequence: Synthetic coding sequence
  source 1..1422: mol_type = other DNA
atggccggaggaggcggtgatctcagcaccaggcggcttaacgagtgtatttcacctgtcgcgaacgagatgaatcacctgccagcccacagccacgacttacaacggatgtttacagaagaccagggagttgatgaccgtctcctgtacgacatcgtctttaagcacttcaagcgcaataaggttgagatttcaaacgccattaagaagacctttccttttctggaagggctacgagatagggatctgattactaacaaaatgttcgaagacagccaagattcatgtcggaacttggttcccgtgcagagagtcgtctataatgtgcttagtgagctggagaaaactttcaatctgcccgtgttggaggccttgttctctgatgtaaacatgcaagaatacccagacctgatccacatctacaagggcttcgagaatgtgatccacgataaactacccctgcaggagagtgaggaggaggagcgggaggagaggtcagggttgcaactctctctcgaacagggtaccggggaaaattcattccggtctctgacatggccaccttctggttcacccagtcatgcgggcacaacgccccccgaaaatggactgtccgagcacccatgtgagaccgaacagataaatgccaagcgcaaagacaccacctcagataaggacgatagcttgggatcccaacaaacgaacgagcagtgcgcacagaaagcagaaccgaccgaaagttgcgaacaaatcgcagtacaagtaaacaatggagacgcaggccgggagatgccatgtcccctgccttgcgatgaggagtccccggaagcagagttgcacaatcacggaatccaaatcaactcttgctccgtccggctggttgatatcaaaaaagaaaaacctttctctaatagcaaagtggagtgtcaagcccaggctagaacccatcacaatcaggctagtgacataatagtcatcagctcagaggactctgaggggtcgacagacgtggacgagccacttgaagtcttcatctccgctcctcggtccgagccggtaatcaacaacgacaaccccttggaaagtaatgacgagaaagagggccaggaggcaacatgtagccgtccccaaattgtacctgagcccatggacttcagaaaactcagcacttttagggaaagctttaaaaaacgggtgatcggacaagatcacgattttagtgagagcagtgaggaggaggccccagctgaggcatcttcaggagctctgcgttccaaacatggtgagaaagcccctatgacaagtcggagtacatccacttggaggatcccatctcgaaaacgccagttgaaaaagaagaaaaagaagaaacagtgccatccccaaccacagcctcaacgaggactactggagcagtcgtag

SEQ ID NO: 135795 - DNA, 2067 bp, synthetic construct
  misc_feature 1..2067: note = Description of Artificial Sequence: Synthetic coding sequence
  source 1..2067: mol_type = other DNA
atggctggaggaggcggggacctgagcacgcgtaggctgaatgagtgcattagcccagtggcaaacgagatgaatcacttgcccgctcattcccacgatctgcagagaatgtttacagaggaccagggtgtagacgataggctcctgtatgacattgtgtttaagcacttcaaacgaaacaaggtcgagatatccaatgccatcaagaaaacattcccttttctggaggggttgcgggatagggacctcataaccaataagatgttcgaagatagtcaagacagctgtcgcaatttggtccccgtccagagggtcgtatataacgtgttaagcgagcttgagaaaaccttcaacctgcccgtgctagaggccctcttctctgatgttaatatgcaggaataccccgacctgattcacatctataaggggttcgagaacgttatccatgataagctcccattgcaagagagtgaagaggaggagagggaggagaggagcggtcttcagctgagtctggagcagggtactggagaaaactcctttcgaagtctgacctggcccccctctgggtcgccaagtcacgccggcaccacaccaccggaaaacggtctctctgaacacccatgcgagactgagcagatcaatgcaaagcgtaaggatacaacctccgataaggacgacagcctcgggtcccagcagactaacgaacagtgtgcccagaaggcagagccaaccgaatcctgcgaacagatcgccgttcaagttaataatggagatgctggacgggaaatgccgtgcccactcccatgcgatgaagagtctccagaggccgagctgcataaccatggcattcaaattaacagctgctcagtgaggctcgttgatataaaaaaagagaagccattcagcaacagcaaggttgagtgtcaggcccaggctcggacacaccacaaccaggcaagcgatataattgtaatctcatccgaagactccgaaggatccactgatgtagacgaacccctcgaagtctttatcagtgctccaaggtccgaaccggtcattaacaacgacaatcccctcgagtcaaacgacgagaaagaggggcaagaggccacctgctctaggccccaaatcgtacccgagcctatggatttcagaaagctttccacttttcgcgaatcatttaagaagcgggtcatcgggcaagatcacgactttagcgaaagctccgaggaagaagccccagccgaagcaagctccggagctctgaggagtaagcacggagagaaggccccgatgacatctagatcaactagtacttggcgcataccctccaggaaacggaggtttagttcaagcgatttctccgacttgtcaaatggtgaggagttgcaggagacctgtagttccagcctccgaagagggtccggcagccaacctcaggagccagagaacaagaagtgctcctgtgttatgtgtttcccaaagggagtgcctagatctcaggaggccagaaccgagtcaagtcaggctagcgatatgatggacacaatggacgtcgaaaacaattcaaccctagagaagcatagtggcaagagacggaagaagcgccgtcaccgatctaaggtgaatggcctgcagcgaggaagaaaaaaagatcgcccacgtaaacacctgacgttgaataataaggttcagaagaagaggtggcagcagcgcggcagaaaagcaaataccagacctctgaagcgccgccgtaagcgcggacccagaatccccaaggatgaaaatattaacttcaagcagtccgaattacccgtcacctgtggcgaagtcaaaggcacactgtataaagagcgattcaagcagggaacctccaagaaatgtatccaaagtgaggacaagaaatggttcactcccagagaatttgagatcgagggcgaccggggggcctctaaaaactggaagttgtcaattagatgcggggggtacactcttaaggtcctgatggaaaataagttcctccccgaaccacccagcacaagaaagaaagtgatgataaagtag

SEQ ID NO: 135796 - DNA, 1443 bp, synthetic construct
  misc_feature 1..1443: note = Description of Artificial Sequence: Synthetic coding sequence
  source 1..1443: mol_type = other DNA
atggcaggggggggtggcgatctgtctacgagacgcctgaacgagtgtatcagccccgtcgccaacgaaatgaatcatctccctgcccattcacacgacctgcagcggatgttcacagaagaccagggggtggacgacagactgttgtacgatattgttttcaagcacttcaaaaggaacaaggttgaaatctcaaatgccatcaaaaaaaccttcccttttctggaggggctgagagaccgtgatcttattactaataagatgttcgaggacagccaggacagctgccggaacctggttccagtgcagcgggtggtgtacaatgtgctgtctgaactggaaaaaactttcaatctcccggtccttgaggccctgttctctgacgtgaacatgcaggaatatcccgatctgatccacatctacaaagggttcgaaaacgtgattcatgacaagctgcccctgcaggagtcagaagaggaagagagggaggagcgcagcggcctgcaactatctctggagcaggggaccggagagaattcttttaggtctctgacatggcctccctccggaagtccgagccacgctggcactacccctcctgaaaatggtctgtccgagcacccttgtgaaactgagcagattaatgccaaacgaaaggacaccacaagcgataaggatgatagccttggtagccaacagaccaatgagcagtgcgctcagaaggccgagccaactgagagttgtgagcaaattgccgtacaggttaataatggggacgctggacgcgaaatgccatgcccactgccctgtgacgaggagagtcctgaagctgagctgcacaaccacggtatccagatcaactcctgctctgtccgcctcgtcgacataaagaaggagaaaccattctctaatagtaaagtcgagtgtcaggcccaggccagaactcaccataatcaggcctccgatataatcgtgatcagcagcgaggattccgagggaagcaccgacgtggacgagccacttgaagtgtttatcagcgcgcctagaagcgaacccgtgataaacaatgataacccactggaatctaatgacgagaaggaggggcaagaagccacttgttcaagacctcaaattgttcccgagcccatggattttcggaaactatccactttccgggagtcattcaagaagagggttataggccaggaccatgacttctctgaaagttctgaagaagaggcaccagccgaggcatcctccggggcgctgaggtccaaacacggggagaaggcacccatgacctctcgcagcactagcacctggcgaattccatctcggaaacgtcggttcagcagtagcgacttctccgatctgtccaatggagaggaactgcaggaaacttgtagcagttctctgcgaagagggagtgggaaggaagattag

SEQ ID NO: 135797 - DNA, 1068 bp, synthetic construct
  misc_feature 1..1068: note = Description of Artificial Sequence: Synthetic coding sequence
  source 1..1068: mol_type = other DNA
atggacgtggaaaacaactccacactggaaaaacactccggcaaaaggaggaaaaagagacgccaccggtctaaggtcaacggcctgcagagagggcgtaagaaagatcggccccggaaacacctaacgctcaacaataaagtgcagaagaaacggtggcagcagagaggaaggaaggctaacacccggccactgaagaggagacgaaagcgcggaccaagaatccccaaagacgaaaacattaactttaagcagtccgagctgccagttacatgcggcgaagtcaagggaacactgtataaagagcggtttaagcaggggacatctaaaaaatgcatccagtccgaggataaaaaatggtttactccccgcgaatttgagatagagggcgatagaggcgcatccaaaaactggaaactttcaattcgatgcggcggctatactctcaaagtgttgatggagcgaattctggaaagtcataataacacactggtggacccttgcccagagaactccaatatatgcgaggtgtgtaacaagtgggggcgtctgttctgttgtgacacttgtccgaggagtttccacgaacattgtcatattccttctgtggaggccaacaaaaacccctggagctgcattttctgtcggatcaaaaccatccaagagaggtgtccagagtctcagagtggacaccaggagtccgaggtgctgatgcggcaaatgcttcccgaggaacaactgaaatgtgaatttttactattaaaggtgtattgcgactccaaatcatgttttttcgcaagcgaaccatactataacagagaggggagtcagggccctcagaagccaatgtggctgaacaaagtcaaaacctcacttaatgagcaaatgtatacgagagtggagggcttcgtgcaggacatgagactcatcttccacaaccacaaggagttttacagagaggataagtttacccgccttgggatacaggttcaggacattttcgagaagaattttcggaatatcttcgcaattcaggaaacatctaagaacattattatgttcatctag

SEQ ID NO: 135798 - DNA, 1359 bp, synthetic construct
  misc_feature 1..1359: note = Description of Artificial Sequence: Synthetic coding sequence
  source 1..1359: mol_type = other DNA
atggctggtggcgggggtgacctttctaccagaatgtttaccgaagaccaaggcgtggacgacagattgctttacgacatcgtctttaagcacttcaaacgcaataaagtggagatttccaacgccataaaaaaaacgtttccgttcctggaaggtctcagggatcgggacctcataaccaataagatgtttgaagacagtcaagatagttgtaggaatctcgtgcctgttcagcgggtggtgtataacgtcctctctgaacttgagaagacctttaacttgcctgtactggaggccctcttctccgatgtaaacatgcaggagtatcccgacctgatccatatttacaaagggttcgagaacgtcatccacgacaagttgcccctgcaggagtccgaggaggaggagcgcgaggagaggtcaggccttcaactatccttggagcaaggcactggtgaaaacagttttcggagtctcacttggcccccttctggatcacctagccatgcaggaaccactccaccagagaatgggctctctgaacatccgtgtgagactgagcaaatcaacgccaagcggaaggatacgacaagcgataaggacgatagcctgggctcccagcagacaaacgagcagtgtgcgcaaaaagccgagcccacggaaagctgtgagcaaatcgcagtgcaggtgaataatggtgatgctggacgcgagatgccctgtcccttgccctgcgacgaagaaagcccagaagccgaactccataatcacggcatacagatcaattcctgttccgtccgccttgtggacattaaaaaagaaaagccattctcaaattcgaaagttgagtgccaggctcaggcccgtacacatcacaatcaagcctctgatatcatcgttatctcatcagaggatagcgagggctcaaccgatgtagatgagccattggaggtcttcatctctgcccccagaagcgagccggttatcaacaatgacaacccacttgaatcaaatgacgagaaagagggacaggaagctacgtgctcccgcccccaaatcgtaccagagccaatggactttagaaaactcagcacattccgcgaaagctttaagaagcgagtcattggccaggaccacgacttctcagaatcgtccgaagaggaggctccggctgaagccagttcaggggccttgcgtagtaagcacgcacccatgactagtaggtccacatctacgtggcggataccctcccgtaaaagacgcttcagctcatcagacttttccgacctgagcaatggggaagaactgcaagagacatgttcttcgagcctgcgcagggggtcaggaaaggaagactag

SEQ ID NO: 135799 - DNA, 1338 bp, synthetic construct
  misc_feature 1..1338: note = Description of Artificial Sequence: Synthetic coding sequence
  source 1..1338: mol_type = other DNA
atgatgttcactgaagatcagggtgtggacgatcgtttactgtacgatattgtattcaagcatttcaagaggaacaaggttgaaatttccaacgctattaagaagacattcccttttttggaaggactgagagatcgagatctgatcactaacaagatgtttgaagattcccaagattcttgcagaaacctggtcccggtccaaagagttgtgtacaacgtactctcggagttggaaaagacctttaatcttccggtcctggaagcacttttctcagacgttaacatgcaggagtaccccgacctcatccatatctataaaggatttgagaacgtaattcatgataagctccccctccaggagagcgaagaggaagaaagagaagagcgcagtgggctgcaactgtccctggagcagggaaccggcgagaactctttccgttcacttacttggccaccctcaggcagcccttcccatgccggcacaacaccccctgaaaacggcctgtccgagcatccctgtgaaactgaacagattaacgctaagcgcaaagacacgacttcggataaggatgactcattaggatctcagcaaacgaatgagcagtgcgcacaaaaggccgagcccacggaaagctgtgagcaaattgccgttcaggtgaacaacggagacgcaggacgggaaatgccttgccctctgccatgcgacgaagaatccccggaggcagagctacacaatcatgggattcagatcaattcctgctcagttaggctggtcgacatcaagaaggagaagcccttcagtaactctaaagtagagtgccaggcccaggccaggactcaccacaatcaagcctcggacatcatcgtgatctcatccgaggatagtgaaggctccactgatgtcgatgaacctctcgaggtattcattagtgcacctaggtctgaaccagtgattaataacgataaccctcttgaatctaatgatgagaaggaggggcaggaggccacctgctctaggccacagattgtgcctgaacccatggatttcaggaagctcagcacattccgtgagtctttcaagaagcgggtgatcggtcaggaccacgacttctcagagagctccgaggaggaagcccccgccgaagcatcttcaggagccctaagaagcaaacacggcgagaaggccccaatgacctcgcgttctacatcgacatggcgaattcctagtcgaaagcgccgcttcagcagttctgatttctctgacctgagcaatggggaggaactccaagagacttgctccagctctttaaggagagggtctgggaaagaggattag

SEQ ID NO: 135800 - DNA, 2142 bp, synthetic construct
  misc_feature 1..2142: note = Description of Artificial Sequence: Synthetic coding sequence
  source 1..2142: mol_type = other DNA
atgttcaccatgacacgggccatggaagaggctttgttccaacatttcatgcatcaaaagctggggatcgcctatgccatacataaacctttcccattctttgaagggctgctggataactccatcattacaaagcgaatgtatatggaaagtctggaagcttgccgcaacctgatccctgtgtctagagttgttcacaatatccttactcaactggagcgaacattcaacctcagtttgctcgtcaccctattctcccagatcaatctacgagaatatcccaaccttgtcacgatttatagatcctttaagcgagtgggagcttcctacgaatggcaatccagagacacccctatcctactggaagcgccaaccggcctagctgagggttcctctctccatactcccctcgccctaccgcccccacagcctcctcagcccagctgctcaccatgcgctccccgcgttagcgagcctggcaccagtagccagcagtcagacgaaattctctcggaatccccatcgcccagcgaccctgttttaccacttcctgcgttgattcaggagggaagatcaacaagcgtgaccaacgacaagctcacttctaagatgaacgctgaagaagattctgaggagatgccctcacttctgacctccaccgttcaggtggcctctgacaatttgatcccccaaattagggacaaggaggatccccaggagatgcctcactcccctttaggctccatgccagagattcgcgacaatagcccagagcccaatgacccggaagaaccgcaggaggtgagcagtactcctagcgataaaaaagggaaaaagaggaaacgttgcatatggtccacaccaaagaggcggcacaaaaagaaatccctgccaggcggaactgcatcctctcggcacggaatccagaagaaactgaagcgggtggatcaggtgccacaaaaaaaagatgattcgacatgtaacagtactgtggagacacgggcacaaaaggcgaggaccgaatgcgctaggaaaagtcgcagcgaggagattatcgatggaacctccgagatgaacgaaggaaagcgttcccagaaaacacccagcacacccaggagagttacgcaaggcgcagcatcccccgggcacggaatacaagaaaagctgcaggtagttgataaggttactcagcggaaagatgacagcacatggaattctgaggtcatgatgcgggtgcaaaaggcgcggaccaagtgtgccagaaagtctcgcctgaaggagaaaaagaaggaaaaggatatttgttcttcttctaaacgtcggttccagaaaaacattcacaggaggggcaagcctaaaagtgacactgtcgacttccactgctccaagcttccagtcacttgtggcgaagcaaagggcattctctataagaagaaaatgaaacatggcagctccgtgaagtgcattcgtaacgaagatggaacttggctgacaccaaacgaatttgaggtcgaggggaagggacgaaatgcgaagaattggaagcgcaacatcaggtgcgaaggcatgaccctgggagaactactgaagcgaaagaactccgacgagtgcgaagtgtgctgtcaaggcggacagctcttgtgttgcggcacttgtccacgggtgtttcacgaagattgtcacatcccgcctgtggaagccaagaggatgctgtggagctgcacattctgcagaatgaaacgttctagtggctctcaacaatgccatcatgtgagtaaaacactcgaaaggcagatgcagccgcaagaccaactgaaatgcgaatttttgctactgaaggcatactgccatccgcagagctctttcttcactggaataccgttcaatatacgggattatggcgagcccttccaggaggctatgtggctcgatctggtcaaggagcgcctaatcacagagatgtatacggtagcgtggtttgttcgggatatgcgcctcatgtttcgtaaccacaagaccttctacaaggcctccgacttcggacaggtggggctcgacctggaagcagagttcgagaaagacctgaaggatgtcctcggtttccatgaggctaatgatggggggttctggacactcccctag

SEQ ID NO: 135801 - DNA, 1650 bp, synthetic construct
  misc_feature 1..1650: note = Description of Artificial Sequence: Synthetic coding sequence
  source 1..1650: mol_type = other DNA
atgttcaccatgactcgcgccatggaagaagcgctgtttcagcattttatgcaccagaaactggggatcgcatacgccatccataagcctttcccattcttcgaagggcttctggataactctattattactaagagaatgtatatggaaagcttagaagcctgccgaaacttaatccccgtctcccgagtcgtccacaatatcctgacccaactcgagcgcacctttaacctttcactattggtgacacttttctcacagataaacctaagggaataccctaatctggtcacgatctacagatcatttaagagggtcggggcgtcttatgaatggcagtcaagggatacacccattctgctggaagcccctaccggcctagcagaggggtccagtctgcacacccctctcgccctgcctccccctcaacctcctcagccttcttgtagcccttgcgcccccagggtcagcgagccaggtacgtcctcacaacagtccgacgagattctgtcagagtctcccagtccatctgatccagtattacctctgcccgccctgatccaggagggcaggagcacttcagtgactaatgataagttgacttccaagatgaacgccgaggaagactctgaagagatgccttccctgttaacaagcactgtccaggtagccagtgataatttaatccctcagatcagagacaaggaggatcctcaagagatgccacactctccactagggagtatgccggagatcagagataactctccggaacctaatgatccggaagagccccaagaggtgagctcaacgcctagtgacaagaaaggcaaaaagcggaagcgttgcatttggagcaccccaaagcggcgacataagaagaaaagcctgcccggcggtaccgcctcttcccggcatggtattcagaaaaagctgaagcgcgtggaccaagtgcctcagaagaaagatgattcaacatgcaattcaacagttgagaccagggcccaaaaagccagaactgaatgtgcaaggaagtctagatccgaggagatcattgatgggactagcgagatgaacgaggggaagcggtcccagaagactccctcgacccctaggcgggttactcagggggctgcctctccaggacatggaatccaggagaagctgcaggtggtcgataaggtcactcagcgtaaggacgactcgacttggaattccgaagtaatgatgcgcgtccagaaggccagaacaaagtgtgcccggaaatctcgccttaaggagaagaaaaaggaaaaggatatatgctcttcctctaagaggcgatttcagaagaacattcatcggagagggaagcccaaatccgacacagtggacttccattgctctaaacttcctgtgacctgcggggaggccaagggtattttgtacaaaaagaaaatgaagcacgggtcatcggtgaaatgtattcggaatgaggatggcacctggcttacgcccaatgaattcgaagtcgagggcaaggggcgaaatgccaagaattggaaaagaaatatacgctgtgagggaatgacgctgggtgagctgttaaagtctggcctgctgctgtgcccccctagaataaacttgaaacgcgagctcaactctaagtag

SEQ ID NO: 135802 - DNA, 756 bp, synthetic construct
  misc_feature 1..756: note = Description of Artificial Sequence: Synthetic coding sequence
  source 1..756: mol_type = other DNA
atgcccgagataagggacaactctcccgagccgaacgatcccgaagaaccacaggaggtctcctcaacgccctcggacaagaaaggcaagaagcgaaaaagatgcatttggtctacccctaaacggcgccataagaaaaagtccctacctggagaaataatcgacggaactagcgagatgaatgagggaaagcggtcacagaaaacccccagtactccacgcagggtgacgcagggtgcagcatctcctggtcacggaatccaggaaaagttgcaggtcgtggacaaggttactcagagaaaggacgactctacctggaactccgaggtaatgatgcgcgtgcagaaagccagaaccaaatgtgccaggaagtcaagactcaaggaaaaaaaaaaagagaaggatatttgctcatcttctaagcggcggttccaaaagaacatccaccggcgcggtaaacctaagtccgatactgttgacttccattgctccaagctgcccgttacgtgtggtgaggctaagggcatcctctacaaaaagaagatgaagcatgggagctcagtgaaatgcattagaaatgaagacggcacctggctgaccccgaacgagtttgaagtggaaggtaagggacggaacgcaaagaactggaagcgcaatattaggtgtgaagggatgacattgggagagttgctcaagagcggcctgctgctatgtcccccccggatcaaccttaaacgggaactgaattcgaagtag

SEQ ID NO: 135803 - DNA, 2070 bp, synthetic construct
  misc_feature 1..2070: note = Description of Artificial Sequence: Synthetic coding sequence
  source 1..2070: mol_type = other DNA
atgtttaccatgacccgcgccatggaggaggccctttttcaacattttatgcaccagaaactaggcatcgcttacgcgatccacaaaccctttccgtttttcgaggggctgttagataatagtatcatcacaaagcggatgtacatggagagcctggaagcctgccgtaatctgatccctgttagccgcgtcgttcacaacatcctaacccagctggaacggaccttcaacctgtcactgctagttaccttgttctcgcaaattaacttgcgggaatatccaaatctagtgacaatttatagatcttttaaacgagtcggtgcttcctatgagtggcagagcagggacactcccatactgttggaagctccgactgggttggccgaaggcagttcccttcatacaccattggccctcccccctccacagccacctcagccgtcctgcagtccatgcgcacctcgggtgtccgaacctgggacgagtagccaacagtctgatgagatactgtcggaaagcccatcgccttccgatcctgtgcttcccctgcctgccctgatacaagaaggtcggtccaccagtgtgaccaatgataagctgacatccaagatgaacgcagaggaggacagcgaggaaatgccttccttactcacttccaccgtccaggtcgcttcagataacctgatcccccagatcagggacaaagaggatccacaggagatgccccattctcccctaggttcaatgccggagattcgggacaacagtccggagccaaatgatcccgaagagcctcaggaggtttctagcacaccctcggataagaaaggcaaaaagcgaaaacggtgcatctggagtacaccgaaacggcgccataagaagaaatcattgcccggggggacagctagtagtcgtcacggcatccagaagaagctaaaaagggtcgatcaggtgcctcaaaagaaagacgattccacttgcaactcgactgtggagacgagagcccagaaagccaggacagaatgtgcgaggaagagccggtccgaggagatcatcgacggaacctcagagatgaatgagggcaagcgatcccaaaagactccctcaacgcctaggcgggttacccagggggcggcaagtcccggacatggcatacaggagaagctccaagtggtggacaaagtgacccaaaggaaagacgatagcacatggaacagcgaagtgatgatgcgcgtccaaaaggcaagaaccaagtgtgcacgcaagagccgactgaaggagaaaaagaaggaaaaggacatctgctcttctagtaagagacggttccaaaagaatatccaccgtcggggcaagccgaaatccgatacagtggactttcattgtagcaaactgcccgtaacgtgcggagaggctaaggggatcttatacaagaaaaagatgaagcacggctcgagtgtgaaatgcatccgcaacgaggacgggacttggctgaccccaaatgaattcgaggttgaaggcaaaggtcggaatgcaaagaattggaaacgcaacatcagatgcgaagggatgacccttggggagcttctgaaacgtaaaaatagcgatgaatgtgaggtttgctgccagggagggcagctactttgttgcggcacgtgtccacgcgtttttcacgaggactgtcacatcccacccgtagaagctaaacgaatgctatggtcgtgcactttctgcaggatgaagaggtctagcggctctcaacaatgtcatcatgtgtcgaagacacttgagaggcagatgcaaccacaggaccaactgatacgggattatggggagccatttcaagaggctatgtggcttgacctcgtaaaggagagattgatcactgaaatgtatactgtagcgtggttcgttcgcgatatgcgacttatgttccggaatcataaaacattctacaaagccagcgattttggacaggtgggcctcgacctggaggcggaattcgagaaggacttgaaagacgtcctgggattccacgaagccaacgatgggggtttttggaccttgccatag

SEQ ID NO: 135804 - DNA, 1644 bp, synthetic construct
  misc_feature 1..1644: note = Description of Artificial Sequence: Synthetic coding sequence
  source 1..1644: mol_type = other DNA
atgtttactatgacacgtgcaatggaagaggccctgtttcagcacttcatgcatcagaaactgggcatcgcatatgccatccacaagccttttccttttttcgaaggtttactggacaactctatcatcaccaagagaatgtacatggaatccctggaggcttgcagaaacctcatacccgtgtcccgggtcgtacacaacattctgacgcagctcgagcggacctttaatctttcgctgctagtgaccctcttcagccaaatcaatttgcgcgaatacccaaatcttgtgactatttatcggtctttcaagagagtcggagccagctatgaatggcagagtagagacactccaattctgctggaagcgccgactggcctggctgaagggtcttccctgcacacccctcttgcactgccccctccccagccacctcagcccagttgtagcccatgtgctcccagagtgtcagagcctggcactagcagccagcaaagcgatgagatactatcggagtcaccatccccatcagaccctgtgctgcccttgccagctctcatccaggagggcagatctacctccgtcacgaacgataaactgacatctaagatgaatgctgaggaagatagtgaggagatgccaagcctcctgacatcgacggtacaggttgccagcgataatctcatcccacaaatccgggataaagaggatccccaagagatgccacattccccactgggttccatgcccgagatccgagacaattcccccgaacccaatgatcccgaagaaccacaggaagtgagcagcacacccagcgataaaaagggcaaaaagaggaaacgttgtatttggtccaccccgaaacgacgccataaaaagaaatccctaccgggggctagctccaggcatgggatacagaaaaaattaaagagagttgaccaagtgccccagaagaaggatgactctacatgcaactcaacagttgagaccagggcacagaaggccagaaccgagtgcgccagaaagtctaggagtgaggaaatcatagacggcaccagtgaaatgaatgaaggcaagcgtagccaaaaaactccaagtacaccacgcagggttacccagggagctgcctcaccaggccacgggattcaggaaaaactgcaggttgtggacaaggtcacacagcggaaagacgatagcacttggaatagtgaggtgatgatgcgggtgcaaaaggcgcgtaccaaatgtgcccggaagtctagactgaaagaaaagaagaaggaaaaggatatatgtagttccagcaaaagaagattccagaagaacatacatagaagggggaagccgaagagcgataccgtggacttccactgtagcaagctgcctgtgacctgcggagaggccaagggcatcctgtataaaaaaaaaatgaagcatggtagctctgtgaagtgtatccggaacgaagatggcacatggctgactcctaacgaatttgaggtggagggaaaaggcagaaacgccaagaattggaaacggaacattagatgcgaaggcatgactctgggagaattactcaagtccggattgctgctgtgtcccccccgcattaacctgaagagagagctgaactcaaagtag

SEQ ID NO: 135805 - DNA, 666 bp, synthetic construct
  misc_feature 1..666: note = Description of Artificial Sequence: Synthetic coding sequence
  source 1..666: mol_type = other DNA
atgttcacaatgacacgcgctatggaagaggccctgttccagcatttcatgcaccaaaagctggggattgcttacgcgattcacaagccatttccattctttgaaggtttgctcgacaacagcataattacgaagcggatgtatatggagtccttggaagcctgtaggaatttgatccctgtgtccagggtggtccacaatattctgacgcagctggagagaacatttaacctctctctgctcgttactctgtttagccagatcaacctgagggagtatcccaacctggtcacgatttatcgttctttcaagcgggtgggggcatcgtatgagtggcagagccgggatacccccatcctgctggaggcacctactggactagcggaaggcagctccctccacactccgcttgcgctgcccccccctcaacctccccagccgtcttgctctccttgcgctcctagggtttcagagccaggtacgtcttctcagcaaagcgatgaaatcttgtcagagtcaccttctccctctgacccagtccttcccctcccagccctgatacaagagggacggtctacttccgtcaccaacgacaaacttacgagtaaaatgaatgcggaggaggacagcgaagagatgccttccctgctcactagcactgtttag

SEQ ID NO: 135806 - DNA, 306 bp, synthetic construct
  misc_feature 1..306: note = Description of Artificial Sequence: Synthetic coding sequence
  source 1..306: mol_type = other DNA
atgtttacaatgactcgtgcgatggaggaagctctctttcaacatttcatgcatcagaagttaggtatcgcctacgctatccataagcccttcccattctttgagggacttctcgataacagtatcatcaccaaaaggatgtacatggagagccttgaagcttgtcggaacctgataccggtgtctcgggtggttcataacattctgactcagcttgaacggacctttaaccttagtctactggtgaccctgttctcccagataaatttacgagaataccctaatttggtaactatttataggtag

SEQ ID NO: 135807 - DNA, 1668 bp, synthetic construct
  misc_feature 1..1668: note = Description of Artificial Sequence: Synthetic coding sequence
  source 1..1668: mol_type = other DNA
atgggccgcggcttcagaatgttcacaatgacccgggcgatggaggaggctttatttcaacacttcatgcatcagaagctcggcatcgcttacgcaatacataagccatttcccttcttcgagggactgctggataatagcataattactaaacgtatgtacatggagtcgctggaagcctgtagaaaccttatccctgtgtcaagagtcgtacacaatatactcacccagttggaaaggactttcaacctctccctgctggtgacactgttcagtcaaatcaatctcagggagtatcccaacttagttactatctatcgctctttcaaacgtgtgggcgcctcttacgagtggcaaagcagagacacaccgatcctgctggaagctcctaccggcctcgcggaaggtagctcattgcataccccactggctctccctccaccccagccaccccagccttcctgttccccctgcgcaccccgggtatcagagcccgggacttcaagccagcagtccgatgagatcttgagtgagtcaccaagcccatctgatcccgtcctgccattgcctgctctcatacaggagggtcggtccacttccgtgactaacgacaagctgacctctaagatgaatgcagaggaagatagcgaagaaatgccttcattgttgacctccaccgtgcaggtggcctctgacaacttgatcccacagatacgggataaggaagacccccaggagatgccgcacagcccccttgggtccatgcctgagatcagggataatagtcctgagccgaatgatcctgaggaaccacaggaagtgtccagcacaccttctgacaaaaagggaaagaagagaaaaaggtgcatatggtccactccaaaaagaagacacaagaagaaatctctgcccggaggtacagcgtcctcgagacacgggatccagaagaaattgaaacgagttgatcaggttcctcagaaaaaggacgactctacctgtaactcaacagtggaaacccgagcccagaaggcacggacagaatgcgcaaggaagtccaggtcggaagaaatcattgacggaaccagtgagatgaatgaaggcaaaaggtcccagaagaccccgagcacacctaggagagtaacgcagggggccgcctctccaggacacggtattcaggagaagcttcaggtggtcgataaagtgactcagagaaaagacgacagtacatggaatagcgaggttatgatgcgcgttcagaaggccaggaccaagtgcgcgaggaagtctcgccttaaagaaaagaagaaggaaaaagacatctgtagtagcagcaagaggcggtttcagaagaatattcatcgtcgaggaaagcccaagtccgataccgtggacttccactgctcgaagcttcccgtgacatgcggtgaagcaaaggggatcctgtataagaagaaaatgaaacatggaagcagcgtcaaatgcattagaaacgaggacggtacttggctgactccgaatgagttcgaggtggaaggtaaaggcaggaatgctaagaattggaaacgcaacatcagatgtgaggggatgacccttggagagcttctgaagagtggtctgttgctttgtccgccacgaattaacctcaagcgtgaattgaactccaaatag

SEQ ID NO: 135808 - DNA, 2346 bp, synthetic construct
  misc_feature 1..2346: note = Description of Artificial Sequence: Synthetic coding sequence
  source 1..2346: mol_type = other DNA
atgaccgcccctgagaaacccgtcaagcaagaggagatggcagccctggacgtggattctgggggaggcggtggtggcgggggaggccacggcgagtatctgcagcaacaacagcagcacggaaatggcgcagtcgccgcagcagcggcagcccaggacacccagccctccccactggccctcctggcagcaacatgttctaagatcgggcctccttccccaggggatgatgaggaggaagcagcagctgccgccggagctccagctgccgctggcgctacaggagacttggcaagcgctcagttaggcggggcacccaaccggtgggaggtgctgtctgctacaccaactacaatcaaagacgaagccgggaacttagtccagatcccttcagccgcgacttcatctggacagtacgtacttccgctgcagaatctgcagaatcaacagatcttctcagtagctcccggttccgacagcagtaacgggaccgtgagttcagttcaatatcaggtcataccccagatccaatcagcggatggccaacaagttcagattgggtttacaggtagttcagataacggcggcattaaccaagaaagctcacagatccagatcatcccgggaagtaatcagacgctcctggccagcgggactccctctgcgaacatccagaatctaattccccaaacaggccaggtccaggtacagggagtggctatcggaggctcgagcttcccgggtcaaactcaggtcgtggctaatgttccgctaggccttccaggcaatattacgtttgttccaataaattctgttgacctcgacagtctggggcttagcggctccagccagacaatgacagccggcattaacgccgatggtcatctaattaacactggacaagcaatggattcaagcgataacagcgagagaactggggaaagggttagccctgacatcaatgagactaacaccgatacggatttgtttgtgcctacatcttctagctcccagctgccagtcaccatcgacagtactgggatcctccagcagaatactaactcactgacaaccagtagtggtcaggtgcattccagcgatctacaagggaattatattcagagccctgtatctgaagaaacacaagctcagaatatccaggtgtccacggctcagccagtggttcagcacctccaactgcaagaatcgcagcagccgacctcccaggctcaaatagtgcagggtatcacccctcagaccatccacggcgttcaggcctccgggcaaaatatctcccagcaggccttgcagaatctgcagttacaactcaaccccgggaccttcctgatccaggcacagactgttacaccatccggtcaagtcacctggcagacatttcaggtgcagggggtccagaacctgcaaaacttgcaaatccaaaacacggctgcacagcaaatcaccctgactccagtgcaaactttgaccctcggccaggtcgccgccggcggagcttttacatctacacctgtttccctgtccactggccagctccctaacctacagaccgtgactgtaaattccatcgattccgctggcatccagctgcacccaggcgaaaacgctgatagtcccgccgatatccggatcaaggaagaagagccagatcccgaagaatggcagctgagtggggattcgacactcaacaccaacgatctgacccatctgcgcgtccaggttgtcgatgaggagggtgaccaacagcatcaggaagggaagaggctcagaagagtggcctgcacctgccccaattgcaaagagggcggagggaggggcactaatttaggtaaaaagaagcagcatatctgtcacattcccggctgcgggaaagtgtatggcaaaacctcccatctcagagcacacttgagatggcacagtggcgagcgccccttcgtctgcaactggatgtactgtggcaagcgcttcaccaggagcgatgagctccagcgacaccgcagaacccatacgggggagaaaaaattcgtgtgtcctgaatgtagtaagcggttcatgcgctccgaccacctcgccaagcacatcaagacacatcagaataaaaaaggcatccactcttccagtactgtgctcgcctctgtcgaagccgctagagacgacacccttattactgcggggggcacaactcttatcttagccaacattcagcaggggagtgttagtgggatcggtaccgtcaacacctctgctacctccaaccaggatatactgaccaataccgagatccctcttcagcttgttaccgtgtcaggcaacgaaaccatggagtag

SEQ ID NO: 135809 - DNA, 2217 bp, synthetic construct
  misc_feature 1..2217: note = Description of Artificial Sequence: Synthetic coding sequence
  source 1..2217: mol_type = other DNA
tgacctgagaagccagttaaacaagaagagatggcagcattagacgtggattcaggaggtgggggtggtggaggcgggggccatggggaatatctccaacagcagcaacagcatggcaatggcgctgttgcagccgcggccgccgcccagacaggcgacctagcctccgcgcagttagggggggccccgaataggtgggaggtgctcagtgctacgccaacgaccatcaaagacgaagctggtaacctagttcaaatcccatctgccgccaccagctccggacaatacgtgctgcctctccagaatctgcaaaaccagcagatttttagcgtcgcccctggcagcgatagtagcaatgggaccgtctcttctgtacagtaccaggtgataccccagatccaatccgccgacgggcagcaggtacagatagggtttactggatcctccgacaatggcggaatcaatcaggagagttcacaaatccagattattcctgggtccaatcagactctgctggccagcggtacaccatcagccaacattcagaaccttatccctcagaccggacaggtccaagtccaaggggtcgccatcgggggatcttcttttcccgggcaaacacaagtcgtggccaacgtgcccctgggcctgcccggaaacatcacctttgtgcccattaattcggtagatctagactctctggggctaagtggaagctctcagactatgaccgctggtatcaatgctgacggccaccttattaacactggccaggccatggacagctctgataatagtgagcgcaccggcgagagagttagcccagacatcaatgaaacgaataccgatactgacctatttgttccaacgtcctcctccagccagcttcccgttaccatcgattctactggcatcctgcaacagaacaccaattccctcacgacgagtagtggccaggtccatagtagcgacttacagggtaattacattcaaagcccagtctccgaagagactcaggcccagaatatccaggtctctacagcccagccagtggtgcagcacttgcagctccaagaaagccagcagcccacctctcaggcgcaaattgtgcagggaatcaccccgcagacgattcacggggtacaggcaagcggacagaatatatcccagcaggccctccagaatctccagctccagctgaacccagggacatttctgatacaggcacagactgtgaccccatccggccaggtgacctggcagacatttcaggtgcagggcgtgcagaacctgcagaacttacagatccagaacactgccgctcagcagatcacactgactcctgttcagacactcactttggggcaggtagccgccgggggggcgttcaccagcacgcccgttagtctgtccaccgggcagcttcccaatctgcagacggtcacagtcaactcgatcgactctgccggcatccagttgcacccaggagaaaatgccgatagcccggccgatattcggattaaggaagaggagcccgatcccgaggaatggcagttgtccggtgatagcacgctgaacaccaacgatcttacacatcttcgtgtccaggtcgttgatgaggagggcgaccagcagcaccaggagggaaagaggttaaggcgtgtggcatgcacgtgccctaactgtaaagagggcggcgggcggggcacaaatctcggcaagaagaaacagcacatctgtcatatccctggatgcggtaaggtctatggtaagacttcccacttaagggcccacctgagatggcattccggcgagcggccttttgtctgcaactggatgtactgtggaaagcgcttcacccggtcagatgaactgcagcgacatcgaaggacccacaccggcgaaaaaaagtttgtgtgtcccgaatgcagcaagaggtttatgcggtccgatcatctggctaaacacattaagacccaccaaaacaaaaaagggattcattcttcatccacagtcctggcaagcgttgaggccgccagggatgataccctgattacagccggaggcactacgttaatccttgccaacatccagcagggatcggtgtctggcatcggcaccgtcaataccagtgctacctctaatcaggacattttaacaaacacggaaattccccttcaactggtcaccgtttctggaaatgaaactatggagtag

SEQ ID NO: 135810 - DNA, 2142 bp, synthetic construct
  misc_feature 1..2142: note = Description of Artificial Sequence: Synthetic coding sequence
  source 1..2142: mol_type = other DNA
attgggccaccctcacctggggatgacgaagaggaggcagcagccgcggcaggtgcccccgccgccgcaggcgctactggagatctcgcatcagcgcaactcgggggcgcaccaaacagatgggaggttctatcggccactcccaccacaattaaggatgaggctggtaacctggttcagataccgtcagcggctacttcttcgggccagtatgtattgccactacagaacctacagaatcaacagatcttttccgttgcgcctggctcagattcgagtaacggtacagtgtcaagcgttcagtaccaggtaatcccgcagattcagtctgccgatggccagcaggtgcaaatcgggttcaccggcagttctgataatggtggcataaaccaggaatcaagtcagatccagataataccaggaagtaatcagaccttactggcctctggaacgccaagcgccaacatccaaaatttgataccacagacgggccaggttcaggtgcagggtgtggccattggaggcagctcattcccgggacagactcaggttgtcgccaacgtgcctctcggacttcccggtaacatcacattcgtccctatcaatagcgtggatttggacagcttgggactgagcggatcctcccagacgatgacagctggtatcaatgctgacgggcacttgatcaatactggtcaggcaatggacagttccgacaattccgaacgcaccggcgaacgggtttcacctgacattaacgagactaataccgatactgatctgtttgtcccaacctcctccagttctcagttacctgtcactatcgatagcacagggattttgcagcagaatacgaactctctgactacctcgagcggacaagtccacagtagtgatctccagggcaattacatacagagccccgtgtctgaagaaacccaggctcagaacattcaagttagcactgcccagcctgtggtccaacacctccagctgcaggagtcccagcagccaacctcacaagcccagattgtccaaggtattactccacagacaattcacggggtacaggccagtggtcagaatattagccagcaggctctgcagaaccttcagttacagctaaacccaggcacctttctgatccaagcacagactgttaccccaagcggccaggtgacctggcagaccttccaggtacagggagtccagaatttgcagaatctgcagatccagaatacggccgcccagcagattactcttactcccgtgcagaccctcacactgggacaggtcgcagcaggaggcgcctttacttctactccagtttcgctgagcacaggccaactgcctaacctgcagaccgtcaccgtgaacagcattgattcagcgggtatccaacttcaccctggggagaacgcagactcccctgccgatatcaggatcaaagaggaggagccagacccagaggagtggcagctgagtggggactcaacactgaacaccaacgatctcacccatctccgggtgcaagtcgtcgatgaagaaggggatcagcagcatcaggagggaaaaaggctcagacgcgttgcttgtacctgtcctaactgcaaagaaggggggggacgaggtaccaatttgggcaaaaagaaacagcacatttgccacataccaggctgcggaaaggtctacggaaaaacctctcacctcagagcccacctcagatggcacagcggagagcgtccttttgtctgcaactggatgtattgcggcaaacgctttacccgtagcgatgaattgcaacggcaccgccggacccacaccggagagaagaagtttgtatgtcccgagtgtagtaaacgcttcatgcgctctgatcatctggcaaagcacataaaaacgcaccagaataagaagggtattcattcctcatccactgtgctggcatctgttgaggctgcccgtgatgatacactgattacagccggcggtaccaccctcatactggccaacattcagcaagggtctgtctcaggaatcggcaccgtcaacacatctgctacctctaaccaggacatcctcacaaataccgagatccctcttcagttggtcaccgtcagcggcaatgaaaccatggaatag

SEQ ID NO: 135811 - DNA, 2187 bp, synthetic construct
  misc_feature 1..2187: note = Description of Artificial Sequence: Synthetic coding sequence
  source 1..2187: mol_type = other DNA
atggctgctcttgacgttgacagtggcggcggtgggggtggcggcggcggacatggtgagtacctacaacagcaacagcagcacggcaacggggccgtcgctgctgccgcagctgcacagaccggggatctcgcctctgctcagttggggggcgctccgaaccgttgggaagtcctgtctgcaacacccaccaccatcaaggacgaggcggggaatctcgtgcagatcccttctgctgctacatcgtccggccagtacgtgttgccactccagaacctgcaaaaccagcaaatcttctccgtggcaccaggctccgactcttctaacgggacagtgtcttctgtccaataccaggtgatcccacagatccaatcggcggatggacagcaggttcagatcgggttcacaggctccagcgacaatggaggcattaaccaggagagttcccagatccaaatcatccctggaagtaatcagaccttactagcctcaggcacaccatccgccaatatccagaatttgatcccccaaacgggccaagtgcaggtgcagggcgtcgccatagggggttccagttttccaggtcagacgcaggtggtggctaatgtgcctttaggcctcccaggtaacataacgttcgtccctattaatagcgtcgatcttgacagcctcggcctctctggttccagtcagacaatgactgctggtattaacgccgatggacaccttattaacacaggccaagctatggattcaagcgataatagtgaaaggactggagagcgtgtttcacccgatatcaacgagacaaacacagacaccgacctgtttgtgcccacaagctcatcctcgcagttacctgtgaccatcgacagcacaggtatccttcagcaaaatactaacagtttgactactagctctggacaggtccattcctccgatctgcaggggaattatatacagtctcctgtgtctgaggagacccaggctcaaaatatccaggtttcgactgcccaaccagtcgtgcagcatttgcagctccaggagagtcagcagcccacgtcccaggcccaaatcgtgcaaggtatcacgccccagaccatacacggggttcaggccagcggtcaaaatatttcacaacaagcactgcagaatctgcaactacaactgaaccctgggacgttcctcatccaagcacagaccgtcacccccagcggccaggtgacatggcagactttccaggtgcagggcgtccaaaatctccagaacctacagatccagaacacagccgcccagcagattacgctgactccagtgcagacactcactctgggtcaggtggcagccggcggtgccttcacaagcacccccgtgtcgctcagtacgggccaattacccaaccttcaaacagtaacagtgaattccatagatagtgctggcattcagcttcacccaggagaaaacgccgactccccagcggacattagaattaaggaagaagagccggacccggaggaatggcagctcagcggagactctaccttgaacactaacgaccttactcacttgcgcgtgcaggttgtcgacgaggagggcgaccaacagcaccaggaaggcaaaaggctgcggagggtggcctgcacctgccccaactgtaaggaaggcggtgggcggggtacaaacctcgggaaaaagaagcagcatatctgccacatcccaggatgtggaaaagtctacggtaaaaccagccacctgcgggcacatctgcggtggcattcaggggaaagacctttcgtttgcaactggatgtattgtggtaagcggtttactcggtctgacgagctgcagagacatcgcagaacccacaccggagaaaagaaatttgtctgcccagaatgctcaaaacggttcatgcgatcagatcatctggccaagcatataaagacccatcagaataagaagggaattcattctagctccactgtattggcctctgtggaagcagccagggatgacaccctgatcactgcaggaggaaccactttgattctagccaacattcagcagggttcagtgtctgggattgggaccgtgaacacctcagccacctccaaccaggatattttgactaatacagagatacctctccagctggtgaccgtcagcgggaatgagaccatggaatag

SEQ ID NO: 135812 - DNA, 1545 bp, synthetic construct
  misc_feature 1..1545: note = Description of Artificial Sequence: Synthetic coding sequence
  source 1..1545: mol_type = other DNA
atggtgtgggaagtcaagaccaaccaaatgcccaacgctgtgcagaagctgctgctggtgatggataaaagggctagcgggatgaatgactcattggagctactgcaatgtaatgagaacctcccgtcgagcccaggctataactcctgtgacgagcatatggagctcgacgatctccccgaactccaggcagttcaaagcgatcctacacagagcgggatgtaccagttgagttctgacgtcagccatcaggaatatccaagaagctcttggaatcaaaacacctcagatatccctgagaccacctatcgggaaaacgaagtcgactggctgacggagttagcgaacattgctacttctccccagtcacccttaatgcagtgttcgttctataataggagttccccagttcacattatcgctacttctaagagcctccacagttacgcacgccctccgccagtcagcagcagctcgaaatccgagcccgcttttcctcatcaccattggaaggaggagacccctgtccgtcacgagagggctaattccgagtccgagtctggtatattctgcatgtctagcctgtcggatgacgatgaccttggctggtgtaactcatggccaagcaccgtgtggcactgctttcttaaggggacccgactttgcttccacaaaggcagcaataaggagtggcaggacgtggaggacttcgcgcgggccgaaggatgtgacaatgaggaagacttgcagatgggcatacataaggggtatgggtctgatgggctgaagcttctctctcacgaggagtctgtatcattcggcgagtcagtgctaaagctaacattcgatcctgggactgttgaggacggcctcctgaccgtagaatgcaaactcgatcatccattctacgtcaagaataaggggtggtccagtttttatccctccttaaccgtggtgcaacacggaatcccatgctgcgaggtgcacatcggagatgtatgtctgcctccgggtcacccagacgctatcaatttcgatgactcgggagtgtttgatacgtttaaatcctatgactttactccaatggacagttcagccgtgtatgtgctatcttccatggcccggcagaggcgggccagtctgagctgcgggggtccaggcggacaagattttgccaggtcaggcttcagtaagaattgcggaagtccaggaagtagtcagttgagtagtaattcactttacgccaaggctgtcaaaaatcattcctccgggacagtttcagctacctcgcctaacaaatgtaaacggccgatgaacgcatttatgttgttcgccaaaaaataccgcgttgaatacacccaaatgtaccccggcaaggataaccgcgccatcagtgttattttaggcgatcgttggaagaagatgaagaatgaagaacgccgcatgtataccttggaggccaaggccctggccgaggaacagaaacgcctgaacccggactgctggaagagaaaaaggaccaacagtggctcccaacagcactag

SEQ ID NO: 135813 - DNA, 432 bp, synthetic construct
  misc_feature 1..432: note = Description of Artificial Sequence: Synthetic coding sequence
  source 1..432: mol_type = other DNA
atgtccgatcagaaaaaagaggaagaggaggaagcagccgcagccgctgctatggctacagaagggggcaaaactagcgaaccagaaaataacaataaaaaaccaaagacaagcggatcacaggatagtcagccgtcccccctggctctcctggctgccacttgttccaaaatcggcacccctggagaaaaccaggcgactgggcagcagcagagaaatctgttggagacattaggtaacctgttgccgccacttctgctgcttcagaagagaatcactttcctgaaccagcctctcgttcgactcgtgttgcccgccgtgattacaggcgtgcacctgctccagaagcttaaccaggtgatcctgcctccactggttaacttcaaatcttacaagtacaagatccaggttgtcgtctattcgacaaaatag

SEQ ID NO: 135814 - DNA, 1296 bp, synthetic construct
  misc_feature 1..1296: note = Description of Artificial Sequence: Synthetic coding sequence
  source 1..1296: mol_type = other DNA
atggctagctcactgctcgaggaggaggtgcattacgggagcagcccgctcgccatgttaaccgccgcatgctccaagtttgggggctcctctcctctgcgcgattctacaaccttggggaaagcaggaactaagaagccatattcagtcggctccgacctgtcagcttccaagactatgggagacgcctaccctgcacctttcacttccacaaatgggttgctgtcccctgccggatcaccccctgcacctaccagtgggtacgctaatgattacccgccattttcgcattcgtttcctggcccaacgggcacccaggaccccgggcttctggtgccaaaaggccattctagtagcgactgcctaccctcggtgtatacatcactggatatgacacacccctatggcagctggtataaggccggtattcacgctggaattagtcctggccccggcaacactcctactccctggtgggatatgcaccctgggggcaattggctaggaggcgggcagggacagggtgatggactgcaagggacgttaccgaccgggccagcccagccgccgctgaatccccaactccctacctacccttctgatttcgcaccactcaatcccgctccctaccctgccccacacttgctgcagcccgggcctcagcacgtccttccccaggacgtctataaaccaaaagccgtgggtaattcaggccagctggaaggtagtgggggagctaaacctccaagaggcgcaagcaccgggggcagcggcggttatgggggaagtggcgccggccgcagctcatgtgattgtccaaactgccaggagctggaaagactgggggcagccgccgccggacttaggaaaaagcctattcattcctgtcacatccccggctgcggaaaagtgtacgggaaggcttctcacctgaaggcacaccttcgatggcatacaggagagaggccctttgtgtgtaactggctcttctgcggtaaaaggttcacaagatcagatgagctggagagacacgtgcgtacccacactcgagagaagaaattcacctgcctcctgtgcagcaagcggtttacccgcagcgatcatctgtccaagcatcagagaacacatggcgaaccagggcccggtcctccaccatctggccccaaggagttgggggaaggccgcagtacaggcgaggaagaggcgtctcagaccccccgtccgtccgcttcgcccgccacacctgagaaggcccccggcggcagcccagagcagtccaacctgcttgagatctag

SEQ ID NO: 135815 - DNA, 1296 bp, synthetic construct
  misc_feature 1..1296: note = Description of Artificial Sequence: Synthetic coding sequence
  source 1..1296: mol_type = other DNA
atggcatcctcactgcttgaggaggaggtgcattacggctcctcccctttagccatgctcacggcagcatgtagcaaattcggcggaagttctccactgagagattctacaacactcgggaaagccggcaccaaaaagccatacagcgtggggagtgaccttagcgcttccaagacaatgggcgacgcctacccggcgccgttcacttccaccaacggcctgctgtcaccagcaggctctccaccagcacctactagcggctatgccaatgactaccccccttttagtcacagcttcccgggcccaactggaacccaagatccgggcctccttgttcccaaggggcactcatccagcgactgcctcccttccgtttacacaagtttagatatgactcatccatatggcagctggtacaaggccggaattcatgctgggattagtcccggaccgggaaataccccaaccccttggtgggacatgcaccctggaggcaactggctgggcggcggacaaggccagggggatggcctgcaaggcactttgccaacaggacccgctcagccgcccctgaacccacagctccccacctacccctctgattttgcacctttgaatccagccccctacccagctcctcacctcctgcagccaggaccccagcacgtactgccgcaagacgtctataagcctaaggcagtgggaaactctgggcagttggaaggatctggtggtgcaaagcctccccgaggcgcctcgacgggcggcagcggtggttacggcggtagcggggccggacggtcctcatgcgattgtcccaactgtcaggagttagagaggctgggagcagccgcagctggcctgaggaaaaagccgattcactcatgtcacatcccggggtgtggaaaagtctacggaaaagcttcacatcttaaggcccacttgcggtggcatactggagaaagaccttttgtgtgcaattggctcttctgcggcaagaggtttaccaggtcagacgagctcgagaggcacgtccgaacccacacccgcgagaagaaattcacatgcctgctatgctcaaagcgctttaccagaagcgatcacctgtctaagcaccagcgcacgcacggtgaacctggtccggggccaccccctagcggtccaaaagagctcggcgagggtagatctaccggcgaggaagaagcatctcagactccccgtccctccgcttcgcccgccactccagaaaaagcacccgggggctctccggaacagtcaaatctgttggagatttag

SEQ ID NO: 135816 - DNA, 1242 bp, synthetic construct
  misc_feature 1..1242: note = Description of Artificial Sequence: Synthetic coding sequence
  source 1..1242: mol_type = other DNA
atgctcactgctgcctgctctaagtttggcggctctagccccctccgagactctacgacgcttggtaaggccgggactaaaaagccctatagcgtagggagcgatctctccgccagcaaaaccatgggtgatgcataccctgcccccttcacctcaacgaatgggctgctgagtcctgccggatcaccaccggcccctacttctggttacgccaacgattaccccccgtttagccacagcttccctgggcctacaggtacacaggaccccggtctgctagtgcccaaagggcacagctccagcgattgcctcccgtccgtctacacttcccttgacatgacacacccatatggctcttggtacaaggctgggatccatgctggcatttcgccaggccctggcaacactcccactccctggtgggatatgcatccgggcggcaattggcttgggggtgggcaggggcagggagacggcttgcagggaacccttccaacgggacctgcgcaaccacctctgaaccctcagctcccaacctacccttccgatttcgcgccactcaacccggccccttatccagcaccccatttgctccagcccgggccacagcacgtgctcccccaggacgtttacaagcctaaggccgtgggcaattctggacagcttgaggggagcggaggggcgaaacctccacgcggcgcttctaccggcggcagcggcgggtacggagggagtggcgcaggtaggagctcatgcgactgtccaaactgtcaggagctggagcgtttgggtgccgctgcggcaggcctccgtaagaaaccgattcactcctgccatattcccggatgtggcaaagtctatgggaaggcaagccacctcaaggctcacctgcggtggcatacaggggagcggccattcgtttgcaactggcttttctgcgggaagagatttactaggtccgatgagctagaacgccacgtgaggacccacaccagagagaagaagttcacttgcctcctgtgcagcaaacgatttacaaggagtgatcacttgagcaagcaccaaaggacccacggggagcccggcccagggcccccaccctcaggaccaaaagaactgggtgaggggcggtccacgggggaggaagaggcatctcagacccctcgaccatccgcatctcctgcaacgcccgagaaagcacccggcgggtcccccgaacaatccaaccttttagagatctag

SEQ ID NO: 135817 - DNA, 1401 bp, synthetic construct
  misc_feature 1..1401: note = Description of Artificial Sequence: Synthetic coding sequence
  source 1..1401: mol_type = other DNA
atggcaacctctctgctaggcgaggagcccagactggggtccacacctctcgctatgctcgccgcaacttgcaataagatcggctcgccctcaccatctccttcatcgctgagcgattctagtagttcttttggtaagggttttcatccctggaagaggtcttcctccagcagcagcgcctcgtgtaacgtggttggatcttccctgagtagctttggtgtgtccggggcaagtcgcaacggaggcagctcttccgcagcggccgcggccgcagccgccgcagccgcagccgccgccctggtgtcggattcattctcttgcggggggagtccgggaagctccgctttctccctcaccagttcgggtggaagctcagcccactcccaagacggcagtcatcaacctgtcttcatctcaaaggtgcacacgtctgtcgacggactccaggggatataccccagagtgggaatggcgcatccttacgagagctggttcaagccatcacatccgggcctcggtgctgccggggaggttggatccgccggagcaagcagttggtgggatgtcggcgctgggtggattgatgtccagaaccctaattccgccgcagccttgcctggctctctgcatccagctgccggtgggctccagacatcactccatagccctttaggcggttacaactctgactactcagggctgtcccactcggctttctcctctggggcttcttcccatctgctgtctcccgccggtcaacacctcatggacggctttaagcccgtccttcccggctcttaccccgatagcgctccaagtccactggcaggagcgggtggctctatgctgtccgccggaccgtccgcccccctgggaggatcaccacgctcttcagctaggcgctactcaggcagggccacctgtgattgccctaactgccaagaggcggagagactgggccctgccggcgcgtctttgcgtcgaaaaggattgcactcctgtcacatccccggttgcgggaaggtttatggaaagactagtcacctcaaggcccatctgcggtggcatacaggggagcgcccttttgtatgcaactggctattttgcgggaaacggttcactcgcagcgacgagctacagagacatctccgcacacataccggcgagaagcgtttcgcttgccccgtgtgcaataaaagatttatgagaagtgaccacctcagcaaacatgtcaagacccactccggaggaggcggtggcggggggagcgccggctctgggagcggcggaaaaaaaggaagcgataccgacagcgaacattctgcagccggctctcctccatgccactctcccgagttattgcagcctcccgagcccggacaccgcaacggccttgaatag

SEQ ID NO: 135818 - DNA, 1473 bp, synthetic construct
  misc_feature 1..1473: note = Description of Artificial Sequence: Synthetic coding sequence
  source 1..1473: mol_type = other DNA
atgctcgccgcaacttgtaacaaaatcggtagccctagccctagcccatcctcactgtccgactctagtagctctttcgggaaaggattccatccctggaagcgctctagctcaagttcttccgcttcttgcaatgtggtgggatcctccctttcaagctttggagtgagcggggcctcccgcaacggagggagtagctccgcagctgcagccgctgcagcagcggctgccgctgcagctgccctggttagcgatagtttcagctgcgggggctcccctgggtccagcgcattttccctcacttcctccagcgcagctgctgcggccgctgccgcagctgccgctgcctcaagttctccttttgccaacgactattcggtgttccaggcgcctggagtgtccggaggctctggcggtgggggcggcggcgggggcggcggctctagtgcacattcccaggatggatctcatcaacccgtcttcatctcaaaggtgcacacctctgttgatggactgcaggggatctatcctagggtgggcatggcccacccttacgagagctggttcaagccctcccaccccggattgggcgccgctggcgaagtcgggtctgccggagctagcagctggtgggacgtgggggcaggttggatcgacgttcagaatcccaatagtgctgctgctctgccaggcagtctccaccctgccgccggtggacttcaaacctccctccattccccccttggcggatataactcagattattcgggtctgagccactctgccttctcatcgggcgcaagctcccatctgctgtcacccgccggccaacacctcatggacggattcaagcctgttctgcccggctcttaccccgattccgctccgagccccctggcaggcgcagggggctcaatgcttagcgccgggcccagcgcccctctgggaggcagtcctcgctccagtgcccggcgctatagcggtagggccacgtgcgactgtcctaattgccaggaggccgaacgtctcgggccggcaggagccagcttacgtagaaaagggttacacagctgccatattccgggatgcggtaaagtgtacggcaagacctcccacctcaaagcccaccttcggtggcacacgggtgagaggccgttcgtgtgcaactggctgttttgtggtaagcgttttacaaggtccgatgagctccagcggcaccttaggacccatactggcgagaaacgtttcgcgtgtcccgtctgtaacaagcggttcatgcggagtgatcatctgtctaagcacgtgaagactcattcaggaggtggagggggggggggtagcgccggtagcgggagcggtggcaaaaaaggttctgacaccgacagtgagcatagcgcagcggggtcccctccatgtcattctccagagctccttcagcctcccgaaccagggcaccgaaatggcctggagtag

SEQ ID NO: 135819 - DNA, 1527 bp, synthetic construct
  misc_feature 1..1527: note = Description of Artificial Sequence: Synthetic coding sequence
  source 1..1527: mol_type = other DNA
atggcaactagtctgctaggggaagaacctcgcctgggctcaacccctctggctatgctggccgccacttgcaataagattggcagcccaagcccttccccaagctcattgagcgactcttcgtcttcgtttggaaagggcttccatccgtggaaaagatcttctagtagctcatccgcatcatgtaatgtggttggcagtagcctctcgtcctttggcgtttcaggagcatcacgcaacggcggtagttccagcgccgccgctgccgcagcagcagccgcagcagctgccgcggcgctagtgtcagacagcttcagctgtggcggcagcccagggtcctctgctttcagtttaacctcctcgagtgctgcggcagcagcagccgccgctgcagcggccgcttcttctagccccttcgctaatgattactccgtgttccaggcccctggtgtttccggcgggtctggcggcggcgggggaggaggcggcggcggcagctccgcccacagtcaggatggaagccatcagccggtctttattagtaaagtgcatacttccgtggacggcttacagggaatctaccccagagtgggtatggcccacccctatgagtcctggtttaagccatcccaccccggtctaggggccgccggagaagtgggcagtgccggagcttcttcctggtgggacgtcggcgccgggtggattgatgtccagaaccctaacagcgccgccgccctgccggggtccctccatcccgcggctggcggcctgcaaacctccctgcacagcccactgggaggatacaatagcgattactcagggctgtctcattccgccttctctagcggcgcctctagtcatctgctttcacccgccgggcaacatctgatggacgggttcaagccagttttgcctggttcctatccggactcagccccctctcccctcgccggcgcaggcgggtctatgctgtccgcgggcccatccgccccgctgggggggtcccccagaagctctgcgaggaggtactcgggccgcgccacttgcgactgtcctaactgtcaagaggccgaaaggctaggcccagccggtgccagcctacggcggaaggggctccattcgtgccatattcctggttgcgggaaagtttatggaaagacctctcacctaaaggctcaccttcggtggcacaccggggagaggccttttgtttgcaattggcttttctgtggcaaacgctttactcgctccgatgagctgcagcggcatctccgtacacatacgggtgagaagcgctttgcatgtcccgtttgcaacaagcggttcatgcgatctgatcacctgtctaagcatgtcaagacacacagcggtggcggcggaggcggcggcagcgcaggctctggtagcggcggcaaaaaaggctcagatacagattcagagcacagcgccgctggatctcctccatgtcatagcccggagctactgcagccccccgaaccaggacataggaacggactggaatag

SEQ ID NO: 135820 - DNA, 294 bp, synthetic construct
  misc_feature 1..294: note = Description of Artificial Sequence: Synthetic coding sequence
  source 1..294: mol_type = other DNA
atggacaaacagtcatcagccggcggcgtgaaacgcagcgtgccatgcgatagcaacgaagccaatgagatgatgcctgagacacctactggagactcagatccccagccagcacctaagaagatgaagacctcagagagttccaccattttagttgtaaggtatcgcagaaacttcaaaaggacaagccctgaagaactgctcaacgatcatgcccgggaaaaccggataaatcccctgcaaatggaggaggaggagttcatggaaatcatggttgaaattccagcaaaatag

SEQ ID NO: 135821 - DNA, 294 bp, synthetic construct
  misc_feature 1..294: note = Description of Artificial Sequence: Synthetic coding sequence
  source 1..294: mol_type = other DNA
atggataaacagagttccgcagggggagtaaaacgtagcgtaccatgcgaaagcaacgaagtgaacgaaacaatgcccgaaacgcccacgggggattctgacccacaacctgcccctaaaaagatgaaaacatccgagagttctacaatactcgtggtcaggtaccggcgcaacgtcaagcgaacatctcccgaagaattgctcaacgaccatgcccgggaaaatagaataaaccccttgcaaatggaggaggaagagtttatggagattatggtcgagatccctgccaagtag

SEQ ID NO: 135822 - DNA, 1308 bp, synthetic construct
  misc_feature 1..1308: note = Description of Artificial Sequence: Synthetic coding sequence
  source 1..1308: mol_type = other DNA
atgctgcctgctcgatgtgcgcggctattgactccgcaccttctgctggttctggttcagctcagtcccgccagaggccaccggacgacaggccccagattcctcatttcagacagggacccgcaatgtaatctgcactgtagtagaacacagccgaaacctatctgcgcttccgatgggcgatcttacgaatctatgtgcgaatatcaaagagccaagtgcagggacccaactttgggagtggtgcaccggggccgttgtaaagacgctggtcagtcaaagtgccgactggagagagcccaggcactcgaacaggccaaaaaacctcaggaagccgttttcgtccctgagtgtggcgaggacggctctttcacacaggtccagtgccacacatacactggctactgctggtgtgttacacctgatgggaagcccattagtggttcaagcgtgcaaaataaaaccccagtgtgttccggcagcgttaccgataaaccccttagtcagggtaacagcggacgaaaagatgatggatcaaagcctaccccgacgatggagacccaacctgtctttgacggggacgaaattactgcaccaacgttatggatcaaacacctggtgatcaaggatagcaaacttaacaacacgaacataagaaactcggagaaggtctatagctgcgatcaggaacggcagtctgccttggaggaggcccagcagaatccacgggaggggatcgttatccccgaatgtgccccaggcgggctctacaagccagttcaatgccatcagtctactggatattgctggtgcgtcttagtagacactggccgacctctgccagggaccagcactcgatatgtgatgcctagctgcgaatcggatgcccgagctaaaacaaccgaagcggacgatccctttaaagatcgcgagcttcccgggtgtcctgaaggcaagaagatggaatttatcacgtctcttcttgacgccttaaccacagacatggtgcaggccatcaattcagccgcccctaccgggggaggacggttcagtgagccagacccgtcgcacacacttgaagaacgggtggtgcactggtacttttcacaattggactctaactcttctaacgacattaataaacgggaaatgaaaccattcaaacggtacgtcaagaagaaggcaaaaccaaaaaaatgtgcaagacgtttcaccgattattgtgacttgaacaaagataaagttatttcactgcctgaactcaagggctgcttgggggttagcaaagaggtcggacggttggtgtag

SEQ ID NO: 135823 - DNA, 1305 bp, synthetic construct
  misc_feature 1..1305: note = Description of Artificial Sequence: Synthetic coding sequence
  source 1..1305: mol_type = other DNA
atgctccccgcccggtgcgctcggctcctcacccctcatctgctacttgtacttgtgcagttgtctcccgcccggggccaccggacaaccggccctcggtttctaatatcagatcgcgatccgcagtgcaatctacactgcagccggacacagcctaagcccatttgtgcgagcgacgggaggtcctatgagagcatgtgtgaataccaaagagcaaagtgtcgcgaccctacacttggggtcgtccatcggggaaggtgcaaagatgccggacaatcaaaatgtcgcttggaaagagctcaggccctcgagcaggcaaagaagccacaggaagccgtctttgtccctgaatgcggggaagatgggtctttcacacaggtgcagtgccacacatataccgggtactgctggtgtgtgaccccagacggaaagcctatctctggctccagtgtccaaaacaagacacctgtctgctctggatccgttacggacaagccgcttagccagggtaattcaggcaggaaagacgacggcagcaaaccaacacccaccatggaaacccaaccagtgtttgacggggatgaaatcacggcaccaactttatggattaaacacctcgtgattaaggacagtaaactgaacaataccaacatccgaaactcggagaaagtgtacagctgcgaccaagaacgtcagtcagctctcgaagaagctcagcagaacccaagggaagggatcgtaatccctgagtgtgccccaggcggcctgtacaagcctgtccagtgtcaccagtcaaccggttactgttggtgtgtactggtggatacaggcaggcctctgccagggacaagcactcgctacgtcatgccgagttgcgagtccgacgcgagggctaaaactactgaagctgacgatcccttcaaagaccgtgaactgccgggctgccccgagggaaagaaaatggagttcattacctccttacttgacgcactgactactgacatggtccaggctatcaattccgctgctcccacgggtggcggtaggttcagcgagccagatccctcccacactttggaggagcgtgtagtccattggtattttagccagttggacagcaacagctccaacgatattaataagcgggaaatgaagccctttaagcggtacgtaaagaagaaggccaagccaaagaaatgtgcccgtaggtttaccgactattgcgatttaaataaagacaaagtaatctctctgccggaactgaaaggctgtctcggggtctcaaaagaaggcagactggtctag

SEQ ID NO: 135824 - DNA, 1374 bp, synthetic construct
  misc_feature 1..1374: note = Description of Artificial Sequence: Synthetic coding sequence
  source 1..1374: mol_type = other DNA
atgctgttgcctcagctgtgctggttgcctcttctcgccgggcttttaccaccagttcctgctcagaagtttagcgctctgacctttctgcgcgtggatcaggacaaggataaggattgttctcttgactgcgcaggcagcccccagaagccattatgcgcttcagatgggcgtacatttttaagccgctgtgagtttcaaagagctaagtgtaaagacccgcagctcgaaattgcctacagagggaattgcaaggatgtttctcgctgcgtcgcagaaagaaaatatactcaagaacaggcacggaaggagttccagcaagtttttattcctgagtgcaacgacgacggcacctactcacaagtgcagtgccatagctacacagggtactgctggtgtgtgacccccaatggaaggccaatatcgggaacagcggtggcgcataaaacccctagatgcccgggatccgtgaacgaaaagctgcctcagagggagggcaccggaaagaccgtctccttacaaatctttagtgtgttgaacagcgatgacgctgcggctccagctctggaaacccagccgcaaggggacgaggaagatatcgcttcaagataccctacattgtggaccgaacaagtgaaatccaggcaaaataaaactaataaaaatagcgtgtcttcatgtgaccaagaacaccagtccgctctggaggaggccaaacagccaaaaaacgacaacgtggtaatccctgaatgtgcgcatggcggcctctacaagccggtccagtgccatccaagcaccggttattgctggtgtgtgctggtagacactgggcgacctattccgggaacctccaccagatatgagcagcctaaatgcgacaatacggcaagggcgcacccagctaaggcaagagatctgtataagggacgccagctccaggggtgtccgggagcaaagaaacacgagtttctcacatccgtgctggacgcactcagcactgatatggtacacgcggcctccgacccatccagttccagtgggcgcctttcagaaccagacccttcccatactctggaggaaagagtggtccactggtattttaaactgcttgataaaaattccagcggcgacattggtaagaaagagataaaaccctttaaacgatttcttcgaaagaaaagtaaaccaaagaagtgcgtcaaaaaattcgtcgagtactgtgacgtgaacaacgacaaaagcatctcagtgcaggaactcatgggttgcctcggagttgccaaagaggacgggaaggccgacactaagaaacggcacactccaagagggcatgcggagagcaccagtaaccgacagcctaggaaacaaggatag

SEQ ID NO: 135825 - DNA, 1341 bp, synthetic construct
  misc_feature 1..1341: note = Description of Artificial Sequence: Synthetic coding sequence
  source 1..1341: mol_type = other DNA
atgctgctgcctcagttatgttggctgccacttctcgcgggactccttccacccgtacctgcccaaaaattttcagcactgacattcctcagagttgatcaagataaagacaaggattgtagccttgactgcgccggaagcccgcagaaacctctatgtgcgagtgacggtaggacattcctgagcaggtgcgagttccagagagctaaatgtaaggaccctcagctggagattgcataccgcggtaactgcaaggacgtgtcccggtgcgtcgctgaaagaaagtatactcaggagcaggcaaggaaggagtttcaacaggttttcattccagaatgcaatgacgacggcacatatagtcaggtgcaatgtcactcttacacaggatattgctggtgcgtaaccccaaacggacggcctatttccggtacagctgtggcccacaagacccccagatgccccggaagtgtgaacgaaaaactaccccagcgcgaagggactggcaagaccgacgacgccgccgcgccagcactggagactcagccacagggcgacgaagaggacatagcttcccgctaccctacactctggactgaacaggtcaagtcccgccaaaacaagactaataaaaatagcgttagttcctgtgaccaggaacaccagtccgcgctcgaagaggccaaacaacccaagaacgacaatgtagtaattcctgaatgcgcgcatggcggattatataaacccgttcagtgccacccgagcacaggttactgctggtgcgtgttagtggacaccggccgacccattcctggcacctcgacccggtacgaacagcccaagtgtgataacacagcgcgggctcatccagctaaagctcgagatctgtacaaaggccggcagttgcagggatgccctggggccaagaaacatgaattcctgacatccgtgctcgatgcattatcaacagatatggtacatgccgcgtctgatccgagttctagctccgggcggttaagcgagcctgacccaagccacactttagaggaacgagttgttcattggtattttaagttgctggacaaaaatagttctggggatataggcaagaaagagatcaagccatttaagaggtttctgagaaagaagagtaagcccaagaaatgcgtgaagaagtttgtggagtattgtgacgtaaataacgataagtccatcagtgttcaggaattgatgggatgcttgggcgtggccaaggaagatggaaaagccgacacgaagaaacgccatactccgagaggccacgctgaatctacctccaatcggcagccacgtaaacaaggatag

SEQ ID NO: 135826 - DNA, 1347 bp, synthetic construct
  misc_feature 1..1347: note = Description of Artificial Sequence: Synthetic coding sequence
  source 1..1347: mol_type = other DNA
atgctcctgccccagctttgctggttgcccctgctggcagggctgcttccccctgtgcccgcccaaaagttctctgcactcacctttctgagagtggatcaagacaaggataaggattgctccctcgactgtgctggtagcccacagaagccgctgtgcgctagtgatgggcgcaccttcttatcccgatgcgagttccagagagccaaatgcaaagatccacaactggaaatcgcatacagaggcaattgcaaggatgtatcacgctgtgtcgcagagcgcaaatatacccaagaacaagcgagaaaagagttccaacaggtgtttattccggaatgtaatgatgacgggacatattcgcaagtgcagtgtcactcgtacacgggctattgttggtgcgtgactccaaacggcagaccgatatccggtaccgcggtggcacacaaaactcctagatgcccggggagcgtgaatgagaagctgcctcaacgtgaagggaccggcaagactgatgatgccgcagcacctgcactggagactcagcctcaaggagatgaagaagatatcgcctcaagatatccaacactgtggacggagcaagtgaaatctcgccaaaataaaaccaacaagaatagtgtctcctcatgcgaccaggaacaccagtctgccttggaggaagctaagcagccgaaaaatgacaatgtcgtgatccccgagtgcgcacatggtgggctgtacaaaccggttcagtgccatccttccactgggtactgctggtgtgtgctggtggatacgggccgtcccatccctgggacaagcacacgctacgagcaaccaaaatgtgataacactgcccgagcccaccctgcgaaggcaagggatttatacaaaggccggcagctgcagggttgcccaggggctaaaaaacacgagttcctgacctcagtgctggacgcgttgtctacggacatggttcacgctgcctctgacccttccagcagttccggtcggctgtcagaacctgatccatcacatacattggaggagagggtagtgcactggtacttcaagctgctcgacaagaatagcagcggtgacataggtaaaaaggaaattaaacctttcaaacgcttcctacggaagaagtcaaagcctaagaagtgtgttaagaaatttgttgagtactgcgacgtgaacaatgacaagagtatatctgtgcaagaactgatgggatgcctcggcgttgctaaggaggacggaaaggccgacaccaaaaaaagacacactcccaggggccatgccgagagcaccagcaaccgacaggagaatcccaggaaagaaggctag

SEQ ID NO: 135827 - DNA, 255 bp, synthetic construct
  misc_feature 1..255: note = Description of Artificial Sequence: Synthetic coding sequence
  source 1..255: mol_type = other DNA
aagaagagcaagcctaagaaatgtgtgaagaagttcgtggagtactgcgacgttaacaatgataaatcaatctccgtccaggaattgatggggtgtctgggggtggccaaggaagacggaaaggctgacacaaagaaacgccacactccccgagggcacgctgagagcacaagtaacagacaagatgctatggtggtgagctcgcggcctaaggcaaccacccacaggaaatctcggaccctgtcaagacgctag

SEQ ID NO: 135828 - DNA, 1275 bp, synthetic construct
  misc_feature 1..1275: note = Description of Artificial Sequence: Synthetic coding sequence
  source 1..1275: mol_type = other DNA
atgagagcgcctgggtgcgggcggcttgtgttgcccctcctgctgttagcagctgccgcccttgcagaaggcgatgcaaagggactgaaggagggggagacccctgggaattttatggaggatgagcagtggctgagttccatcagtcagtatagtggtaaaataaaacactggaaccggtttagagatgaggtcgaggacgactacattaagtcctgggaggacaatcagcagggagatgaggccctagacacaacaaaagacccgtgccagaaggtgaagtgttccaggcataaagtgtgcatagcacagggataccagagagctatgtgtatctccaggaaaaagctcgaacacagaatcaaacagccaaccgtaaaattgcatgggaacaaagatagcatatgtaagccatgtcacatggctcagctggcaagcgtttgcggatcagacgggcacacttactcatccgtgtgtaagttagagcaacaagcgtgtctctctagtaaacaactcgcggtccgctgcgaaggtccttgtccctgtcctaccgagcaggccgccacatccactgccgacgggaagccagagacgtgcaccggccaggatctcgcagacctcggagacaggttgagggattggtttcagttgttgcatgaaaattcaaagcagaatggttcagcttccagcgttgccggacccgcaagcggcttggacaaatcgctcggggcttcatgcaaagactccatcggttggatgttctctaagctagacacctccgcagatctttttctggatcagaccgaactcgcagccatcaacctggataaatatgaggtttgcattcgcccctttttcaactcttgcgatacctacaaagatgggcgggtcagtaccgctgaatggtgtttctgcttctggcgcgagaagcctccctgtctcgccgagctcgaaaggatccaaattcaggaagcagctaagaagaaacctggcatattcattccatcctgcgatgaagatggatattatagaaaaatgcagtgcgaccagtcttccggtgattgctggtgtgtcgatcagttaggactggaattgacaggaactcgcacgcacggatctcctgattgcgacgacattgtcggctttagcggcgactttggctcgggagttggatgggaagatgaggaagagaaggagactgaagaggcaggagaggaggcagaggaagaggagggtgaagctggggaggccgacgacggtggatacatctggtag

SEQ ID NO: 135829 - DNA, 1266 bp, synthetic construct
  misc_feature 1..1266: note = Description of Artificial Sequence: Synthetic coding sequence
  source 1..1266: mol_type = other DNA
atgagagctccaggatgtggcagacttgttctgcccttgctgctgttggccgcagcggctctggccgagggggacgcgaaggggctgaaggaaggagagactcctggcaattttatggaggacgaacaatggctgtcatctatcagccagtatagcggcaaaattaagcactggaaccgcttcagagacgacgactatataaagagctgggaggacaaccagcaaggggacgaggccctcgacactaccaaggatccgtgccaaaaggtcaagtgctcccggcataaggtgtgcattgctcagggttaccagagagctatgtgcatcagcaggaagaagttggagcatcgcatcaaacagccaaccgtcaaattgcatgggaacaaagattccatatgtaaaccctgtcatatggcacagcttgcatcggtctgtgggtccgatggacatacttattcatctgtttgtaagctggagcagcaagcatgcctgagctcaaaacagctggcagtgaggtgtgaggggccatgcccctgtcccacagagcaggccgctactagcacagctgatggcaaacctgagacatgtacggggcaagacctggcagacctaggagatcgcctccgcgactggttccaactgctgcacgagaactccaagcagaacggttctgctagttcagtcgccgggcctgccagtggcctggacaagtcacttggggcgagttgtaaagattccattggatggatgttcagtaaattagacacgtccgccgacttgttcttggaccagacagaactggctgcaatcaacctggataaatatgaggtgtgtatccgacctttcttcaatagttgtgacacctataaagatggcagggtgtctactgccgaatggtgtttttgtttttggcgcgagaagccgccttgtcttgccgaactagaaaggatacagatccaagaggctgctaaaaagaagcctgggatcttcatccccagctgcgacgaggacggttactaccggaaaatgcagtgcgaccagagctccggcgattgctggtgcgtcgatcagctggggcttgagttaactggcacccgtacccatgggtctccggactgcgatgacattgtcgggttctctggagatttcggatccggggtaggttgggaggacgaagaagagaaggagaccgaggaagccggagaggaggcagaagaagaagagggtgaagccggtgaggctgatgacggggggtacatttggtag

SEQ ID NO: 135830 - DNA, 234 bp, synthetic construct
  misc_feature 1..234: note = Description of Artificial Sequence: Synthetic coding sequence
  source 1..234: mol_type = other DNA
atgagagcccccggttgcggtagactggtgctcccactgctgctcctggccgcagcagccctggccgaaggcgatgcaaagggactcaaggaaggagagacccctgggaattttatggaggacgagcaatggcttagttccatcagccagtacagcggcaagatcaaacactggaatagattccgtgacgtgccaagcagcgacccgccttcaacaacccaggctaccccgtag

SEQ ID NO: 135831 - DNA, 1275 bp, synthetic construct
  misc_feature 1..1275: note = Description of Artificial Sequence: Synthetic coding sequence
  source 1..1275: mol_type = other DNA
atgcgggccccggggtgcggcagactggtgttgcctttgttacttcttgccgctgccgcactggcagagggcgacgctaaggggctgaaagagggcgagactccaggaaacttcatggaagatgaacaatggctgtcctcaatcagccagtatagcgggaaaattaaacactggaacaggttcagagacggtatcgaggacgactatatcaaatcatgggaagacaaccagcagggcgatgaggccttggatacaaccaaggacccctgtcagaaggtgaagtgttcacggcacaaggtgtgtatcgcccagggttaccagcgggctatgtgcatttcccggaagaagttagaacaccgtatcaaacaacccaccgttaagcttcacgggaacaaggatagcatctgcaagccctgtcatatggcccaactggcctctgtatgtgggagcgacgggcacacatatagcagtgtttgtaaactggagcagcaggcatgtctgagtagtaagcagctggccgtgagatgtgagggtccatgcccatgccccacggaacaggcggctactagcacagccgacggaaagccggagacctgcacgggccaggatctggctgatctgggcgaccgcctcagggactggttccagcttctgcatgaaaactctaagcagaatggtagtgcaagcagtgtcgcaggccccgccagtggattagacaagagcctcggggcttcttgtaaggactctatcgggtggatgtttagtaagcttgacacttcagccgacctcttcctagaccaaaccgaactcgctgcaataaacctggataaatacgaggtctgcatcaggcccttcttcaacagttgcgacacttacaaggacggcagagtgtctactgccgaatggtgcttctgtttctggcgggagaagcccccctgtctggccgaactcgagagaatccagatccaggaggcggctaagaagaaaccgggtatatttatccctagttgcgatgaggatggatactatagaaagatgcagtgcgaccaaagctcgggcgattgttggtgcgtagatcagctgggtctggagctgaccggaacacggacacatggcagtcccgattgcgacgatatcgtgggattcagcggcgactttggtagcggcgtcgggtgggaggatgaagaagagaaagaaaccgaggaagcaggcgaggaagccgaagaagaagagggcgaggctggggaagccgatgatggaggctatatttggtag

SEQ ID NO: 135832 - DNA, 1311 bp, synthetic construct
  misc_feature 1..1311: note = Description of Artificial Sequence: Synthetic coding sequence
  source 1..1311: mol_type = other DNA
atgctcaaggtgtcagcagtgctgtgtgtttgtgcagccgcatggtgttctcagtccctggccgcggccgctgctgttgcagccgccggtgggagaagtgatggtggaaatttcctagatgacaagcagtggctgacgacaatttcccaatacgacaaagaggtgggtcagtggaataagtttcgcgatgaggttgaggatgactatttcaggacttggtctccgggcaagccctttgaccaggctctggatcctgcaaaggacccgtgcctaaagatgaaatgtagccggcacaaggtctgtattgcgcaagattctcaaacagcggtctgtatctcgcatagaagactgacacatcggatgaaggaggcaggagtggatcacaggcagtggagagggccaattctgagtacttgtaagcagtgcccggttgtttacccctcccccgtgtgtggctctgacgggcacacctattcttttcaatgtaaactggaatatcaggcctgtgtgctggggaagcagatctctgtcaagtgcgaagggcactgcccttgcccgagcgacaaaccgacttctaccagtagaaacgtgaaacgggcctgttcggacctcgaatttagagaagttgctaatcgattgagagactggtttaaagccctacacgagtctggaagccagaacaagaagaccaagaccttactgagaccagaaagatcaagattcgacacgagcattcttcctatttgcaaggactccctgggatggatgtttaatcgtcttgacacaaattacgaccttctgctggaccagtccgagctgcgtagcatctacctcgacaaaaacgagcagtgcacaaaggctttctttaattcctgtgatacctataaggactccctcatatcaaacaatgagtggtgctactgctttcagaggcagcaggaccctccctgccaaaccgagctttccaatatccagaagcgccagggtgtcaagaaactcctgggccaatatatccccttatgcgatgaagacggatactacaagcccacgcagtgccacggctctgtcggacagtgttggtgcgtggaccgttacggaaacgaggtgatgggcagccggatcaacggtgtggccgattgtgccatagatttcgagatctccggggactttgcttctggcgactttcatgaatggacagatgatgaggacgatgaggacgatattatgaatgatgaggatgagatcgaggatgatgacgaggatgagggcgacgatgacgacgggggtgacgaccacgatgtctacatctag

SEQ ID NO: 135833 - DNA, 1302 bp, synthetic construct
  misc_feature 1..1302: note = Description of Artificial Sequence: Synthetic coding sequence
  source 1..1302: mol_type = other DNA
atgctgaaggtgtcagccgtattgtgtgtctgtgctgcagcctggtgctcacagagcctggcagccgccgccgctgtcgccgctgccggtggaagaagcgatggcggaaatttcctcgacgacaagcagtggctgactacgattagtcagtacgacaaagaggtgggacagtggaacaagtttagagacgacgattattttaggacgtggtcccctggcaaacccttcgaccaggctctcgacccagctaaggacccctgcttaaagatgaagtgctcacgccataaagtgtgtatcgctcaggactctcagaccgccgtgtgcattagtcacagacgcctgacccatcgcatgaaggaagccggtgtagaccaccggcaatggcgaggacccattctatccacttgtaagcagtgcccagtggtttatccatctcctgtgtgcggaagtgacgggcacacatactcgttccagtgtaaactcgaataccaggcttgcgtattgggcaaacagatttctgttaagtgtgaagggcattgcccttgtccgtctgacaagccaacaagtacttctcgaaacgtcaaacgggcctgtagcgacctggaatttcgcgaggttgcaaacaggctgagagactggttcaaggccctgcacgaaagtggatctcaaaacaagaagacgaagacccttcttcgtccagagaggagccggtttgacacatcaattttgccaatctgcaaggactcactgggctggatgtttaacaggctggatacaaactacgacctgctgctcgatcaaagtgagctgagaagtatttatttagacaagaacgagcagtgcaccaaggcttttttcaacagctgtgacacttataaggactctttaattagcaacaatgagtggtgctactgtttccaacgccaacaggatcctccatgccagacagaattaagtaatatccagaagagacagggagttaagaagcttctgggccagtatatcccactttgtgatgaagatgggtattacaaaccgactcagtgtcacggttccgttggccagtgctggtgcgtggaccgttacggaaatgaagttatggggtcacgtatcaacggggtggccgactgtgcaatcgactttgagatttccggcgatttcgcttcaggcgactttcacgaatggacggatgatgaggatgacgaggacgatattatgaacgacgaggatgagatcgaggatgatgacgaagacgagggagatgatgacgatggaggcgacgatcacgacgtctatatctag

SEQ ID NO: 135834 - DNA, 1158 bp, synthetic construct
  misc_feature 1..1158: note = Description of Artificial Sequence: Synthetic coding sequence
  source 1..1158: mol_type = other DNA
atgattacccaggatcacatccacatgagcagcggcctcagtcaggacgattattttaggacgtggagtcccggcaaaccattcgaccaagcacttgatccagccaaggacccttgcctaaaaatgaagtgctcacgccataaggtgtgcatcgcccaggatagtcagaccgcagtttgtatcagccatcgtagactgacacacagaatgaaggaggcaggggttgaccaccgtcagtggcgaggccccattctttccacttgtaaacaatgtccggtcgtgtatccttcacccgtgtgcgggtctgatgggcatacttatagttttcagtgcaagttagagtatcaagcgtgcgtcttagggaaacagatctcggtcaagtgtgagggacactgtccttgtccgtccgataagccgacttccactagccgcaacgtgaaaagagcttgcagcgacttggaattccgcgaagtcgcaaaccgcctgagagattggttcaaagcgttacatgagagcggctcccagaacaagaagactaaaactttgctgcggcccgagagatctagattcgacacgtccatactacctatttgcaaggattcgctgggatggatgttcaacagactggacacaaactatgacctactcctagaccaatccgagctgagaagcatttatctggacaaaaatgaacagtgcacaaaagctttctttaacagttgtgacacttacaaggactcgctcatatcaaacaacgaatggtgttactgtttccaacgacaacaggaccctccgtgtcagacagaattgtccaatatccaaaagaggcagggcgtgaagaagcttttaggccaatatattccactttgcgacgaggatgggtactataagcccacacagtgccatgggtcagtgggccagtgctggtgcgtggaccggtatggcaatgaggtgatgggctcacggatcaacggtgtagccgactgcgccattgattttgagatctcaggtgactttgctagcggtgactttcatgaatggactgatgacgaggatgacgaggacgatatcatgaacgatgaggacgaaatcgaggacgacgatgaagacgaaggagatgatgacgacgggggggacgatcacgatgtttacatctag

SEQ ID NO: 135835 - DNA, 1311 bp, synthetic construct
  misc_feature 1..1311: note = Description of Artificial Sequence: Synthetic coding sequence
  source 1..1311: mol_type = other DNA
atgctaaaagtgtccgcagtcttgtgcgtgtgcgccgctgcatggtgttcccagagtctcgctgctgccgctgccgtggcagctgccggcggaaggagcgacggaggcaattttctagatgataaacaatggctcaccaccatctcccagtacgataaagaagtggggcagtggaacaagtttcgagatgaggtggaggacgattatttcagaacatggtcacctggtaaacctttcgaccaggcacttgacccggcaaaagacccttgtctgaagatgaaatgttctaggcacaaagtatgcattgcgcaggattcccagaccgccgtgtgtatctcacaccgccggttgactcaccgaatgaaagaagcaggagtggaccaccggcagtggagaggacccatactaagcacctgtaagcagtgtccagtcgtctaccctagccccgtgtgcggcagtgacggtcacacctatagttttcaatgtaagctggagtatcaggcctgtgtcctgggtaagcagattagtgttaaatgtgaaggacattgtccttgcccttcagataaaccaactagcacatctcgaaatgtcaaaagggcatgcagcgatctggaattccgcgaggtggccaaccgcctccgagattggtttaaggcactgcacgaatcgggaagccagaataagaagacaaaaacacttctgagaccagagcgatcacggttcgacaccagcatacttcccatctgcaaggactctctgggctggatgttcaacaggctggatacgaactacgatctgctccttgaccagtcagagctgcgcagcatctacttggataagaatgagcaatgtaccaaggctttctttaacagctgtgatacatataaagacagcctcatttcgaacaacgagtggtgctactgtttccagaggcaacaagatcctccctgccaaacagagttgtctaatatccagaagagacagggggtaaaaaagctcctcggccaatatatccccctgtgcgatgaagacgggtactataaaccaactcagtgccacggctcagttggtcagtgttggtgcgttgaccgatatgggaacgaagtcatgggttcaaggattaatggggtggctgactgtgcaatagatttcgagatctccggagacttcgcctctggcgatttccatgaatggaccgacgacgaagatgacgaagacgatataatgaacgacgaagacgagatagaagacgacgacgaggacgagggggatgatgacgatgggggggacgaccacgatgtctacatctag

SEQ ID NO: 135836 - DNA, 1302 bp, synthetic construct
  misc_feature 1..1302: note = Description of Artificial Sequence: Synthetic coding sequence
  source 1..1302: mol_type = other DNA
atgctcaaagtgtctgctgtgctgtgcgtttgtgccgccgcatggtgcagccagtctctggcagcagccgctgccgtggctgccgccggcggccgctccgacgggggcaacttcctcgatgacaagcaatggctgacgacaatttcccagtatgacaaagaggtcgggcagtggaacaaatttagagacgacgactactttaggacttggtccccagggaagcccttcgaccaagctcttgaccctgccaaggatccttgcttgaaaatgaagtgttctcggcacaaagtgtgcatcgcgcaggatagtcagacagcagtctgtatttcccatcggagacttacacatcgtatgaaggaagccggagtcgatcatagacagtggcggggacctatcctgtctacgtgcaagcagtgtccagttgtgtaccccagcccagtatgcggcagtgacggtcatacctacagtttccagtgcaagctcgaataccaggcgtgcgtcctgggcaagcaaattagcgtgaagtgcgaagggcactgtccttgtccaagcgataagccgacaagcacttctcgtaacgtgaaacgcgcctgtagcgaccttgaattccgcgaggtggctaataggcttcgggactggtttaaagccctccatgagagcgggtcccagaacaagaaaaccaaaactctgctccggcccgaacgttcccggtttgacacttcaatcctgcctatctgtaaggatagcttgggatggatgttcaaccgactcgacacaaactatgatctgctcctggatcagtcggaactccggtccatctaccttgacaaaaatgagcagtgtaccaaagcttttttcaattcttgtgatacttataaagattccttgatatccaacaacgaatggtgctattgcttccaaagacaacaagaccccccgtgtcagacagagctatcaaatatccagaagcgacaaggcgtcaagaagcttctggggcaatatattccgttgtgcgacgaagacggatactataagccaacccagtgtcacgggtcagtgggccagtgctggtgcgtcgatcgatatggcaacgaagtgatgggatctcggattaacggggttgctgactgcgcaattgacttcgaaattagcggcgacttcgcttctggggacttccacgagtggacggacgatgaagacgatgaggacgacattatgaacgacgaggatgagatcgaggacgacgatgaggacgagggtgacgatgacgatgggggtgatgaccacgatgtttacatttag

SEQ ID NO: 135837 - DNA, 348 bp, synthetic construct
  misc_feature 1..348: note = Description of Artificial Sequence: Synthetic coding sequence
  source 1..348: mol_type = other DNA
atgctgaaggtcagcgcggttttatgcgtctgcgcggctgcatggtgcagccagagcctcgccgcagccgctgctgtagccgcagccggagggcgcagtgatggcggaaactttctggatgataagcaatggctcacgactatctcacagtacgacaaagaagtcggccaatggaacaagttcagagacgaggtcgaagacgattatttccgaacctggagtcccggaaagccctttgatcaagctctcgatcccgccaaggatccatgtctcaagatgaagtgttcaaggcataaagtatgtattgcacaggattcccaaacggcggtatgcatctctcatagatag

SEQ ID NO: 135838 - DNA, 1311 bp, synthetic construct
  misc_feature 1..1311: note = Description of Artificial Sequence: Synthetic coding sequence
  source 1..1311: mol_type = other DNA
atgctgaaagtgtccgcggtcttgtgtgtgtgtgctgcagcgtggtgttcacaatcactggctgccgctgccgccgtggctgcagccggcggacgctccgacggcggaaactttctggacgacaaacagtggcttaccactataagccagtacgacaaggaagtaggccagtggaataaattcagagacgaggtcgaggacgattatttccgaacatggagccctgggaagccttttgatcaggccctggacccagctaaagacccttgcctgaagatgaagtgctctcgtcacaaagtctgcatcgcacaagattcgcagactgccgtgtgtatcagtcaccgccgcctgactcatagaatgaaagaagcgggcgtggaccaccgccagtggcgggggcccatactgtctacctgtaaacagtgccctgtggtatacccgtcccctgtgtgtgggagcgatgggcacacatattccttccagtgcaagcttgaatatcaggcatgcgtccttggaaagcagattagtgttaaatgcgagggtcactgcccgtgcccttctgataagcccacctctaccagtagaaacgtgaagagggcttgttctgatttagaatttcgggaagtcgccaataggctcagggactggtttaaagctctgcacgagtcaggctcccagaataaaaagaccaagacactgcttcgccccgaacggtctcggttcgacacatctatcttacctatctgtaaggattccctggggtggatgtttaacaggcttgataccaattatgatctgctgctggaccaaagtgagctgaggtcgatttatttggataaaaatgagcagtgtacaaaggcgttttttaattcctgcgacacttacaaggattctcttatctccaataatgagtggtgttactgttttcagcggcagcaggacccgccgtgccagacagagctctcaaacatacagaaaagacagggagtcaagaagctgttaggccagtatattccactgtgtgacgaagacgggtactataagcctacacagtgccacggctccgttgggcagtgttggtgtgttgatcgctacgggaatgaggtgatgggctctcgaattaacggtgtagccgactgtgctatagactttgaaatttcaggagattttgcttccggtgatttccacgagtggacagacgacgaggatgacgaagacgatatcatgaacgatgaggatgagattgaggacgacgacgaggacgagggtgacgatgacgacggaggcgacgaccatgacgtgtacatctag

SEQ ID NO: 135839 - DNA, 486 bp, synthetic construct
  misc_feature 1..486: note = Description of Artificial Sequence: Synthetic coding sequence
  source 1..486: mol_type = other DNA
atgcttaaggtgagcgccgtcctgtgcgtgtgtgcggcggcttggtgtagtcagtcccttgccgctgccgctgcagtagccgctgcaggcggacgatcagacggcggcaatttccttgatgataagcagtggttgacgacgatcagccagtatgataaggaggtaggacagtggaacaagtttcgtgacgacgactacttccgcacctggtctccaggaaagccattcgaccaagctctggaccccgcaaaagacccctgtctgaagatgaaatgctccaggcataaagtttgcatcgcgcaagatagccagactgccgtgtgcatctctcatcgtaggctgacgcatcgcatgaaagaagccggagtggatcaccggcagtggagaggacctattttaagcacctgtaaacagtgtcctgtggtgtatcctagccctgtctgcggttctgacggacatacttacagctttcaatgtaagttgtag

SEQ ID NO: 135840 - DNA, 522 bp, synthetic construct
  misc_feature 1..522: note = Description of Artificial Sequence: Synthetic coding sequence
  source 1..522: mol_type = other DNA
atgctgaaagtgagcgcggtgctgtgtgtttgcgccgccgcttggtgctcgcagtctctggccgcagctgcggccgtagccgcagcaggcggtagatccgatggcggcaattttctggatgataagcagtggttaacaaccatatcccagtatgataaagaggtgggccagtggaacaaattcagggacgatgattatttccgcacctggagccctgggaaaccgttcgatcaggcttgtagtgacctggagtttagggaggtggcgaatcgcctcagggactggtttaaggcactccatgagtccggcagccagaacaagaagacaaagacgctgctgagaccagagagaagtagattcgacacatcgattttgcccatctgcaaagactccctgggatggatgttcaacagactggacactaactacgatctgcttcttgaccagtccgagctacgaagcatctacctggacaagaacgagcaatgtaccaaagcttttttcaatagctgtgacacctag

SEQ ID NO: 135841 - DNA, 1182 bp, synthetic construct
  misc_feature 1..1182: note = Description of Artificial Sequence: Synthetic coding sequence
  source 1..1182: mol_type = other DNA
atgttgaaggttagcgccgtgctctgtgtttgtgctgctgcttggtgctcacaatccctggcggccgccgcagccgtcgccgcagcaggtgggcggagtgatggaggtaatttcctggatgacaagcagtggttgacaactataagtcaatacgacaaggaggtgggacagtggaataaattccgcgatgatgattacttcagaacttggtcacccgggaagccattcgatcaggccctagatccagcaaaagatccttgtctgaaaatgaaatgcagtaggcacaaagtgtgtattgctcaagactcacagacggccgtctgcatctcccataggcgactgacgcaccgcatgaaggaggctggcgtcgatcaccgtcagtggcgggggcctattttgagcacctgcaaacaatgtccagtcgtttatccctccccagtatgcggctccgatggacacacctattcctttcagtgtaagctggagtaccaggcctgcgtgcttgggaaacagatttccgtgaagtgcgaaggccattgtccttgtccgtccgataaaccgacttcaactagccgtaacgtgaaaaggggatttgatactagcattctccctatctgcaaagactctttggggtggatgttcaacaggctggatactaactacgacctcctgctcgaccaatcagaactccgctctatatacttggataagaacgaacagtgtacaaaggctttctttaatagctgcgatacttataaggattcattaatttccaacaacgagtggtgctattgcttccagcgacaacaggaccctccatgtcagaccgaattgagtaatatccagaagaggcagggcgttaagaaactgctggggcagtacatacctctgtgcgacgaagatggctactacaaaccaacacagtgtcacgggagcgttggacagtgttggtgcgttgaccggtatggaaatgaggtcatgggctctagaatcaatggagtggccgattgtgcaatagactttgagataagcggcgatttcgctagtggagatttccacgaatggaccgacgatgaggatgatgaagatgacattatgaatgatgaggacgagatcgaagacgatgacgaagatgagggcgacgatgacgatggtggagacgaccatgatgtgtacatttag

SEQ ID NO: 135842 - DNA, 1302 bp, synthetic construct
  misc_feature 1..1302: note = Description of Artificial Sequence: Synthetic coding sequence
  source 1..1302: mol_type = other DNA
atgctgaaggtgtccgcagtgctctgtgtgtgcgctgcagcttggtgttcacagtcattggcagctgcagcagccgtggctgccgccggtgggaggtcggatggggggaatttccttgacgacaaacaatggctcaccaccatctcccagtatgataaagaagtcggacagtggaacaagttcagagacgatgattattttagaacatggagtccaggtaagccatttgatcaagccctggacccggcaaaagatccttgcctcaagatgaagtgcagccgtcacaaggtgtgcattgcgcaggatagccagacagcggtctgtattagccaccggcgtttaacgcatcgtatgaaagaggctggggtggaccacaggcagtggaggggtcccattctatccacatgcaagcaatgtcccgttgtttacccctcacctgtttgtggtagtgacggacacacctactctttccaatgtaagttagaataccaggcttgcgttctgggtaaacagatctcagtcaaatgcgaaggtcattgtccgtgcccttcagataaacctacgagtacctctagaaatgtgaagagggcctgctccgaccttgagtttcgagaggtcgccaaccgccttagagactggtttaaggctctacacgagtcgggcagccagaacaaaaaaacaaagaccctgcttcggcccgagagaagccggttcgatacgtcaatcctgccgatctgtaaagattcacttggctggatgtttaatcggctggatactaactacgacttgttgctggaccaatcggagttaagatccatctatttagacaaaaatgaacagtgtacaaaggctttctttaactcgtgtgacacatataaggactcactcatttcaaacaatgaatggtgctactgctttcagcgccagcaggacccgccttgtcaaacagagctttccaacatccagaaaaggcagggcgtgaagaagttgctgggtcagtatattcctctttgcgacgaagatggctactacaagccgactcaatgtcatggatccgtggggcagtgctggtgcgtggaccgatacggcaatgaggtgatgggttcccggattaacggggttgcagattgcgccatcgatttcgaaatttccggcgatttcgcgagcggtgattttcacgagtggaccgatgacgaggacgatgaggacgatatcatgaacgacgaggacgagattgaagatgacgacgaagacgagggcgacgacgacgacggcggagatgatcacgacgtctacatttag

SEQ ID NO: 135843 - DNA, 1311 bp, synthetic construct
  misc_feature 1..1311: note = Description of Artificial Sequence: Synthetic coding sequence
  source 1..1311: mol_type = other DNA
atgctgaaggtctcagcagttctatgcgtctgtgcggcagcctggtgctcccagtccctggcggctgcggctgctgtggctgctgctggcggcagatctgatggaggcaactttctggatgacaaacagtggctcacaaccatttcacagtatgacaaggaagttggccagtggaataagtttagagacgaggtagaggatgactactttcgaacgtggtcacccggcaaacccttcgatcaggccctagatcctgcaaaggatccttgtctgaaaatgaagtgcagtaggcacaaggtctgcatagcacaggattcccagactgccgtctgcatcagtcacaggagattgacgcatcgaatgaaggaggcgggcgtggaccatcgccagtggcgggggccaatactgtcaacctgcaaacaatgccccgtggtctacccaagccctgtctgtggaagcgacggccacacctattcatttcagtgtaaattagagtaccaggcgtgcgtacttggcaagcagattagtgtcaaatgtgagggacactgtccatgtccttcggataaacctacctcgacttctagaaacgtcaaacgggcatgtagcgaccttgagtttcgtgaggttgctaatagactgcgtgattggtttaaagccctgcatgaatccggcagtcagaacaaaaagacaaagactctacttcggcctgagcggagccgcttcgatacttccattcttccaatttgcaaggactccctaggttggatgttcaacagactggacaccaactatgacctgctgctggatcagtctgagctgagatccatctatttagacaaaaatgaacaatgcaccaaagcattcttcaattcgtgcgatacatacaaggactctctcatcagcaataacgagtggtgttactgtttccagagacagcaggatccaccttgtcagaccgaactgtctaatattcaaaaaagacagggtgtgaagaagcttctgggacagtacatcccactatgcgacgaggacggctattacaaaccaactcaatgccacggatctgttggacagtgctggtgtgtggaccggtatggcaacgaggtaatgggaagccggatcaacggagtcgctgactgtgcgatcgatttcgagatctccggggacttcgcctcaggcgattttcacgagtggaccgacgatgaggatgatgaagatgatatcatgaacgatgaagatgagattgaggacgacgatgaggacgaaggggatgatgacgatgggggagacgaccatgatgtttatatctag

SEQ ID NO: 135844 - DNA, 348 bp, synthetic construct
  misc_feature 1..348: note = Description of Artificial Sequence: Synthetic coding sequence
  source 1..348: mol_type = other DNA
atgcttaaagtaagcgcagtcctgtgcgtgtgcgcggccgcctggtgcagtcagagcttggccgcggccgctgctgtagctgcagcaggagggagatccgacggcgggaattttctggatgataaacaatggctgactacgatcagccagtacgacaaggaggtaggccagtggaataagttccgtgatgaggtggaggacgactacttccgaacgtggtcccctggtaagccgttcgatcaggccctggatccagccaaggatccttgcctaaagatgaaatgttccaggcataaggtgtgtattgcccaggatagtcaaactgcagtgtgtatctctcatcggtag

SEQ ID NO: 135845 - DNA, 942 bp, synthetic construct
  misc_feature 1..942: note = Description of Artificial Sequence: Synthetic coding sequence
  source 1..942: mol_type = other DNA
atgctgaaggtatctgccgtgctgtgcgtgtgtgccgccgcttggtgctcccagagcctggctgcagctgccgcagttgcggcggctggaggccgctccgatgggggaaatttccttgatgataaacagtggctaacaactatatcccagtacgacaaggaagttggccagtggaacaagtttagggacgatgattattttcggacctggtctcccggaaagcccttcgaccaggcgttagatcctgccaaagatccgtgcctgaagatgaaatgcagtcgccacaaggtttgcatcgcacaggacagccaaactgcagtttgtattagccacagacgactcacccatcgtatgaaagaagccggggtcgaccacagacagtggcgcggaccaattctgtccacatgcaaacagtgtcccgtcgtctatccgtctcccgtgtgtgggtctgacggccacacctatagcttccagtgtaagctcgaatatcaagcatgcgtcctcggcaaacagatttctgtgaaatgcgaggggcactgtccctgtcctagcgacaagcccacatcgacgagtaggaatgtaaaacgcgcgtgctctgaccttgaattccgggaagttgcgaatcgtctccgcgactggttcaaggccctgcacgagtccggctctcagaacaagaagaccaagactcttctgcgccctgagcgaagccgtttcgatacctctattctacccatatgtaaagactctctggggtggatgttcaacagattggatacaaattacgatctgctgctcgaccaaagcgagctgcgtagcatctatctggacaaaaacgagcaatgtactaaagcatttttcaactcgtgcgacacgtacaaagacagtctcatctctaataacgagtggtgctactgcttccagcggcagcagggaaaaaggtag

SEQ ID NO: 135846 - DNA, 1017 bp, synthetic construct
  misc_feature 1..1017: note = Description of Artificial Sequence: Synthetic coding sequence
  source 1..1017: mol_type = other DNA
atgctgaaagtctcagccgtgttgtgcgtctgtgctgctgcatggtgttcccaatctcttgccgcggccgcggctgttgctgccgctggcggtaggagtgacggcggaaactttttggatgataagcagtggctgactacgatctctcagtatgacaaagaggtgggtcagtggaacaaatttcgcgattgtaagctggaataccaggcatgtgtactgggcaaacagattagtgttaaatgcgagggccattgtccttgcccctcagataagcccacatctacaagccggaacgtgaaacgggcttgctcggatctggagttccgtgaagtggccaaccggttgcgggactggttcaaggcactgcatgaatcaggctcgcaaaataaaaagaccaagaccctcttgcgccccgagcgatcaagatttgacacctctatcctcccaatttgtaaggattcactcggatggatgttcaaccgacttgataccaattatgacctgttgctcgatcagagcgaactaaggtcaatctatctcgacaaaaacgaacagtgtaccaaggctttcttcaacagttgcgacacgtataaagacagcctaatctccaacaacgagtggtgctattgcttccagcgccagcaggaccctccctgccaaactgagttgtcgaatatccagaaacgccagggcgtgaaaaaacttctgggacaatatattccattgtgtgacgaggacggttactacaagcctacccaatgtcatgggagtgttgggcagtgttggtgcgtggaccgatatggaaatgaggtgatgggctctcgtattaacggagtggccgactgcgcgatcgattttgaaatttcaggcgactttgcaagcggagattttcatgagtggacagacgatgaggatgacgaggatgacattatgaacgatgaagacgagatcgaggacgatgatgaggacgagggagatgacgacgacggcggcgacgatcacgatgtgtatatctag

SEQ ID NO: 135847 - DNA, 1023 bp, synthetic construct
  misc_feature 1..1023: note = Description of Artificial Sequence: Synthetic coding sequence
  source 1..1023: mol_type = other DNA
atgataaacaacgggagccctcagtccctaagtatgactcggaagagcgacagtgggactaacagtgaaacaatgaaagaagctggtgtggaccatcgtcagtggcgaggcccaatccttagcacttgcaagcaatgccccgtcgtctacccttcaccagtgtgcgggtcagatgggcatacgtactcctttcaatgtaaactggagtaccaggcctgcgtcttgggtaaacagattagtgtcaagtgtgagggccactgcccttgcccatccgacaagcccacgtctactagccgaaacgtaaaaagagcttgttccgacctcgagttcagggaggtggctaaccgcctgcgggactggttcaaagcacttcacgagtctggctcacagaacaaaaaaactaagactctgcttcgccccgagcggagcagattcgacacctccatactgccaatttgcaaggattccctaggatggatgtttaaccgactggacactaactacgacttactgctggaccagagtgaattacggagtatctacctagacaagaacgaacaatgcaccaaagctttctttaactcatgcgatacttacaaggattcactcatctccaataatgaatggtgttattgctttcagagacagcaggaccccccttgtcaaactgaactgagcaatattcaaaaaagacagggtgtcaaaaagctgctgggtcagtacattccactatgcgatgaggatggctactataaacctacccagtgccatgggtctgtgggtcagtgctggtgcgtggatagatacgggaatgaggttatgggttccagaatcaacggcgtagctgattgtgccatagactttgaaataagcggtgatttcgccagcggggactttcatgagtggaccgatgacgaggacgatgaggatgatatcatgaatgacgaagatgagatcgaagatgacgacgaggatgagggagacgatgatgacggcggcgatgaccacgacgtttatatatag

SEQ ID NO: 135848 - DNA, 915 bp, synthetic construct
  misc_feature 1..915: note = Description of Artificial Sequence: Synthetic coding sequence
  source 1..915: mol_type = other DNA
atgaagtgctctcggcacaaagtttgtatcgctcaagactcacaaaccgcagtctgcattagtcacaggcggctcacacatcgcatgaaggaggcaggtgttgatcacagacagtggcgagggcccatcttgtcgacctgcaaacagtgccctgtcgtctaccccagccccgtgtgcggatctgacggccatacctactcctttcagtgcaagcttgaataccaggcatgcgtgttgggaaaacagatttctgttaagtgcgaggggcattgcccctgtccctcagacaagccgacaagtacatccagaaatgtcaagcgcggattcgacaccagtatcctcccgatctgcaaagattctctgggttggatgtttaaccgtctggatacaaattacgacctgctcttagatcagagtgagctgaggtctatttaccttgacaagaatgaacaatgcaccaaggcgttctttaacagctgtgacacgtacaaggacagtctgattagcaataatgagtggtgctactgctttcagcgccagcaagacccaccatgccagacagagctctccaacatacaaaagagacagggagtaaaaaaattattagggcagtatatccccctctgtgacgaagatgggtattacaagccgacccaatgccacggctctgtgggccaatgctggtgcgtggaccggtatggaaatgaggtaatgggctcccgaattaacggggtggctgactgcgcaatcgattttgagatctctggcgacttcgcctctggtgactttcatgaatggacagatgatgaggatgatgaagacgatataatgaatgatgaagacgaaattgaagatgatgacgaggatgagggagatgatgacgacggaggtgatgatcacgacgtgtacatctag

SEQ ID NO: 135849 - DNA, 951 bp, synthetic construct
  misc_feature 1..951: note = Description of Artificial Sequence: Synthetic coding sequence
  source 1..951: mol_type = other DNA
atgaaagaggcaggcgtggaccacagacagtggcgtggtccaatactcagcacatgcaaacagtgtccagttgtatacccctcaccagtctgtggcagcgacggccacacctattccttccaatgtaaactggagtatcaagcgtgtgtgttaggcaagcaaattagcgtgaagtgtgaaggacattgcccctgtccctccgacaagccaaccagcaccagcaggaacgtgaaacgggcttgctctgacctcgaatttcgggaggtggccaatcgattgcgagattggtttaaggcccttcatgagagtggcagccagaacaagaagactaagactttactgagacctgagaggtccaggttcgacaccagcatcttgcctatctgcaaggattccctcggttggatgttcaatagattggatactaactatgaccttctgctggaccagagcgagttgaggagcatctacctcgacaagaatgaacagtgcacgaaagccttctttaacagctgtgacacttacaaggactcattgatatcaaataacgaatggtgctactgttttcagcgccagcaagacccaccctgccagacagagctcagtaatattcaaaaaagacagggagtcaaaaaactgttggggcaatatatcccactgtgcgacgaagacgggtactacaagcccacacagtgtcacgggagtgtgggccagtgttggtgcgtagaccgctacgggaatgaagttatgggctccaggattaatggggtggccgactgcgccattgacttcgagatttccggtgatttcgcctctggagactttcatgagtggaccgacgatgaggacgatgaggatgatatcatgaacgacgaggacgaaatcgaggatgacgatgaggacgagggagatgatgacgatgggggggacgatcatgacgtatacatttag

SEQ ID NO: 135850 - DNA, 1017 bp, synthetic construct
  misc_feature 1..1017: note = Description of Artificial Sequence: Synthetic coding sequence
  source 1..1017: mol_type = other DNA
atgctgaaggtgagcgccgtgctgtgcgtctgcgcagcggcgtggtgctcccagtctctagctgccgccgccgcagtggcagccgcaggaggacggagcgatggaggcaacttcctggacgacaagcagtggttgaccaccatctcccagtacgacaaggaggtgggtcagtggaacaagtttcgagattgcaaactggagtaccaggcgtgtgtgctgggaaaacagatctccgtgaagtgcgagggccactgtccgtgcccctccgacaaacccacctccactagtcggaacgtgaagcgggcttgctcggacttggaatttagagaagttgccaatagactgcgagactggttcaaagccctccacgagtcaggctcccagaacaaaaaaaccaaaacactgctgcggccagaacgtagtcggttcgacacctctattttgccaatatgtaaggatagccttgggtggatgttcaaccgcttggataccaattacgacctcttactggaccagagcgaattgaggagtatttaccttgataaaaatgaacagtgcacaaaggctttttttaacagctgcgatacttataaggactcactcataagcaataatgagtggtgttattgctttcaacgacagcaggatcccccctgccagaccgagctgtctaatatacaaaaaaggcaaggcgtcaagaaactgctcggccagtacattcctctgtgcgacgaggacgggtactataagcccacgcagtgccatggctcggtgggacagtgttggtgcgtggaccgctacggtaacgaggtaatgggcagtaggatcaatggcgttgcagactgtgctatagattttgagatctccggcgactttgccagcggcgactttcacgaatggacagatgatgaagacgatgaggatgacatcatgaacgacgaggatgagattgaagacgacgatgaggatgagggcgacgacgatgacggcggcgacgatcatgacgtgtatatttag

SEQ ID NO: 135851 - DNA, 13740 bp, synthetic construct
  misc_feature 1..13740: note = Description of Artificial Sequence: Synthetic coding sequence
  source 1..13740: mol_type = other DNA
atggagacgaaggaaaaccgatgggtgcctgtcaccgtgctgccagggtgtgtggggtgccggaccgtggcagcgttggccagctggacagtgagggacgtgaaagagagaatcttcgcggagactgggttccccgtgagcgaacagaggctttggagaggcgggcgggaactgtcagattggatcaagatcggggacctgacttccaagaattgccatctctttgtgaacctccaatcaaagggcctgaagggcgggggtagattcggacagaccaccccgcctctggttgacttcctcaaagacatcctccggcgctacccggagggaggacagattctaaaggagctaattcagaatgcagaagacgccggcgcaacagaggttaagtttctgtatgacgagacgcagtacggtacagaaacactctggtccaaggatatggcaccataccaagggcccgccctgtatgtttacaataacgcagtgtttacccccgaggactggcatggtatccaagagatcgcccggagtcgcaagaaagatgatccgttgaaggtgggtcgctttggcatcgggtttaactcagtataccacatcactgacgtaccatgcatctttagcggcgatcagattggtatgctggaccctcaccagacccttttcggacctcacgagtccggacagtgctggaatcttaaagacgattctaaggagatttccgaactaagcgatcagttcgcaccatttgtcggaattttcggttccactaaggaaacattcatcaatggaaatttccccggcaccttctttcggttccctctacggcttcaaccaagccagctctcaagcaacttgtataacaaacagaaagtgctggaactgttcgagagcttccgagctgacgcagatactgtgctgctgtttctgaagagcgttcaagatgtgagcctctacgtgagggaggccgatggcaccgagaaactggtgttccgtgtcacctcttctgaatccaaggctctaaaacatgagcgccccaatagtatcaagattctcggaacagctatttccaattattgtaagaagactcccagcaataatattacatgcgtgacctatcacgtaaatattgttttggaggaggaatcaacaaaagatgctcagaagaccagctggttggtgtgcaactctgttggcggaagggggatttcgtctaagctcgacagcctcgccgatgaactgaagtttgtgcctataatcggcatagctatgcccctctccagcagggacgatgaggccaagggcgcgaccagcgacttcagtggcaaagccttttgctttctccccctgcctcccggcgaagagagcagcactggtctgcctgtacacatctcagggttctttggcctcacagataataggcggagtataaaatggcgcgaactcgaccagtggcgggatcccgcagcactctggaatgagtttctcgtgatgaatgtggtgccaaaggcatacgctacactgattctggattccatcaagcgcctcgaaatggaaaaatcaagtgactttccactcagcgtggatgtcatttataaactatggcccgaagcgtctaaggtgaaggtgcattggcagcccgtcctcgagcctttgttctctgaattgctgcagaacgccgtgatttacagcatcagttgcgactgggtaagactggagcaggtgtacttttcagaacttgatgaaaatctagagtacacgaagaccgtgctgaactacctgcagagctccggcaaacagatcgccaaagtccctggaaatgtggatgccgccgtgcagctgacggccgcttctggtacgactcctgtaagaaaagtcacacctgcgtgggtacggcaggtacttaggaaatgtgctcatctgggctgcgcagaagagaagctgcacctgctggagttcgtgctctctgaccaggcatattcagagctccttgggctggagctactaccccttcagaatggtaatttcgtgcctttctcctcaagtgtaagcgaccaagacgtaatatatatcacttctgctgagtaccctagaagcctgtttccctccctggaaggcagatttattctcgataacttaaagccacacctggttgccgcactcaaggaggccgcccagactagagggaggccgtgcacccagctccagctgctcaaccccgagcgctttgcacggctgatcaaagaggtgatgaatactttctggcctggaagagaactcattgtgcagtggtatccctttgatgaaaaccgcaatcatccaagtgtctcgtggttgaagatggtatggaaaaatttgtacatccacttttctgaagacctgaccctgtttgacgagatgccactcatccccagaaccatactggaggagggccagacatgtgtggaactgatccggctgcgcataccaagtttagtgatcctggacgatgaatctgaagcccaactgccagagtttctggccgacatcgttcagaaactgggcggctttgtcctcaaaaaactggacgcctcaatccagcatcctttaataaagaaatacattcacagtcccctcccttctgcagtgctgcagatcatggagaaaatgcccctccagaagctctgtaatcagatcacaagcctgttaccaactcacaaggacgcgctccgtaagttcctggcatccctcacagactcctcagagaaagaaaaacgcataatccaagaactagccatatttaagagaatcaatcactcctcggaccaggggatttcttcgtatacaaaactgaagggatgtaaagtactccaccataccgctaaactgcccgccgatttgcgcctttccatctccgtaatcgattcatctgacgaagcaaccatcagactggccaatatgctcaaaatcgagcagctcaaaaccaccagttgcctgaagctggtgctgaaggatatcgaaaacgccttttattctcatgaagaggtaactcaactgatgctttgggtcctggagaatcttagttcgttaaagaatgagaatcctaatgtgctcgagtggctaactccactcaagtttattcaaatcagccaggaacagatggtatcggcgggtgagttgtttgaccctgacattgaagtgcttaaggatctgttctgtaacgaggaaggaacgtattttccaccctctgtgtttacctccccagatatcctccactctctgagacagattggtctgaagaacgaggcatctttgaaagaaaaagacgtagtccaggtcgccaagaagattgaggccctacaggtaggcgcctgcccagaccaggacgtgctgctcaaaaaagccaagacgctactccttgtcttgaataagaaccataccttacttcagtcatcggaggggaaaatgacgctgaagaagatcaaatgggttcccgcttgcaaggaacgaccaccaaattatcccggttctctggtgtggaagggagacctgtgcaatctgtgcgctccgccggacatgtgcgacgtggggcacgctatcctgataggatctagcctcccccttgtggagagtatccatgtgaatcttgaaaaagctttgggtatctttacaaagccctccctgtccgcggtgctgaaacacttcaaaatagtggtagactggtacagtagcaagacttttagcgatgaggattactatcagttccagcacattcttctcgagatctatgggtttatgcacgaccaccttaacgagggcaaagactctttccgtgcccttaagttcccctgggtctggactgggaagaaattctgcccattagcacaggcagttattaagccaatccacgatctcgatctgcagccctatcttcacaatgtcccaaaaacaatggccaaattccaccagctcttcaaggtctgcggctctattgaggaactaacctccgaccatatcagtatggtgattcagaaaatttacctgaagagcgaccaagatctgagcgagcaagagagcaaacagaatctccatctgatgttgaacatcattcggtggctgtatagtaaccagatcccagcgtcaccaaacaccccagttccgatccaccatagtaaaaaccccagtaagctaataatgaagcccatccatgagtgttgctactgtgatatcaaagtggacgacctgaacgatctcctggaggattccgttgaacctattattctagtgcacgaggacattccaatgaagactgccgagtggctcaaggtcccttgtctctctaccagactcattaaccccgagaacatgggtttcgaacagagtgggcagagggagccactgactgtaaggattaagaatatcctggaggagtacccctccgtgagcgacattttcaaggagctcctccagaacgccgatgatgctaacgcaacagaatgctcctttcttattgacatgagacggaatatggacattagggagaatttgttggatcccgggatggctgcatgtcacggccctgctctgtggagctttaataactcccagttcagcgatagcgatttcgtcaacatcacccgtctgggagagtccctgaaaagaggggaggtcgataaagttggcaagtttggattaggcttcaatagcgtttatcacattacagatattcccatcatcatgagccgcgagttcatgatcatgttcgaccccaatatcaatcatatcagtaagcatattaaggataaatcaaacccgggcattaaaattaactggtctaagcagcagaagcgattgaggaaattccctaaccagttcaaacctttcattgatgtgttcggttgtcaactgcctttaacagtggaggcaccatatagctacaacggcactctctttaggttgagctttaggacccagcaggaggcaaaggtcagtgaagtctcctcgacatgttacaatactgcagatatatacagcttggtggatgagttcagtctctgcgggcataggcttatcatctttacacagtccgtgaaatctatgtacctgaagtacctaaaaattgaggagactaatccgagcctcgcccaagataccgtcattatcaaaaaaaagtcatgctcttctaaagcgttaaacactccggtcctctcagtgttgaaggaagccgccaaactgatgaagacatgctcatctagcaacaagaagctgccctctgacgagcctaaatcctcgtgcattttacagatcaccgtggaggagttccaccacgtattcagacggatcgcagatttacagtctcctctcttccggggccccgacgatgatcctgccgctctgttcgaaatggcaaagtcgggacagagtaaaaaaccttcagatgaactgtcacagaaaactgtggagtgtaccacatggctcttgtgtacttgtatggacaccggcgaggcccttaaattcagcctatcggagtccgggagacggctcggcctcgtgccttgcggagcggttggtgtacagctgagcgagatccaagaccaaaaatggacagtgaagcctcacatcggcgaagtgttttgttatctgcccctccgcatcaaaaccggattaccggttcatatcaacgggtgctttgctgtgacttcaaatagaaaagaaatctggaaaacagatacaaaggggagatggaacactacgttcatgcgtcacgttattgttaaggcatacctgcaggtgctttccgttctgagagacctggctacctctggggaactcatggattacacatactacgccgtgtggccagatcctgacttggtccacgacgatttttccgtcatctgtcaaggtttttatgaggatatcgctcacggcaaggggaaggaactgactaaggtttttagcgacgggtcaacgtgggtgtccatgaaaaacgtccgcttcctcgatgactcaatcctgaagaggcgggatgtggggtctgcagccttcaagatttttctcaaatatttgaaaaagaccggctcaaaaaatctctgtgccgttgaactgccttcaagtgtaaagcttggctttgaggaggcaggctgcaaacagattctcttggagaacaccttcagtgagaagcaatttttctcggaggtattcttccctaatatacaggaaattgaagcagaactgcgggatccactcatgatcttcgttctgaacgaaaaagtggacgagtttagtggtgttcttcgggtgaccccatgcatcccatgctcccttgagggccatccattagtcctcccttcccggttgattcatcccgaaggcagggtggccaagctatttgacatcaaagatggacggtttccgtacggaagcacacaagactaccttaaccccatcatcctaatcaagctggttcaactcggcatggcgaaagacgatatactgtgggacgacatgctggaacgggccgtctctgtagctgagattaataaatccgatcacgtggccgcttgcctgaggtcttctatcctcctgtccctgatcgacgaaaagctgaagatccgggacccaagggccaaggattttgccgcaaagtatcagaccatccggttcctcccatttctgacaaaaccagctggcttttccctggattggaagggtaatagctttaaacctgaaacaatgtttgccgcaactgacctttacactgccgagcatcaagacatagtgtgcctgctgcagcccatcctgaatgaaaatagccacagcttccgaggatgcggctcagtgtccctcgcagtaaaagaattcctgggtcttctgaagaaaccaaccgtggacttggtgattaaccagcttaaagaagtggccaagtccgtggacgacggcattacactgtatcaagagaatatcaccaatgcctgctacaagtatttacatgaggctctgatgcagaacgaaattactaagatgtcaattatcgataaactgaaaccattctcctttatcctggtggaaaatgcttatgtggattcagagaaagtatccttccatttaaattttgaggcagccccatatctgtatcaactaccaaataaatacaaaaacaattttcgcgaactgttcgaaactgtgggggtgcggcagtcctgcacagtggaggatttcgccctagtattggaaagtatcgatcaggagcgaggaacgaaacaaatcactgaggagaactttcaactttgccgacggattataagcgaagggatctggtctttaatcagggaaaaaaaacaagaattttgcgaaaaaaactacggaaagatattacttccggatactaatctcatgcttctgcctgctaaatccctgtgctataacgactgtccttggatcaaggtgaaggatacaactgtgaaatattgtcacgcagatattccacgggaagtggccgtgaagttgggagctgtccctaaacgccataaggccctggaaagatacgcttctaacgtgtgttttacaacactcggcaccgagttcggtcagaaggagaagctgacctcacggattaagtcaattctgaacgcatacccttccgagaaggaaatgttgaaggagctcctgcagaatgcggatgatgccaaagccacagaaatctgttttgtcttcgatccacggcaacacccagttgacaggattttcgatgacaagtgggcccctttacagggaccagctctgtgcgtttataataaccagccctttactgaggatgatgtgcgcggaattcagaatctcgggaagggaacgaaggaaggaaatccctataagacggggcagtacggcatcggctttaattcagtatatcatatcacagactgccctagcttcattagcggcaatgatatcctttgtattttcgatccgcatgctcgctacgcgcccggagcaactagcatctcaccggggcgaatgtttcgcgacctggatgcagactttcgaactcagttctccgacgtactggatctctacctgggaacccactttaagctagataactgtaccatgtttagatttcccctgagaaacgcagagatggcaaaggtctcagaaatttcttccgtccctgcctccgaccggatggtccagaatttgcttgataaactgaggtccgatggcgccgaactgttgatgtttctgaaccacatggagaaaatctctatatgcgagattgataagagcacaggcgccctaaacgtgctgtatagcgtgaagggaaagataacagacggagaccgtctgaaaaggaagcaatttcacgcatccgttatcgacagcgtaaccaagaagcggcagctgaaggatatacccgtccaacaaatcacttacactatggatacagaggattctgaaggtaacctcaccacttggttgatttgcaatcgctccggttttagctccatggaaaaggttagtaagtccgtgatctctgcacataaaaatcaggacataaccttgtttccccggggaggcgtcgcggcatgtataacgcacaactacaagaaaccccatagagctttctgtttcttgcctctgagcctggagaccggcctgccctttcatgtgaacgggcactttgctctggattctgccaggagaaacctgtggcgggatgacaatggcgttggcgtgcgatcggactggaacaactcccttatgaccgctttgatcgcccctgcatatgtggaattgctgatccagctcaagaaacgatacttcccaggaagtgatccgacccttagcgttttgcagaatacccctatccacgtagtaaaggataccctcaagaagttcctgtctttctttcccgtaaataggttagatctgcagccagacctgtattgcctagtgaaggctttatacaactgtatccatgaggatatgaagcggctgctacccgtagtgcgggcgccaaatatagatggaagcgacttgcacagcgctgtcattataacctggataaacatgagtaccagtaacaagacccgaccgtttttcgacaatctcctgcaggatgagctgcaacatctgaagaatgccgactataacatcactactaggaaaaccgttgctgagaacgtgtatagactcaagcacctcctcctagagatcggattcaatctggtctataattgtgacgaaactgccaatttgtaccactgcttaatcgacgcagatattccagttagttacgtcacccccgcagatatccggagctttctgatgaccttcagcagtcccgacaccaactgccacattgggaaactgccgtgtcggcttcagcagactaatctaaagctgtttcactcactgaaacttctcgttgattactgttttaaggatgctgaggaaaacgaaattgaagttgaagggttacctctcctaattacgcttgactcagtgcttcagacattcgatgccaagaggccaaagtttctgacaacataccacgaactgatcccctcgagaaaggacctctttatgaataccttatacctgaagtactccaatatcctgctgaactgcaaggtagccaaggtatttgatatctcaagttttgcggatcttctgagctccgtactaccccgggagtataaaaccaagagttgtaccaaatggaaagataatttcgcttctgagtcctggctgaaaaatgcttggcattttatctccgaatccgtctccgtaaaagaggatcaggaggagacaaaacccacttttgacatagtcgtggatactcttaaagactgggcactgcttccaggtaccaagttcacagtatcagctaaccagttggtggtgcccgagggcgatgtgctgcttccactgagcctaatgcatattgctgttttcccgaacgctcagagcgacaaggtgtttcatgccctgatgaaagctggatgcatccagctcgcccttaataagatttgtagcaaggatagcgcattcgtaccgttactaagctgtcacaccgctaacattgagtcaccaactagtattctcaaggccctgcattacatggtacagacctctaccttcagagccgaaaagctggtggagaatgactttgaggcgctgctgatgtactttaactgtaatttaaatcacttaatgagccaggacgatatcaaaatcttgaaaagcctgccttgttataagtccatttctgggagatacgtctcgatcggtaaattcggaacctgttacgtactcaccaagtcaattcctagcgccgaggtggaaaagtggactcagtcttcttcctctgccttcttggaggagaaaattcatttgaaagagttatatgaggtcatagggtgcgtacccgtcgatgacctagaagtttacttaaagcacctgcttccaaaaatcgagaatctcagctatgacgccaaactggaacatcttatctatctgaaaaaccggttatcctcagcagaagagctctcagaaatcaaagaacagctattcgagaagctggagagtttattgatcatccatgacgcgaatagcaggctcaagcaggcaaagcatttctatgacagaactgttagggttttcgaagtgatgctgcccgagaagctcttcatcccaaatgatttctttaaaaaactagaacagttgattaagcccaagaaccacgtcacctttatgactagttgggtcgaattcttgcggaacattggtcttaagtatatattatctcaacagcagctgctgcagttcgccaaggagatctcagtgagggccaacactgagaactggtctaaagagaccctgcagaacacagtggacatcctgttgcatcatatttttcaggagcgaatggatcttctatccggtaatttcctcaaagagctgtctctgataccattcctgtgccccgagcgcgccccagccgaatttatacgttttcacccccagtatcaggaggtgaacggtacattgcccttgatcaaatttaatggagcgcaggtgaatcccaagtttaaacaatgtgacgtattacaactgctgtggacgtcgtgcccgatcctccctgaaaaggccactccgctttctattaaggaacaggaaggttctgacctggggccacaggaacagctagaacaagtactcaatatgctcaatgtcaatctcgacccccctctggacaaggtgatcaataactgccgcaacatttgtaacatcacaactttggatgaagaaatggtaaaaaccagagcaaaggttctaaggagcatatacgagttcctcagtgctgagaaaagagagtttcgtttccagctgcggggagtcgcctttgtaatggttgaagatgggtggaagctactcaaacctgaggaggtggtgattaaccttgagtatgagagcgacttcaaaccctatctctacaagctgcctttggaactggggacctttcatcagctgtttaagcacctgggaactgaggacattatctccacgaaacagtatgtggaagtgctctctcggatcttcaagaactctgaaggtaagcagctggaccctaacgagatgcgtacagtgaaaagggtggtgtccgggctgtttcgctctctgcagaatgatagcgtcaaggtgcggagcgacctggaaaacgtgcgagacctcgcattgtatcttccatcccaggacgggaggctggtgaagtccagcatccttgtgtttgacgatgctccgcattacaaaagccgcattcagggaaacattggggtacagatgcttgtcgacctgtcacagtgttatcttggaaaggatcacgggtttcacaccaagctgataatgctgttccctcagaagctgagaccacgccttttgtcctctatcttggaagagcagcttgatgaggagacccccaaggtgtgtcagtttggcgctctgtgctctctgcagggacgactgcagctgcttctcagtagcgagcagttcattaccgggctcatcagaatcatgaaacacgaaaacgataatgcattcttagctaatgaggagaaggcaattcgcctgtgcaaggctctcagagaaggcctgaaggtttcttgctttgagaagttacagaccacgctgcgggttaagggattcaacccaattccacactcccgaagtgagacttttgcatttttaaagaggttcgggaacgccgtcatactactctacattcaacactccgacagcaaagatatcaatttcctgctggcactggccatgacattgaaatcagccacagataatctgattagcgatacgagctatctaatcgctatgctgggctgcaatgatatataccgaatcggtgagaaactcgatagtctcggagtgaaatacgactcaagcgaaccttccaagctggagttacccatgccaggtacccctattccagcagagattcactatacattgttgatggatcctatgaacgtgttctatcctggggagtatgttggatacctagttgatgctgaggggggcgacatctatgggagttaccagcccacttatacatacgccattatcgtacaggaagttgagcgcgaagatgccgacaattcatctttccttggaaagatttaccagatcgatattggctactccgagtataagattgtgtcatctctagacctgtacaaattcagccggcccgaggaatcctctcagtccagggactcagccccatctactccgacttctccaaccgagtttctgacacccggactccggtccatccctcctctgttcagcggccgagagtcccacaagacttcatccaaacatcaatcccccaaaaaactgaaagtaaactcattaccagagattctcaaagaggtgacgtccgtcgtggaacaggcgtggaaactgcccgagtctgaacgcaagaaaatcataaggagactttacctgaagtggcaccccgacaaaaatcctgagaaccatgatattgccaatgaagtattcaagcacctgcagaacgagattaacaggctcgaaaagcaagcctttcttgaccagaacgccgatcgggccagtcgaagaaccttcagcacgagcgctagtaggtttcaaagtgacaaatatagcttccagagattctatacatcttggaaccaggaggccactagccacaaaagtgagaggcagcagcagaacaaagagaagtgtcccccgagtgccggccagacatacagtcagcgtttcttcgtgcctccaactttcaagagtgtgggcaatcccgtggaagccagaaggtggctgagacaggctcgggctaatttctctgctgcaagaaacgatttacacaaaaacgctaacgagtgggtgtgcttcaaatgttatttatccactaaactagcgctgattgcagctgattacgccgtgaggggaaaatcagataaagatgtgaagcctactgccctggcacagaaaatagaagagtattctcaacaactcgagggcctgaccaatgatgtccatacgcttgaagcctatggcgtggactcactcaagaccagataccccgatctactcccttttcctcagatccccaatgaccggtttaccagtgaagtagcgatgagagtgatggagtgcaccgcgtgtataatcatcaagctggagaactttatgcaacagaaagtctag
